(19) United States
(12) Patent Application Publication
(10) Pub. No.: US 2021/0170017 A1
(43) Pub. Date: Jun. 10, 2021

(54) NOVEL RSV RNA MOLECULES AND COMPOSITIONS FOR VACCINATION

(71) Applicant: CureVac AG, Tübingen (DE)

(72) Inventors: Johannes LUTZ, Tübingen (DE); Susanne RAUCH, Tübingen (DE); Regina HEIDENREICH, Tübingen (DE); Benjamin PETSCH, Tübingen (DE)

(73) Assignee: CureVac AG, Tübingen (DE)

(21) Appl. No.: 17/047,947

(22) PCT Filed: Apr. 17, 2019
(86) PCT No.: PCT/EP2019/060000

§ 371 Date: Oct. 15, 2020

(30) Foreign Application Priority Data
Apr. 17, 2018 (EP) PCT/EP2018/059799
Apr. 26, 2018 (EP) PCT/EP2018/060810
May 3, 2018 (EP) PCT/EP2018/061423

(51) Int. Cl. A61K 39/155; C07K 14/005; C12N 7/00; A61P 31/14; A61P 37/04; C12N 15/88

(52) U.S. Cl. CPC A61K 39/155; C07K 14/005; C12N 7/00; A61P 31/14; A61K 2039/53; C12N 15/88; C12N 2760/18522; C12N 2760/18534; A61P 37/04

(57) ABSTRACT

The present invention is directed to an artificial nucleic acid, particularly to an artificial RNA suitable for use in treatment and/or prophylaxis of an infection with Respiratory syncytial virus (RSV) or a disorder related to such an infection. The invention further concerns a method of treating or preventing a disorder or a disease, first and second medical uses of the artificial RNA, compositions, and vaccines. Further, the invention is directed to a kit, particularly to a kit of parts, comprising the artificial RNA, compositions and vaccines.

### INTRODUCTION

[0001] The present invention is directed to artificial RNA suitable for use in the treatment or prophylaxis of an infection with Respiratory syncytial virus (RSV) or of a disorder related to such an infection. In particular, the artificial RNA of the invention comprises at least one heterologous untranslated region (UTR), preferably a 3′-UTR and/or a 5′-UTR, and a coding region encoding at least one antigenic peptide or protein derived from RSV, in particular at least one antigenic peptide or protein derived from RSV fusion (F) protein. The artificial RNA is preferably characterized by increased expression efficacies of coding regions operably linked to said UTR elements. The present invention is also directed to compositions and vaccines comprising said artificial RNA in association with a polymeric carrier, a polycationic protein or peptide, or a lipid nanoparticle (LNP). Further, the invention concerns a kit, particularly a kit of parts comprising the artificial RNA or composition or vaccine. The invention is further directed to a method of treating or preventing a disorder or a disease, and first and second medical uses of the artificial RNA, composition, or vaccine.

[0002] Respiratory syncytial virus (RSV) is an enveloped non-segmented negative-strand RNA virus in the family Paramyxoviridae, genus Pneumovirus. It is the most common cause of bronchiolitis and pneumonia among children in their first year of life. RSV also causes repeated infections including severe lower respiratory tract disease, which may occur at any age, especially among the elderly or those with compromised cardiac, pulmonary, or immune systems. Currently, passive immunization is used to prevent severe illness caused by RSV infection, especially in infants with prematurity, bronchopulmonary dysplasia, or congenital heart disease.

[0003] Recommended treatment of RSV bronchiolitis primarily consists of respiratory support and hydration. No specific anti-viral therapy is recommended. The neutralizing monoclonal antibody Palivizumab is used for prophylaxis of infants at highest risk for severe infection but is too expensive and impractical for universal use. Currently, there is no licensed/approved RSV vaccine, and developing a safe and effective RSV vaccine is a global public health priority.

[0004] In a vaccine trial in the 1960s, infants and young children were immunized with a formalin-inactivated whole virion RSV preparation (FIRSV) or an equivalent paramyxovirus preparation (FIPIV). Five percent of the subjects who were immunized with F-PIV and then naturally infected by RSV during the next RSV season were hospitalized; 80% of those who were immunized with FI-RSV and then infected by RSV were hospitalized, and two children died. This enhancement of an RSV infection due to vaccination is a specific problem for the development of vaccines against RSV infections.

[0005] Therefore, Respiratory syncytial virus (RSV) infections are the greatest remaining unmet infant vaccine need in developed countries and an important unmet infant vaccine need worldwide. More than 40 years of effort have not yet resulted in a licensed RSV vaccine for humans.

[0006] Despite the above mentioned humanized monoclonal antibody Palivizumab, live-attenuated vaccine viruses were developed which elicit a strong immune response, but which are not recommended for use in the specific target groups (infants, children, the elderly and immunocompromised patients). Also, DNA vectors expressing RSV F protein which bears B-cell epitopes were used to induce the production of neutralizing antibodies. In this context, WO2008/077527 and WO96/040945 disclose vectors comprising DNA sequences encoding RSV F protein for the use as vaccines. However, the use of DNA as a vaccine may be dangerous due to unwanted insertion into the genome, possibly leading to interruption of functional genes and cancer or the formation of anti-DNA antibodies.

[0007] WO2015/024668 discloses RNA sequences encoding RSV antigenic peptides and proteins selected from fusion protein F, the glycoprotein G, the short hydrophobic protein SH, the matrix protein M, the nucleoprotein N, the large polymerase L, the M2-1 protein, the M2-2 protein, the phosphoprotein P, the non-structural protein NS1 or the non-structural protein NS2, and an antigenic composition comprising protamine-complexed RNA suitable for intradermal administration.

[0008] WO2017/070622 discloses a vaccine comprising RNA encoding RSV antigenic peptides and proteins selected from glycoprotein F and glycoprotein G, wherein the RNA is formulated in lipid nanoparticles.

[0009] Apart from some approaches cited above, there remains an unmet medical need for an efficient vaccine for prophylaxis or treatment of RSV infections.

[0010] Accordingly, it is the object of the underlying invention to provide novel artificial RNA coding for antigenic peptides or proteins of RSV and compositions/vaccines comprising said RNA for the use as vaccine for prophylaxis or treatment of RSV infections, particularly in infants, newborns, pregnant women, elderly, and immunocompromised patients.

[0011] Further it would be desirable that an RNA-based composition or vaccine has some of the following advantageous features:
[0012] Improved translation of RNA constructs at the site of injection (e.g. muscle)
[0013] Very efficient induction of RSV antigen-specific immune responses against the encoded antigenic peptide or protein at a very low dosages and dosing regimen.
[0014] Suitability for maternal immunization
[0015] Suitability for vaccination of infants and/or newborns
[0016] Suitability for intramuscular administration
[0017] Induction of an RSV-specific functional humoral immune response
[0018] Induction of RSV-specific B-cell memory
[0019] Faster onset of immune protection against RSV
[0020] Longevity of the induced immune responses against RSV
[0021] Induction of broad cellular T-cell responses against RSV
[0022] Induction of a (local and transient) pro-inflammatory environment
[0023] No induction of systemic cytokine or chemokine response after application of the vaccine
[0024] Well tolerability, no side-effects, non toxic,
[0025] No enhancement of an RSV infection due to vaccination
[0026] Advantageous stability characteristics of the vaccine
[0027] Speed, adaptability, simplicity and scalability of RSV vaccine production

[0028] The objects outlined above are solved by the claimed subject matter.

### Definitions

[0029] For the sake of clarity and readability the following definitions are provided. Any technical feature mentioned for these definitions may be read on each and every embodiment of the invention. Additional definitions and explanations may be specifically provided in the context of these embodiments.

[0030] Percentages in the context of numbers should be understood as relative to the total number of the respective items. In other cases, and unless the context dictates otherwise, percentages should be understood as percentages by weight (wt.-%).

[0031] Adaptive immune response: The term “adaptive immune response” as used herein will be recognized and understood by the person of ordinary skill in the art, and is for example intended to refer to an antigen-specific response of the immune system (the adaptive immune system). Antigen specificity allows for the generation of responses that are tailored to specific pathogens or pathogen-infected cells. The ability to mount these tailored responses is usually maintained in the body by “memory cells” (B-cells). In the context of the invention, the antigen is provided by the artificial RNA coding sequence encoding at least one antigenic peptide or protein.

[0032] Antigen: The term “antigen” as used herein will be recognized and understood by the person of ordinary skill in the art, and is for example intended to refer to a substance which may be recognized by the immune system, preferably by the adaptive immune system, and is capable of triggering an antigen-specific immune response, e.g. by formation of antibodies and/or antigen-specific T cells as part of an adaptive immune response. Typically, an antigen may be or may comprise a peptide or protein which may be presented by the MHC to T-cells. Also fragments, variants and derivatives of peptides or proteins derived from e.g. RSV F protein comprising at least one epitope are understood as antigens in the context of the invention. In the context of the present invention, an antigen may be the product of translation of a provided artificial RNA as specified herein.

[0033] Antigenic peptide or protein: The term “antigenic peptide or protein” will be recognized and understood by the person of ordinary skill in the art, and is for example intended to refer to a peptide, protein (or polyprotein) derived from a (antigenic) protein/polyprotein which may stimulate the body's adaptive immune system to provide an adaptive immune response. Therefore an “antigenic peptide or protein” comprises at least one epitope (as defined herein) or antigen (as defined herein) of the protein it is derived from (e.g., in the context of the invention, RSV peptide or protein, preferably RSV F protein or variants thereof).

[0034] Artificial nucleic acid: The terms “artificial nucleic acid” as used herein will be recognized and understood by the person of ordinary skill in the art, and are for example intended to refer to an artificial nucleic acid that does not occur naturally. An artificial nucleic acid may be a DNA molecule, an RNA molecule or a hybrid-molecule comprising DNA and RNA portions. Typically, artificial nucleic acids may be designed and/or generated by genetic engineering methods to correspond to a desired artificial sequence of nucleotides (heterologous sequence). In this context an artificial sequence is usually a sequence that may not occur naturally, i.e. it differs from the wild type sequence by at least one nucleotide. The term “wild type” as used herein will be recognized and understood by the person of ordinary skill in the art, and is for example intended to refer to a sequence occurring in nature. Further, the term “artificial nucleic acid” is not restricted to mean “one single molecule” but is, typically, understood to comprise an ensemble of essentially identical molecules.

[0035] Artificial RNA: The term “artificial RNA” as used herein is intended to refer to an RNA that does not occur naturally. In other words, an artificial RNA may be understood as a non-natural nucleic acid molecule. Such RNA molecules may be non-natural due to its individual sequence (which does not occur naturally, e.g. G/C content modified coding sequence, UTRs) and/or due to other modifications, e.g. structural modifications of nucleotides which do not occur naturally. Typically, artificial RNA may be designed and/or generated by genetic engineering methods to correspond to a desired artificial sequence of nucleotides (heterologous sequence). In this context an artificial RNA sequence is usually a sequence that may not occur naturally, i.e. it differs from the wild type sequence by at least one nucleotide. The term “artificial RNA” is not restricted to mean “one single molecule” but is, typically, understood to comprise an ensemble of essentially identical molecules. Accordingly, it may relate to a plurality of essentially identical RNA molecules contained in an aliquot or a sample. In the context of the invention, the RNA of the invention is an artificial RNA as defined herein.

[0036] Cationic: Unless a different meaning is clear from the specific context, the term “cationic” means that the respective structure bears a positive charge, either permanently or not permanently but in response to certain conditions such as pH. Thus, the term “cationic” covers both “permanently cationic” and “cationisable”.

[0037] Cationisable: The term “cationisable” as used herein means that a compound, or group or atom, is positively charged at a lower pH and uncharged at a higher pH of its environment. Also in non-aqueous environments where no pH value can be determined, a cationisable compound, group or atom is positively charged at a high hydrogen ion concentration and uncharged at a low concentration or activity of hydrogen ions. It depends on the individual properties of the cationisable or polycationisable compound, in particular the pKa of the respective cationisable group or atom, at which pH or hydrogen ion concentration it is charged or uncharged. In diluted aqueous environments, the fraction of cationisable compounds, groups or atoms bearing a positive charge may be estimated using the so-called Henderson-Hasselbalch equation which is well-known to a person skilled in the art. For example, in some embodiments, if a compound or moiety is cationisable, it is preferred that it is positively charged at a pH value of about 1 to 9, preferably 4 to 9, 5 to 8 or even 6 to 8, more preferably of a pH value of or below 9, of or below 8, of or below 7, most preferably at physiological pH values, e.g. about 7.3 to 7.4, i.e. under physiological conditions, particularly under physiological salt conditions of the cell in vivo. In other embodiments, it is preferred that the cationisable compound or moiety is predominantly neutral at physiological pH values, e.g. about 7.0-7.4, but becomes positively charged at lower pH values. In some embodiments, the preferred range of pKa for the cationisable compound or moiety is about 5 to about 7.

[0038] Coding sequence/coding region: The terms “coding sequence” or “coding region” and the corresponding abbreviation “cds” as used herein will be recognized and understood by the person of ordinary skill in the art, and are for example intended to refer to a sequence of several nucleotide triplets, which may be translated into a peptide or protein. A coding sequence in the context of the present invention is preferably an RNA sequence, consisting of a number of nucleotides that may be divided by three, which starts with a start codon and which preferably terminates with a stop codon.

[0039] Composition: In the context of the invention, a “composition” refers to any type of composition in which the specified ingredients (e.g. artificial RNA of the invention in association with LNP), may be incorporated, optionally along with any further constituents, usually with at least one pharmaceutically acceptable carrier or excipient. Thus, the composition may be a dry composition such as a powder or granules, or a solid unit such as a lyophilized form or a tablet. Alternatively, the composition may be in liquid form, and each constituent may be independently incorporated in dissolved or dispersed (e.g. suspended or emulsified) form.

[0040] Compound: As used herein, a “compound” means a chemical substance, which is a material consisting of molecules having essentially the same chemical structure and properties. For a small molecular compound, the molecules are typically identical with respect to their atomic composition and structural configuration. For a macromolecular or polymeric compound, the molecules of a compound are highly similar but not all of them are necessarily identical. For example, a segment of a polymer that is designated to consist of 50 monomeric units may also contain individual molecules with e.g. 48 or 53 monomeric units.

[0041] Derived from: The term “derived from” as used throughout the present specification in the context of a nucleic acid, i.e. for a nucleic acid “derived from” (another) nucleic acid, means that the nucleic acid, which is derived from (another) nucleic acid, shares at least 50%, preferably at least 55%, preferably at least 60%, preferably at least 65%, preferably at least 70%, more preferably at least 75%, more preferably at least 80%, 81%, 82%, 83%, 84%, more preferably at least 85%, 86%, 87%, 88%, 89% even more preferably at least 90%, 91%, 92%, 93%, 94%, even more preferably at least 95%, 96%, 97%, and particularly preferably at least 98%, 99% sequence identity with the nucleic acid from which it is derived. The skilled person is aware that sequence identity is typically calculated for the same types of nucleic acids, i.e. for DNA sequences or for RNA sequences. Thus, it is understood, if a DNA is “derived from” an RNA or if an RNA is “derived from” a DNA, in a first step the RNA sequence is converted into the corresponding DNA sequence (in particular by replacing the uracils (U) by thymidines (T) throughout the sequence) or, vice versa, the DNA sequence is converted into the corresponding RNA sequence (in particular by replacing the thymidines (T) by uracils (U) throughout the sequence). Thereafter, the sequence identity of the DNA sequences or the sequence identity of the RNA sequences is determined.

[0042] Preferably, a nucleic acid “derived from” a nucleic acid also refers to nucleic acid, which is modified in comparison to the nucleic acid from which it is derived, e.g. in order to increase RNA stability even further and/or to prolong and/or increase protein production. It goes without saying that such modifications are preferred, which do not impair RNA stability, e.g. in comparison to the nucleic acid from which it is derived. In the context of amino acid sequences (e.g. antigenic peptides or proteins) the term “derived from” means that the amino acid sequence, which is derived from (another) amino acid sequence (e.g. RSV F protein), shares at least 50%, preferably at least 55%, preferably at least 60%, preferably at least 65%, preferably at least 70%, more preferably at least 75%, more preferably at least 80%, 81%, 82%, 83%, 84%, more preferably at least 85%, 86%, 87%, 88%, 89% even more preferably at least 90%, 91%, 92%, 93%, 94%, even more preferably at least 95%, 96%, 97%, and particularly preferably at least 98%, 99% sequence identity with the amino acid sequence from which it is derived.

[0043] Thus, it is understood, if a antigenic peptides or protein is “derived from” an RSV fusion (F) protein, the antigenic peptides or protein that is “derived from” said RSV F protein may represent a variant or fragment of the RSV F protein, e.g. F0 (full-length precursor), F-del, F0_DSCav1, F_DSCav1_mut1, F_DSCav1_mut2, F_DSCav1_mut3, F-del_DSCav1, F-del_DSCav1_mut1, F-del_DSCav1_mut2, F-del_DSCav1_mut3 (as specified herein). Moreover, the antigenic peptides or protein that is “derived from” said RSV F proteins (e.g., F0, F-del, F0_DSCav1, F_DSCav1_mut1, F_DSCav1_mut2, F_DSCav1_mut3, F-del_DSCav1, F-del_DSCav1_mut1, F-del_DSCav1_mut2, F-del_DSCav1_mut3) may differ in the amino acid sequence, sharing a certain percentage of identity as defined above. Suitable further examples of RSV F proteins from which an antigenic peptides or protein may be “derived from” are provided in Table 1.

[0044] Epitope: The term “epitope” (also called “antigen determinant” in the art) as used herein will be recognized and understood by the person of ordinary skill in the art, and is for example intended to refer to T cell epitopes and B cell epitopes. T cell epitopes or parts of the antigenic peptides or proteins may comprise fragments preferably having a length of about 6 to about 20 or even more amino acids, e.g. fragments as processed and presented by MHC class I molecules, preferably having a length of about 8 to about 10 amino acids, e.g. 8, 9, or 10, (or even 11, or 12 amino acids), or fragments as processed and presented by MHC class II molecules, preferably having a length of about 13 to about 20 or even more amino acids, wherein these fragments may be selected from any part of the amino acid sequence. These fragments are typically recognized by T cells in form of a complex consisting of the peptide fragment and an MHC molecule, i.e. the fragments are typically not recognized in their native form. B cell epitopes are typically fragments located on the outer surface of (native) protein or peptide antigens, preferably having 5 to 15 amino acids, more preferably having 5 to 12 amino acids, even more preferably having 6 to 9 amino acids, which may be recognized by antibodies, i.e. in their native form. Such epitopes of proteins or peptides may furthermore be selected from any of the herein mentioned variants of such proteins or peptides. In this context antigenic determinants can be conformational or discontinuous epitopes which are composed of segments of the proteins or peptides as defined herein that are discontinuous in the amino acid sequence of the proteins or peptides as defined herein but are brought together in the three-dimensional structure or continuous or linear epitopes which are composed of a single polypeptide chain. In the context of the present invention, an epitope may be the product of translation of a provided artificial RNA as specified herein.

[0045] Fragment: The term “fragment” as used throughout the present specification in the context of a nucleic acid sequence or an amino acid sequence may typically be a shorter portion of a full-length sequence of e.g. a nucleic acid sequence or an amino acid sequence. Accordingly, a fragment, typically, consists of a sequence that is identical to the corresponding stretch within the full-length sequence. A preferred fragment of a sequence in the context of the present invention, consists of a continuous stretch of entities, such as nucleotides or amino acids corresponding to a continuous stretch of entities in the molecule the fragment is derived from, which represents at least 5%, 10%, 20%, preferably at least 30%, more preferably at least 40%, more preferably at least 50%, even more preferably at least 60%, even more preferably at least 70%, and most preferably at least 80% of the total (i.e. full-length) molecule from which the fragment is derived (e.g. RSV F protein). The term “fragment” as used throughout the present specification in the context of proteins or peptides may, typically, comprise a sequence of a protein or peptide as defined herein, which is, with regard to its amino acid sequence (or its encoded nucleic acid molecule), N-terminally and/or C-terminally truncated compared to the amino acid sequence of the original (native) protein (or its encoded nucleic acid molecule). Such truncation may thus occur either on the amino acid level or correspondingly on the nucleic acid level. A sequence identity with respect to such a fragment as defined herein may therefore preferably refer to the entire protein or peptide as defined herein or to the entire (coding) nucleic acid molecule of such a protein or peptide. In the context of antigens such fragment may have a length of about 6 to about 20 or even more amino acids, e.g. fragments as processed and presented by MHC class I molecules, preferably having a length of about 8 to about 10 amino acids, e.g. 8, 9, or 10, (or even 6, 7, 11, or 12 amino acids), or fragments as processed and presented by MHC class I molecules, preferably having a length of about 13 or more amino acids, e.g. 13, 14, 15, 16, 17, 18, 19, 20 or even more amino acids, wherein these fragments may be selected from any part of the amino acid sequence. These fragments are typically recognized by T-cells in form of a complex consisting of the peptide fragment and an MHC molecule, i.e. the fragments are typically not recognized in their native form. Fragments of proteins or peptides (e.g. in the context of antigens) may comprise at least one epitope of those proteins or peptides. Furthermore also domains of a protein, like the extracellular domain, the intracellular domain or the transmembrane domain and shortened or truncated versions of a protein may be understood to comprise a fragment of a protein.

[0046] Heterologous: The terms “heterologous” or “heterologous sequence” as used throughout the present specification in the context of a nucleic acid sequence or an amino acid sequence refers to a sequence (e.g. DNA, RNA, amino acid) will be recognized and understood by the person of ordinary skill in the art, and is intended to refer to a sequence that is derived from another gene, from another allele, from another species. Two sequences are typically understood to be “heterologous” if they are not derivable from the same gene or in the same allele. I.e., although heterologous sequences may be derivable from the same organism, they naturally (in nature) do not occur in the same nucleic acid molecule, such as e.g. in the same RNA, or the same protein.

[0047] Humoral immune response: The terms “humoral immunity” or “humoral immune response” will be recognized and understood by the person of ordinary skill in the art, and are for example intended to refer to B-cell mediated antibody production and optionally to accessory processes accompanying antibody production. A humoral immune response may be typically characterized, e.g. by Th2 activation and cytokine production, germinal center formation and isotype switching, affinity maturation and memory cell generation. Humoral immunity also typically may refer to the effector functions of antibodies, which include pathogen and toxin neutralization, classical complement activation, and opsonin promotion of phagocytosis and pathogen elimination.

[0048] Identity (of a sequence): The term “identity” as used throughout the present specification in the context of a nucleic acid sequence or an amino acid sequence will be recognized and understood by the person of ordinary skill in the art, and is for example intended to refer to the percentage to which two sequences are identical. To determine the percentage to which two sequences are identical, e.g. nucleic acid sequences or amino acid sequences as defined herein, preferably the amino acid sequences encoded by the artificial nucleic acid sequence as defined herein or the amino acid sequences themselves, the sequences can be aligned in order to be subsequently compared to one another. Therefore, e.g. a position of a first sequence may be compared with the corresponding position of the second sequence. If a position in the first sequence is occupied by the same component (residue) as is the case at a position in the second sequence, the two sequences are identical at this position. If this is not the case, the sequences differ at this position. If insertions occur in the second sequence in comparison to the first sequence, gaps can be inserted into the first sequence to allow a further alignment. If deletions occur in the second sequence in comparison to the first sequence, gaps can be inserted into the second sequence to allow a further alignment. The percentage to which two sequences are identical is then a function of the number of identical positions divided by the total number of positions including those positions which are only occupied in one sequence. The percentage to which two sequences are identical can be determined using a mathematical algorithm. A preferred, but not limiting, example of a mathematical algorithm which can be used is the algorithm is integrated in the BLAST program. Sequences which are identical to the sequences of the present invention to a certain extent can be identified by this program.

[0049] Immunogen, immunogenic: The terms “immunogen” or “immunogenic” will be recognized and understood by the person of ordinary skill in the art, and are for example intended to refer to a compound that is able to stimulate/induce an immune response. Preferably, an immunogen is a peptide, polypeptide, or protein. An immunogen in the sense of the present invention is the product of translation of a provided artificial nucleic acid, preferably RNA, comprising at least one coding sequence encoding at least one antigenic peptide, protein derived from RSV as defined herein. Typically, an immunogen elicits an adaptive immune response.

[0050] Immune response: The term “immune response” will be recognized and understood by the person of ordinary skill in the art, and is for example intended to refer to a specific reaction of the adaptive immune system to a particular antigen (so called specific or adaptive immune response) or an unspecific reaction of the innate immune system (so called unspecific or innate immune response), or a combination thereof.

[0051] Immune system: The term “immune system” will be recognized and understood by the person of ordinary skill in the art, and is for example intended to refer to a system of the organism that may protect the organisms from infection. If a pathogen succeeds in passing a physical barrier of an organism and enters this organism, the innate immune system provides an immediate, but non-specific response. If pathogens evade this innate response, vertebrates possess a second layer of protection, the adaptive immune system. Here, the immune system adapts its response during an infection to improve its recognition of the pathogen. This improved response is then retained after the pathogen has been eliminated, in the form of an immunological memory, and allows the adaptive immune system to mount faster and stronger attacks each time this pathogen is encountered. According to this, the immune system comprises the innate and the adaptive immune system. Each of these two parts typically contains so called humoral and cellular components.

[0052] Innate immune system: The term “innate immune system” (also known as non-specific or unspecific immune system) will be recognized and understood by the person of ordinary skill in the art, and is for example intended to refer to a system typically comprising the cells and mechanisms that defend the host from infection by other organisms in a non-specific manner. This means that the cells of the innate system may recognize and respond to pathogens in a generic way, but unlike the adaptive immune system, it does not confer long-lasting or protective immunity to the host. The innate immune system may be, e.g. activated by ligands of Toll-like receptors (TLRs) or other auxiliary substances such as lipopolysaccharides, TNF-alpha, CD40 ligand, or cytokines, monokines, lymphokines, interleukins or chemokines, IL-1 to IL-33, IFN-alpha, IFN-beta, IFN-gamma, GM-CSF, G-CSF, M-CSF, LT-beta, TNF-alpha, growth factors, and hGH, a ligand of human Toll-like receptor (e.g., TLR1 to TLR10), a ligand of murine Toll-like receptor, (e.g., TLR1 to TLR13), a ligand of a NOD-like receptor, a ligand of a RIG-I like receptor, an immunostimulatory nucleic acid, an immunostimulatory RNA (isRNA), a CpG-DNA, an antibacterial agent, or an anti-viral agent.

[0053] Lipidoid compound: A lipidoid compound, also simply referred to as lipidoid, is a lipid-like compound, i.e. an amphiphilic compound with lipid-like physical properties. In the context of the present invention the term lipid is considered to encompass lipidoid compounds.

[0054] Monovalent vaccine, monovalent composition: The terms “monovalent vaccine”, “monovalent composition” “univalent vaccine” or “univalent composition” will be recognized and understood by the person of ordinary skill in the art, and are for example intended to refer to a composition or a vaccine comprising only one antigen from a virus. Accordingly, said vaccine or composition comprises only one RNA species encoding a single antigen for a single organism. The term “monovalent vaccine” includes the immunization against a single valence. In the context of the invention, a monovalent RSV vaccine or composition would comprise an artificial RNA encoding one single antigenic peptide or protein derived from one specific RSV (e.g. RSV F).

[0055] Nucleic acid: The terms “nucleic acid” or “nucleic acid molecule” will be recognized and understood by the person of ordinary skill in the art, and are for example intended to refer to a molecule comprising, preferably consisting of nucleic acid components. The term nucleic acid molecule preferably refers to DNA or RNA molecules. It is preferably used synonymous with the term polynucleotide. Preferably, a nucleic acid or a nucleic acid molecule is a polymer comprising or consisting of nucleotide monomers, which are covalently linked to each other by phosphodiester-bonds of a sugar/phosphate-backbone. The term “nucleic acid molecule” also encompasses modified nucleic acid molecules, such as base-modified, sugar-modified or backbone-modified DNA or RNA molecules as defined herein.

[0056] Nucleic acid sequence/RNA sequence/amino acid sequence: The terms “nucleic acid sequence”, “RNA sequence” or “amino acid sequence” will be recognized and understood by the person of ordinary skill in the art, and are for example intended to refer to particular and individual order of the succession of its nucleotides or amino acids respectively.

[0057] Permanently cationic: The term “permanently cationic” as used herein will be recognized and understood by the person of ordinary skill in the art, and means, for example, that the respective compound, or group or atom, is positively charged at any pH value or hydrogen ion activity of its environment. Typically, the positive charge is results from the presence of a quaternary nitrogen atom. Where a compound carries a plurality of such positive charges, it may be referred to as permanently polycationic, which is a subcategory of permanently cationic.

[0058] Pharmaceutically effective amount: The terms “pharmaceutically effective amount” or “effective amount” will be recognized and understood by the person of ordinary skill in the art, and are for example intended to refer to an amount of a compound (e.g. the artificial RNA of the invention) that is sufficient to induce a pharmaceutical effect, such as, in the context of the invention, an immune response (e.g. against an antigenic peptide, protein, polyprotein as defined herein).

[0059] Polyvalent/multivalent vaccine, polyvalent/multivalent composition: The terms “polyvalent vaccine”, “polyvalent composition” “multivalent vaccine” or “multivalent composition” will be recognized and understood by the person of ordinary skill in the art, and are for example intended to refer to a composition or a vaccine comprising antigens from more than one strain of a virus, or comprising different antigens of the same virus, or any combination thereof. The terms describe that said vaccine or composition has more than one valence. In the context of the invention, a polyvalent RSV vaccine would comprise a vaccine comprising an artificial RNA encoding antigenic peptides or proteins derived from several different RSV strains or comprising artificial RNA encoding different antigens from the same RSV strain, or a combination thereof. In preferred embodiment, a polyvalent RSV vaccine or composition comprises more than one, preferably 2, 3, 4 or even more different artificial RNA species each encoding at least one different antigenic peptide or protein of RSV (e.g. RSV F and RSV M or RSV F and RSV N). Methods to produce polyvalent mRNA vaccines are disclosed in the PCT application PCT/EP2016/082487 or in published patent application WO2017/1090134A1.

[0060] Stabilized nucleic acid molecule” or “stabilized RNA: The term “stabilized nucleic acid molecule” or “stabilized RNA” refer to a nucleic acid molecule, preferably an RNA molecule that is modified such, that it is more stable to disintegration or degradation, e.g., by environmental factors or enzymatic digest, such as by an exo- or endonuclease degradation, than the nucleic acid molecule without the modification. Preferably, a stabilized nucleic acid molecule, e.g. stabilized RNA, in the context of the present invention is stabilized in a cell, such as a prokaryotic or eukaryotic cell, preferably in a mammalian cell, such as a human cell. The stabilization effect may also be exerted outside of cells, e.g. in a buffer solution etc., for example, in a manufacturing process for a pharmaceutical composition comprising the stabilized nucleic acid molecule.

[0061] T-cell responses: The terms “cellular immunity” or “cellular immune response” or “cellular T-cell responses” as used herein will be recognized and understood by the person of ordinary skill in the art, and are for example intended to refer to the activation of macrophages, natural killer cells (NK), antigen-specific cytotoxic T-lymphocytes, and the release of various cytokines in response to an antigen. In more general terms, cellular immunity is not based on antibodies, but on the activation of cells of the immune system. Typically, a cellular immune response may be characterized e.g. by activating antigen-specific cytotoxic T-lymphocytes that are able to induce apoptosis in cells, e.g. specific immune cells like dendritic cells or other cells, displaying epitopes of foreign antigens on their surface. In the context of the invention, the antigen is provided by the artificial RNA encoding at least one antigenic peptide or protein derived from RSV, suitably inducing T-cell responses. The artificial RNA, the composition, the vaccine of the invention advantageously elicit cellular T-cell responses against RSV F antigens.

[0062] Variant (of a sequence): The term “variant” as used throughout the present specification in the context of a nucleic acid sequence will be recognized and understood by the person of ordinary skill in the art, and is for example intended to refer to a variant of nucleic acid sequences which forms the basis of a nucleic acid sequence. For example, a variant nucleic acid sequence may exhibit one or more nucleotide deletions, insertions, additions and/or substitutions compared to the nucleic acid sequence from which the variant is derived. Preferably, a variant of a nucleic acid sequence is at least 40%, preferably at least 50%, more preferably at least 60%, more preferably at least 70%, even more preferably at least 80%, even more preferably at least 90%, most preferably at least 95% identical to the nucleic acid sequence the variant is derived from. Preferably, the variant is a functional variant. A “variant” of a nucleic acid sequence may have at least 70%, 75%, 80%, 85%, 90%, 95%, 98% or 99% nucleotide identity over a stretch of 10, 20, 30, 50, 75 or 100 nucleotide of such nucleic acid sequence.

[0063] The term “variant” as used throughout the present specification in the context of proteins or peptides will be recognized and understood by the person of ordinary skill in the art, and is for example intended to refer to a proteins or peptide variant having an amino acid sequence which differs from the original sequence in one or more mutation(s), such as one or more substituted, inserted and/or deleted amino acid(s). Preferably, these fragments and/or variants have the same biological function or specific activity compared to the full-length native protein, e.g. its specific antigenic property. “Variants” of proteins or peptides as defined in the context of the present invention may comprise conservative amino acid substitution(s) compared to their native, i.e. non-mutated physiological, sequence. Those amino acid sequences as well as their encoding nucleotide sequences in particular fall under the term variants as defined herein. Substitutions in which amino acids, which originate from the same class, are exchanged for one another are called conservative substitutions. In particular, these are amino acids having aliphatic side chains, positively or negatively charged side chains, aromatic groups in the side chains or amino acids, the side chains of which can enter into hydrogen bridges, e.g. side chains which have a hydroxyl function. This means that e.g. an amino acid having a polar side chain is replaced by another amino acid having a likewise polar side chain, or, for example, an amino acid characterized by a hydrophobic side chain is substituted by another amino acid having a likewise hydrophobic side chain (e.g. serine (threonine) by threonine (serine) or leucine (isoleucine) by isoleucine (leucine)). Insertions and substitutions are possible, in particular, at those sequence positions which cause no modification to the three-dimensional structure or do not affect the binding region. Modifications to a three-dimensional structure by insertion(s) or deletion(s) can easily be determined e.g. using CD spectra (circular dichroism spectra). A “variant” of a protein or peptide may have at least 70%, 75%, 80%, 85%, 90%, 95%, 98% or 99% amino acid identity over a stretch of 10, 20, 30, 50, 75 or 100 amino acids of such protein or peptide. Preferably, a variant of a protein comprises a functional variant of the protein, which means that the variant exerts the same effect or functionality as the protein it is derived from.

[0064] 3′-untranslated region, 3′-UTR element, 3′-UTR: The term “3′-untranslated region” or “3′-UTR element” will be recognized and understood by the person of ordinary skill in the art, and are for example intended to refer to a part of a nucleic acid molecule, which is located 3′ (i.e. “downstream”) of a coding sequence and which is typically not translated into protein. Usually, a 3′-UTR is the part of an mRNA which is located between the coding sequence (cds) and the poly(A) sequence of the mRNA. In the context of the invention, the term 3′-UTR may also comprise elements, which are not encoded in the DNA template, from which an artificial RNA is transcribed, but which are added after transcription during maturation, e.g. a poly(A) sequence.

[0065] 5-untranslated region, 5′-UTR element, 5′-UTR: The term “5′-untranslated region (5′-UTR)” will be recognized and understood by the person of ordinary skill in the art, and are for example intended to refer to a part of a nucleic acid molecule, which is located 5′ (i.e. “upstream”) of a coding sequence and which is not translated into protein. A 5′-UTR is typically understood to be a particular section of messenger RNA (mRNA), which is located 5′ of the coding sequence of the mRNA. Typically, the 5′-UTR starts with the transcriptional start site and ends one nucleotide before the start codon of the coding sequence. Preferably, the 5′-UTRs have a length of more than 20, 30, 40 or 50 nucleotides. The 5′-UTR may comprise elements for controlling gene expression, also called regulatory elements. Such regulatory elements may be, for example, ribosomal binding sites. The 5′-UTR may be post-transcriptionally modified, for example by addition of a 5′-cap.

[0066] 5-terminal oligopyrimidine tract (TOP), TOP-UTR: The term “5′-terminal oligopyrimidine tract (TOP)” has to be understood as a stretch of pyrimidine nucleotides located in the 5-terminal region of a nucleic acid molecule, such as the 5-terminal region of certain mRNA molecules or the 5-terminal region of a functional entity, e.g. the transcribed region, of certain genes. The sequence starts with a cytidine, which usually corresponds to the transcriptional start site, and is followed by a stretch of usually about 3 to 30 pyrimidine nucleotides. For example, the TOP may comprise 3-30 or even more nucleotides. The pyrimidine stretch and thus the 5′-TOP ends one nucleotide 5′ to the first purine nucleotide located downstream of the TOP. Messenger RNA that contains a 5′-terminal oligopyrimidine tract is often referred to as TOP mRNA. Accordingly, genes that provide such messenger RNAs are referred to as TOP genes. The term “TOP motif” or “5′-TOP motif” has to be understood as a nucleic acid sequence which corresponds to a 5′-TOP as defined above. Thus, a TOP motif in the context of the present invention is preferably a stretch of pyrimidine nucleotides having a length of 3-30 nucleotides. Preferably, the TOP-motif consists of at least 3 pyrimidine nucleotides, preferably at least 4 pyrimidine nucleotides, preferably at least 5 pyrimidine nucleotides, more preferably at least 6 nucleotides, more preferably at least 7 nucleotides, most preferably at least 8 pyrimidine nucleotides, wherein the stretch of pyrimidine nucleotides preferably starts at its 5′-end with a cytosine nucleotide. In TOP genes and TOP mRNAs, the TOP-motif preferably starts at its 5′-end with the transcriptional start site and ends one nucleotide 5′ to the first purine residue in said gene or mRNA. A TOP motif in the sense of the present invention is preferably located at the 5′-end of a sequence which represents a 5′-UTR or at the 5′-end of a sequence which codes for a 5′-UTR. Thus, preferably, a stretch of 3 or more pyrimidine nucleotides is called “TOP motif” in the sense of the present invention if this stretch is located at the 5′-end of a respective sequence, such as the artificial nucleic acid, the 5′-UTR element of the artificial nucleic acid, or the nucleic acid sequence which is derived from the 5′-UTR of a TOP gene as described herein. In other words, a stretch of 3 or more pyrimidine nucleotides, which is not located at the 5′-end of a 5′-UTR or a 5′-UTR element but anywhere within a 5′-UTR or a 5′-UTR element, is preferably not referred to as “TOP motif”. In some embodiments, the nucleic acid sequence of the 5′-UTR element, which is derived from a 5′-UTR of a TOP gene, terminates at its 3′-end with a nucleotide located at position 1, 2, 3, 4, 5, 6, 7, 8, 9 or 10 upstream of the start codon (e.g. A(U/T)G) of the gene or RNA it is derived from. Thus, the 5′-UTR element does not comprise any part of the protein coding sequence. Thus, preferably, the only protein coding part of the at least one nucleic acid sequence, particularly of the RNA sequence, is provided by the coding sequence.

### SHORT DESCRIPTION OF THE INVENTION

[0067] The present invention is based on the inventor's surprising finding that at least one peptide or protein derived from of a Respiratory syncytial virus (RSV) F protein encoded by the artificial RNA of the invention can efficiently be expressed in a mammalian cell. Even more unexpected, the inventors showed that the artificial RNA of the invention can induce specific functional and protective immune responses in e.g. cotton rats (see e.g. Example 2, 3). Through different optimizations in RSV F antigen design, the immune responses could be further improved. In addition, the expression of the RSV F antigen encoded by the artificial nucleic RNA could be increased by selecting suitable heterologous 5′ untranslated regions (UTRs) and suitable heterologous 3 untranslated regions (UTRs) (see e.g. Example 4). Advantageously, said artificial RNA of the invention comprising advantageous 3-UTR/5′-UTR combinations induce very efficient antigen-specific immune responses against the encoded RSV F. Further, artificial RNA of the invention comprised in lipid nanoparticles (LNPs) very efficiently induces antigen-specific immune responses against RSV F at a very low dosages and dosing regimen (see e.g. Example 3). Further, e.g. Example 8 and Example 12 provide compositions/vaccines comprising a further artificial RNA encoding a further antigen wherein said artificial RNA encoding a further antigen suitably elicits or enhances T-cell responses and results in a Th1-biased immune response, which is considered to be an important prerequisite for a potential RSV vaccine (Th2-biased responses have been associated with enhanced respiratory disease (ERD) in animal models). Furthermore the compositions are suitable to induce T-cell responses. Accordingly, the artificial RNA, and the composition/vaccine comprising said artificial RNA of the invention are suitable for eliciting an immune response against RSV F in a mammalian subject. The artificial RNA and the composition/vaccine comprising said artificial RNA is therefore suitable for use as a vaccine, e.g. as a human vaccine, e.g. as a vaccine for pregnant women or infants.

[0068] In a first aspect, the present invention provides an artificial nucleic acid, preferably an artificial RNA comprising at least one 5′ untranslated region (UTR) and/or at least one 3′ untranslated region (UTR), and at least one coding sequence operably linked to said 3′-UTR and/or 5′-UTR encoding at least one antigenic peptide or protein derived from RSV F protein or a fragment or variant thereof.

[0069] In preferred embodiments, the artificial RNA comprises at least one nucleic acid sequence derived from a 3′-UTR of a gene selected from an ALB7 gene, an alpha-globin gene, a PSMB3, CASP1, COX6B1, GNAS, NDUFA1 and RPS9, or from a homolog, a fragment or a variant of any one of these genes

[0070] In preferred embodiments, the artificial RNA comprises at least one nucleic acid sequence derived from a 5′-UTR of gene selected from a RPL32 gene, a HSD17B4, ASAH1, ATP5A1, MP68, NDUFA4, NOSIP, RPL31, SLC7A3, TUBB4 and UBQLN2, or from a homolog, a fragment or variant of any one of these genes.

[0071] Suitably, the artificial RNA of the invention comprises at least one coding sequence encoding at least one antigenic peptide or protein derived from a RSV F protein operably linked to a 3′-UTR and a 5′-UTR selected from a-1 (HSD17B4/PSMB3), a-2 (Ndufa4/PSMB3), a-3 (SLC7A3/PSMB3), a-4 (NOSIP/PSMB3), a-5 (MP68/PSMB3), b-1 (UBQLN2/RPS9), b-2 (ASAH1/RPS9), b-3 (HSD17B4/RPS9), b-4 (HSD17B4/CASP1), b-5 (NOSIP/COX6B1), c-1 (NDUFA4/RPS9), c-2 (NOSIP/NDUFA1), c-3 (NDUFA4/COX6B1), c-4 (NDUFA4/NDUFA1), c-5 (ATP5A1/PSMB3), d-1 (Rpl31/PSMB3), d-2 (ATP5A1/CASP1), d-3 (SLC7A3/GNAS), d-4 (HSD17B4/NDUFA1), d-5 (Slc7a3/Ndufa1), e-1 (TUBB4B/RPS9), e-2 (RPL31/RPS9), e-3 (MP68/RPS9), e-4 (NOSIP/RPS9), e-5 (ATP5A1/RPS9), e-6 (ATP5A1/COX6B1), f-1 (ATP5A1/GNAS), f-2 (ATP5A1/NDUFA1), f-3 (HSD17B4/COX6B1), f-4 (HSD17B4/GNAS), f-5 (MP68/COX6B1), g-1 (MP68/NDUFA1), g-2 (NDUFA4/CASP1), g-3 (NDUFA4/GNAS), g-4 (NOSIP/CASP1), g-5 (RPL31/CASP1), h-1 (RPL31/COX6B1), h-2 (RPL31/GNAS), h-3 (RPL31/NDUFA1), h-4 (Slc7a3/CASP1), h-5 (SLC7A3/COX6B1), i-1 (SLC7A3/RPS9), i-2 (RPL32/ALB7), or i-3 (a-globin gene), wherein a-1 (HSD17B4/PSMB3), a-4 (NDUFA4/PSMB3), c-1 (NDUFA4/RPS9), e-4 NOSIP/RPS9), g-2 (NDUFA4/CASP1), i-2 (RPL32/ALB7), or i-3 (alpha-globin) are particularly preferred.

[0072] The at least one antigenic peptide or protein derived from RSV F protein may be a full-length F protein (referred to as “F0”, aa 1-574) or an F protein with deleted C-terminus (referred to as “F-del”, aa 1-553), or a fragment or a variant thereof.

[0073] The at least one antigenic peptide or protein may additionally comprise a mutation that stabilizes the antigen in pre-conformation state/pre-fusion conformation, preferably a DSCav1 mutation (S155C, S290C, S190F, and V207L) or a fragment or a variant, or a functional variant thereof (referred to as “DSCav1”, e.g. “F0_DSCav1” or “F-del_DSCav1”).

[0074] The at least one antigenic peptide or protein may be a fusion protein comprising the two subunits, F1 and F2 of mature F into a single chain, connected via a linker (GS) to enhance stability of the protein (F(1-103)-GS-F(145-574); F(1-103)-GS-F(145-553)).

[0075] The protein comprising the two subunits of mature F into a single chain (referred to as “F2-linker-F1”), e.g. (F(1-103)-GS-F(145-574); F(1-103)-GS-F(145-553) may additionally comprise a DSCav1 mutation (herein referred to as “mut0”).

[0076] The protein comprising the two subunits of mature F into a single chain (referred to as “F2-linker-F1”) may additionally to the DSCav1 mutation comprise at least one further mutation that promotes inter-protomer disulphide bonds, wherein the mutations may be selected from (S46G, A149C, S215P, Y458C, K465Q; herein referred to as “mut1”), (S46G, E92D, A149C, S215P, Y458C, K465Q; herein referred to as “mut2”), or (S46G, N671, E92D, A149C, S215P, Y458C, K465Q; herein referred to as “mut3”), (A149C, Y458C; herein referred to as “mut4”), (N183GC, N428C; herein referred to as “mut5”), (Q98C, Q361C, S46G, E92D, L95M, S215P, I217P, I221M, R429K, K465Q; herein referred to as “mut6”), (Q98C, Q361C, L95M, I221M, R429K; herein referred to as “mut7”), or (N183GC, N428C, S46G, N671, E92D, S215P, K465Q; herein referred to as “mut8”) or a fragment or a variant, or a functional variant thereof.

[0077] The at least one antigenic peptide or protein derived from RSV F protein encoded by the artificial RNA of the invention may be selected from F0, F-del, F0_DSCav1, F_DSCav1_mut1, F_DSCav1_mut2, F_DSCav1_mut3, F_DSCav1_mut4, F_DSCav1_mut5, F_DSCav1_mut6, F_DSCav1_mut7, F_DSCav1_mut8, F_DSCav1_mut0, F-del_DSCav1, F-del_DSCav1_mut1, F-del_DSCav1_mut2, F-del_DSCav1_mut3, F-del_DSCav1_mut4, F-del_DSCav1_mut5, F-del_DSCav1_mut6, F-del_DSCav1_mut7, F-del_DSCav1_mut8, F-del_DSCav1_mut0 are preferred.

[0078] The at least one coding sequence may encode at least one of the amino acid sequences being identical or at least 70%, 80%, 85%, 86%, 87%, 88%, 89%, 90%, 91%, 92%, 93%, 94%, 95%, 96%, 97%, 98%, or 99% identical to any one of SEQ ID NO: 68, 483, 898, 1267, 1636, 2005, 2374, 2743, 3112, 3481, 3850, 4219, 4588, 4957, 5326, 5695, 6064, 6433, 6802, 7171, 7540, 7909, 8279-9683, 11726, 12095, 12464, 12833, 13940, 14309, 14678, 15047, 15416, 15785, 13202, 13571, 16154, 16523, 16892, 17261, 17630, 17999, 18368, 18737, 19106, 19475 or a fragment or variant of any of these sequences.

[0079] Preferably, the artificial RNA may comprise a coding sequence being identical or at least 70%, 80%, 85%, 86%, 87%, 88%, 89%, 90%, 91%, 92%, 93%, 94%, 95%, 96%, 97%, 98%, or 99% identical to any one of SEQ ID NOs: 69-77, 484-492, 899-906, 1268-1275, 1637-1644, 2006-2013, 2375-2382, 2744-2751, 3113-3120, 3482-3489, 3851-3858, 4220-4227, 4589-4596, 4958-4965, 5327-5334, 5696-5703, 6065-6072, 6434-6441, 6803-6810, 7172-7179, 7541-7548, 7910-7917, 21363-21384, 11727-11734, 12096-12103, 12465-12472, 12834-12841, 13941-13948, 14310-14317, 14679-14686, 15048-15055, 15417-15424, 15786-15793, 13203-13210, 13572-13579, 16155-16162, 16524-16531, 16893-16900, 17262-17269, 17631-17638, 18000-18007, 18369-18376, 18738-18745, 19107-19114, 19476-19483. 21389-21410 or a fragment or variant of any of these sequences.

[0080] The artificial RNA may comprise a codon modified coding sequence selected from C maximized coding sequence, CAI maximized coding sequence, human codon usage adapted coding sequence, G/C content modified coding sequence, and G/C optimized coding sequence, or any combination thereof.

[0081] The artificial RNA may be an mRNA, a viral RNA, self-replicating RNA, a circular RNA, or a replicon RNA. In preferred embodiments, the artificial RNA is an mRNA.

[0082] The artificial RNA, preferably mRNA, may further comprise at least one selected from a cap structure, a poly(A)sequence, a poly(C)sequence, a histone-stem loop, and/or a 3′-terminal sequence element.

[0083] The artificial RNA of the invention preferably comprises or consists of an RNA sequence which is identical or at least 70%, 80%, 85%, 86%, 87%, 88%, 89%, 90%, 91%, 92%, 93%, 94%, 95%, 96%, 97%, 98%, or 99% identical to a nucleic acid sequence selected from the group consisting of SEQ ID NOs: 78-482, 11735-12094, 21415-21417, 21561-21563, 21489, 21490, 21635, 21636 or a fragment or variant of any of these (encoding F0), SEQ ID NOs: 493-897, 12104-12463, 21418-21420, 21564-21566, 21491, 21492, 21637, 21638 or a fragment or variant of any of these (encoding F-del), SEQ ID NOs: 907-1266, 12473-12832, 21421-21423, 21567-21569, 21493-21495, 21639-21641 or a fragment or variant of any of these (encoding F0_DSCav1), SEQ ID NOs: 1276-1635, 8278, 12842-13201, 21424-21426, 21570-21572, 21496-21498, 21642-21644 or a fragment or variant of any of these (encoding F-del_DSCav1), SEQ ID NOs: 1645-2004, 13949-14308, 21433-21435, 21579-21581, 21505-21507, 21651-21653 or a fragment or variant of any of these (encoding F_DSCav1_mut1), SEQ ID NOs: 2014-2373, 14318-14677, 21436-21438, 21582-21584, 21508-21510, 21654-21656 or a fragment or variant of any of these (encoding F-del_DSCav1_mut1), SEQ ID NOs: 2383-2742, 14687-15046, 21439-21441, 21585-21587, 21511-21513, 21657-21659 or a fragment or variant of any of these (encoding F_DSCav1_mut2), SEQ ID NOs: 2752-3111, 15056-15415, 21442-21444, 21588-21590, 21514-21516, 21660-21662 or a fragment or variant of any of these (encoding F-del_DSCav1_mut2), SEQ ID NOs: 3121-3480, 15425-15784, 21445-21447, 21591-21593, 21517-21519, 21663-21665 or a fragment or variant of any of these (encoding F_DSCav1_mut3), SEQ ID NOs: 3490-3849, 15794-16153, 21448-21450, 21594-21596, 21520-21522, 21666-21668 or a fragment or variant of any of these (encoding F-del_DSCav1_mut3), SEQ ID NOs: 3859-4218, 13211-13570, 21427-21429, 21573-21575, 21499-21501, 21645-21647 or a fragment or variant of any of these (encoding F_DSCav1_mut0), SEQ ID NOs: 4228-4587, 13580-13939, 21430-21432, 21576-21578, 21502-21504, 21648-21650 or a fragment or variant of any of these (encoding F-del_DSCav1_mut0), SEQ ID NOs: 4597-4956, 16163-16522, 21451-21453, 21597-21599, 21523-21525, 21669-21671 or a fragment or variant of any of these (encoding F_DSCav1_mut4), SEQ ID NOs: 4966-5325, 16532-16891, 21454-21456, 21600-21602, 21526-21528, 21672-21674 or a fragment or variant of any of these (encoding F-del_DSCav1_mut4), SEQ ID NOs: 5335-5694, 16901-17260, 21457-21459, 21603-21605, 21529-21531, 21675-21677 or a fragment or variant of any of these (encoding F_DSCav1_mut5), SEQ ID NOs: 5704-6063, 17270-17629, 21460-21462, 21606-21608, 21532-21534, 21678-21680 or a fragment or variant of any of these (encoding F-del_DSCav1_mut5), SEQ ID NOs: 6073-6432, 17639-17998, 21463-21465, 21609-21611, 21535-21537, 21681-21683 or a fragment or variant of any of these (encoding F_DSCav1_mut6), SEQ ID NOs: 6442-6801, 18008-18367, 21466-21468, 21612-21614, 21538-21540, 21684-21686 or a fragment or variant of any of these (encoding F-del_DSCav1_mut6), SEQ ID NOs: 6811-7170, 18377-18736, 21469-21471, 21615-21617, 21541-21543, 21687-21689 or a fragment or variant of any of these (encoding F_DSCav1_mut7), SEQ ID NOs: 7180-7539, 18746-19105, 21472-21474, 21618-21620, 21544-21546, 21690-21692 or a fragment or variant of any of these (encoding F-del_DSCav1_mut7), SEQ ID NOs: 7549-7908, 19115-19474, 21475-21477, 21621-21623, 21547-21549, 21693-21695 or a fragment or variant of any of these (encoding F_DSCav1_mut8), or SEQ ID NOs: 7918-8277, 19484-19843, 21478-21480, 21624-21626, 21550-21552, 21696-21698 or a fragment or variant of any of these (encoding F-del_DSCav1_mut8).

[0084] In a second aspect, the present invention provides a composition comprising the artificial RNA of the first aspect.

[0085] In preferred embodiments, the composition comprising the artificial RNA of the first aspect comprises at least one further artificial RNA comprising at least one coding sequence encoding at least one antigenic peptide or protein derived from RSV selected from matrix protein M, nucleoprotein N, M2-1 protein, and/or phosphoprotein P or combinations thereof.

[0086] Matrix protein M, nucleoprotein N, M2-1 protein, M2-2 protein, and/or phosphoprotein P are suitable T-cell antigens and may promote efficient T-cell responses of the composition or vaccine when administered to a subject.

[0087] The further artificial RNA may comprise a coding sequence being identical or at least 70%, 80%, 85%, 86%, 87%, 88%, 89%, 90%, 91%, 92%, 93%, 94%, 95%, 96%, 97%, 98%, or 99% identical to any one of SEQ ID NOs: 9685-9692, 10135-10142, 10638-10645, 11184-11191, 21385-21388, 19845-19852, 20214-20221, 20583-20590, 20952-20959, 21411-21414 or a fragment or variant of any of these sequences.

[0088] Suitably, said further artificial RNA comprises or consists of an RNA sequence which is identical or at least 70%, 80%, 85%, 86%, 87%, 88%, 89%, 90%, 91%, 92%, 93%, 94%, 95%, 96%, 97%, 98%, or 99% identical to a nucleic acid sequence selected from SEQ ID NOs: 9693-10052, 10143-10502, 10646-11005, 11192-11551, 19853-20212, 20222-20581, 20591-20950, 20960-21319, 21481-21488, 21627-21634, 21553-21560, 21699-21706 or a fragment or variant of any of these sequences.

[0089] Suitably, the composition may comprise the artificial RNA of the invention complexed with, encapsulated in, or associated with one or more lipids, thereby forming lipid nanoparticles.

[0090] The composition may preferably comprise the artificial RNA of the invention complexed with one or more lipids thereby forming lipid nanoparticles (LNP), wherein the LNP essentially consists of

[0091] (i) at least one cationic lipid as defined herein, preferably a lipid of formula (III), more preferably lipid III-3;

[0092] (ii) a neutral lipid as defined herein, preferably 1,2-distearoyl-sn-glycero-3-phosphocholine (DSPC);

[0093] (iii) a steroid or steroid analogue as defined herein, preferably cholesterol; and

[0094] (iv) a PEG-lipid as defined herein, e.g. PEG-DMG or PEG-cDMA, preferably a PEGylated lipid of formula (IVa); wherein (i) to (iv) are in a molar ratio of about 20-60% cationic lipid: 5-25% neutral lipid: 25-55% sterol; 0.5-15% PEG-lipid.

[0095] The present invention also concerns a RSV vaccine comprising said artificial RNA or said composition.

[0096] The present invention is also directed to the use of the artificial RNA, the composition and the vaccine in treatment or prophylaxis of an infection with RSV.

[0097] In particular, the present invention is directed to the use of the artificial RNA, the composition and the vaccine in treatment or prophylaxis of an infection with RSV or a disorder related to such an infection.

[0098] The invention further concerns a method of treating or preventing a disorder or a disease in a subject, first and second medical uses of the artificial RNA, compositions and vaccines. Further, the invention is directed to a kit, particularly to a kit of parts, comprising the artificial RNA, compositions and vaccines.

### DETAILED DESCRIPTION OF THE INVENTION

[0099] The present application is filed together with a sequence listing in electronic format, which is part of the description of the present application (WIPO standard ST.25). The information contained in the electronic format of the sequence listing filed together with this application is incorporated herein by reference in its entirety. Where reference is made herein to a “SEQ ID NO” the corresponding nucleic acid sequence or amino acid (aa) sequence in the sequence listing having the respective identifier is referred to. For many sequences, the sequence listing also provides additional detailed information, e.g. regarding certain structural features, sequence optimizations, GenBank identifiers, or additional detailed information regarding its coding capacity. In particular, such information is provided under numeric identifier <223> in the WIPO standard ST.25 sequence listing. Accordingly, information provided under said numeric identifier <223> is explicitly included herein in its entirety and has to be understood as integral part of the description of the underlying invention.

### Artificial Nucleic Acid:

[0100] In a first aspect, the invention relates to an artificial nucleic acid comprising
[0101] a) at least one heterologous 5′ untranslated region (5′-UTR) and/or at least one heterologous 3′ untranslated region (3′-UTR); and
[0102] b) at least one coding sequence operably linked to said 3′-UTR and/or 5′-UTR encoding at least one antigenic peptide or protein derived from a Respiratory syncytial virus (RSV) or a fragment or variant thereof.

[0103] In a preferred embodiment of the first aspect, the invention relates to an artificial RNA, preferably an RNA suitable for vaccination, comprising
[0104] a) at least one heterologous 5′ untranslated region (5′-UTR) and/or at least one heterologous 3′ untranslated region (3′-UTR); and
[0105] b) at least one coding sequence operably linked to said 3′-UTR and/or 5′-UTR encoding at least one antigenic peptide or protein derived from a RSV fusion (F) protein or a fragment or variant thereof.

[0106] In general, the RNA of the invention may be composed of a protein-coding region, and 5′- and/or 3-untranslated regions (UTRs). The 3′-UTR is variable in sequence and size; it spans between the stop codon and the poly(A) tail. Importantly, the 3′-UTR sequence harbors several regulatory motifs that determine RNA turnover, stability and localization, and thus governs many aspects of post-transcriptional regulation. In medical application of RNA (e.g. immunotherapy applications, vaccination) the regulation of RNA translation into protein is of paramount importance to therapeutic safety and efficacy. The present inventors surprisingly discovered that certain combinations of 3-UTRs and/or 5′-UTRs act in concert to synergistically enhance the expression of operably linked nucleic acid sequences encoding RSV antigenic peptides or proteins. Artificial RNA molecules harboring the inventive UTR combinations advantageously enable the rapid and transient expression of high amounts of RSV antigenic peptides or proteins derived from RSV F. Accordingly, the artificial RNA provided herein is particularly useful and suitable for various applications in vivo, including the vaccination against RSV.

[0107] Suitably, the artificial RNA may comprise at least one heterologous 5′-UTR and/or at least one heterologous 3′-UTR. In this context, an UTR of the invention comprises or consists of a nucleic acid sequence derived from a 5′-UTR or a 3′-UTR of any naturally occurring gene or a fragment, a homolog or a variant thereof. Preferably, a 5-UTR or a 3′-UTR of the invention is heterologous to the at least one coding sequence encoding the at least one antigenic peptide or protein derived from RSV F. Suitable heterologous 5′-UTRs or heterologous 3′-UTRs are derived from naturally occurring genes (that are not derived from RSV). In other embodiments, synthetically engineered 5′-UTRs or 3-UTRs may be used in the context of the present invention.

[0108] In preferred embodiments, the at least one artificial RNA comprises at least one heterologous 3′-UTR.

[0109] Preferably, the at least one heterologous 3′-UTR comprises or consists of a nucleic acid sequence derived from a 3′-UTR of a chordate gene, preferably a vertebrate gene, more preferably a mammalian gene, most preferably a human gene, or from a variant of a 3′-UTR of a chordate gene, preferably a vertebrate gene, more preferably a mammalian gene, most preferably a human gene.

[0110] Preferably the artificial RNA of the present invention comprises a 3′-UTR, which may be derivable from a gene that relates to an RNA with an enhanced half-life (that provides a stable RNA), for example a 3′-UTR as defined and described below.

[0111] Preferably, the at least one heterologous 3′-UTR comprises a nucleic acid sequence derived from a 3′-UTR of a gene, which preferably encodes a stable mRNA, or from a homolog, a fragment or a variant of said gene.

[0112] In preferred embodiments of the first aspect, the artificial RNA of the invention comprises at least one heterologous 3′-UTR, wherein the at least one heterologous 3′-UTR comprises a nucleic acid sequence derived from a 3′-UTR of a gene selected from PSMB3, ALB7, alpha-globin (referred to as “muag”), CASP1, COX6B1, GNAS, NDUFA1 and RPS9, or from a homolog, a fragment or variant of any one of these genes.

[0113] ALB7-derived 3′-UTR: In preferred embodiments, the 3′-UTR comprises or consists of a nucleic acid sequence which is derived from the 3′-UTR of a vertebrate albumin gene or from a variant thereof, preferably from the 3′-UTR of a mammalian albumin gene or from a variant thereof, more preferably from the 3′-UTR of a human albumin gene or from a variant thereof, even more preferably from the 3′-UTR of the human albumin gene according to GenBank Accession number NM_000477.5, or from a homolog, fragment or variant thereof. Accordingly, the artificial RNA of the invention may comprise a 3′-UTR derived from a ALB7 gene, wherein said 3′-UTR derived from a ALB7 gene comprises or consists of a nucleic acid sequence being identical or at least 70%, 80%, 85%, 86%, 87%, 88%, 89%, 90%, 91%, 92%, 93%, 94%, 95%, 96%, 97%, 98%, or 99% identical to SEQ ID NO: 35 or 36 or a fragment or a variant thereof.

[0114] Alpha-globin gene-derived 3′-UTR: In preferred embodiments, the 3′-UTR comprises or consists of a nucleic acid sequence which is derived from the 3′-UTR of a vertebrate alpha-globin gene (referred to as “muag”) or from a variant thereof, preferably from the 3′-UTR of a mammalian alpha-globin or from a variant thereof, more preferably from the 3′-UTR of a human alpha-globin gene or from a variant thereof, even more preferably from the 3′-UTR of the human alpha-globin gene. Accordingly, the RNA of the invention may comprise a 3′-UTR derived from a alpha-globin gene, wherein said 3′-UTR derived from a alpha-globin gene comprises or consists of a nucleic acid sequence being identical or at least 70%, 80%, 85%, 86%, 87%, 88%, 89%, 90%, 91%, 92%, 93%, 94%, 95%, 96%, 97%, 98%, or 99% identical to SEQ ID NO: 37 or 38 or a fragment or a variant thereof.

[0115] PSMB3-derived 3′-UTR: The artificial RNA of the invention may comprise a 3′-UTR which is derived from a 3′-UTR of a gene encoding a proteasome subunit beta type-3 (PSMB3) protein, or a homolog, variant, fragment or derivative thereof. Such 3′-UTRs preferably comprise or consist of a nucleic acid sequences derived from the 3′-UTR of a proteasome subunit beta type-3 (PSMB3) gene, preferably from a vertebrate, more preferably a mammalian, most preferably a human proteasome subunit beta type-3 (PSMB3) gene, or a homolog, variant, fragment or derivative thereof. Said gene may preferably encode a proteasome subunit beta type-3 (PSMB3) protein corresponding to a human proteasome subunit beta type-3 (PSMB3) protein (UniProt Ref. No. P49720, entry version #183 of 30 Aug. 2017). Accordingly, the artificial RNA of the invention may comprise a 3′-UTR derived from a PSMB3 gene, wherein said 3′-UTR derived from a PSMB3 gene comprises or consists of a nucleic acid sequence being identical or at least 70%, 80%, 85%, 86%, 87%, 88%, 89%, 90%, 91%, 92%, 93%, 94%, 95%, 96%, 97%, 98%, or 99% identical to SEQ ID NO: 23 or 24 or a fragment or a variant thereof.

[0116] CASP1-derived 3′-UTR: The artificial RNA of the invention may comprise a 3′-UTR which is derived from a 3′-UTR of a gene encoding a Caspase-1 (CASP1) protein, or a homolog, variant, fragment or derivative thereof. Such 3′-UTRs preferably comprise or consist of a nucleic acid sequence derived from the 3′-UTR of a Caspase-1 (CASP1) gene, preferably from a vertebrate, more preferably a mammalian, most preferably a human Caspase-1 (CASP1) gene, or a homolog, variant, fragment or derivative thereof. Accordingly, the RNA of the invention may comprise a 3′-UTR derived from a CASP1 gene, wherein said 3′-UTR derived from a CASP1 gene comprises or consists of a nucleic acid sequence being identical or at least 70%, 80%, 85%, 86%, 87%, 88%, 89%, 90%, 91%, 92%, 93%, 94%, 95%, 96%, 97%, 98%, or 99% identical to SEQ ID NO: 25 or 26 or a fragment or a variant thereof.

[0117] COX6B1-derived 3′-UTR: The artificial RNA of the invention may comprise a 3′-UTR which is derived from a 3′-UTR of a COX6B1 gene encoding a cytochrome c oxidase subunit 6B1 (COX6B1) protein, or a homolog, variant, fragment or derivative thereof. Such 3′-UTRs preferably comprise or consist of a nucleic acid sequence which is derived from the 3′-UTR of a cytochrome c oxidase subunit 6B1 (COX6B1) gene, preferably from a vertebrate, more preferably a mammalian, most preferably a human cytochrome c oxidase subunit 6B1 (COX6B1) gene, or a homolog, variant, fragment or derivative thereof. Said gene may preferably encode a cytochrome c oxidase subunit 681 (COX6B1) protein corresponding to a human cytochrome c oxidase subunit 6B1 (COX6B1) protein (UniProt Ref. No. P14854, entry version #166 of 30 Aug. 2017). Accordingly, the artificial RNA of the invention may comprise a 3′-UTR derived from a COX6B1 gene, wherein said 3′-UTR derived from a COX6B1 gene comprises or consists of a nucleic acid sequence being identical or at least 70%, 80%, 85%, 86%, 87%, 88%, 89%, 90%, 91%, 92%, 93%, 94%, 95%, 96%, 97%, 98%, or 99% identical to SEQ ID NO: 27 or 28 or a fragment or a variant thereof.

[0118] GNAS-derived 3′-UTR: The artificial RNA of the invention may comprise a 3′-UTR which is derived from a 3′-UTR of a GNAS gene encoding a Guanine nucleotide-binding protein G(s) subunit alpha isoforms short (GNAS) protein, or a homolog, variant, fragment or derivative thereof. Such 3-UTRs preferably comprise or consist of a nucleic acid sequence which is derived from the 3′-UTR of a Guanine nucleotide-binding protein G(s) subunit alpha isoforms short (GNAS) gene, preferably from a vertebrate, more preferably a mammalian Guanine nucleotide-binding protein G(s) subunit alpha isoforms short (GNAS) gene, or a homolog, variant, fragment or derivative thereof. Said gene may preferably encode a Guanine nucleotide-binding protein G(s) subunit alpha isoforms short (GNAS) protein corresponding to a human Guanine nucleotide-binding protein G(s) subunit alpha isoforms short (GNAS) protein (UniProt Ref. No. P63092, entry version #153 of 30 Aug. 2017). Accordingly, the artificial RNA of the invention may comprise a 3′-UTR derived from a GNAS gene, wherein said 3′-UTR derived from a GNAS gene comprises or consists of a nucleic acid sequence being identical or at least 70%, 80%, 85%, 86%, 87%, 88%, 89%, 90%, 91%, 92%, 93%, 94%, 95%, 96%, 97%, 98%, or 99% identical to SEQ ID NO: 29 or 30 or a fragment or a variant thereof.

[0119] NDUFA1-derived 3′-UTR: The artificial RNA of the invention may comprise a 3′-UTR which is derived from a 3′-UTR of a gene encoding a NADH dehydrogenase [ubiquinone] 1 alpha sub complex subunit 1 (NDUFA1) protein, or a homolog, variant, fragment or derivative thereof. Such 3′-UTRs preferably comprise or consist of a nucleic acid sequence derived from the 3′-UTR of a NADH dehydrogenase [ubiquinone] 1 alpha sub complex subunit 1 (NDUFA1) gene, preferably from a vertebrate, more preferably a mammalian NADH dehydrogenase [ubiquinone]1 alpha sub complex subunit 1 (NDUFA1) gene, or a homolog, variant, fragment or derivative thereof. Said gene may preferably encode a NADH dehydrogenase [ubiquinone] 1 alpha sub complex subunit 1 (NDUFA1) protein corresponding to a human NADH dehydrogenase [ubiquinone] 1 alpha sub complex subunit 1 (NDUFA1) protein (UniProt Ref. No. 015239, entry version #152 of 30 Aug. 2017). Accordingly, the artificial RNA of the invention may comprise a 3′-UTR derived from a NDUFA1 gene, wherein said 3′-UTR derived from a NDUFA1 gene comprises or consists of a nucleic acid sequence being identical or at least 70%, 80%, 85%, 86%, 87%, 88%, 89%, 90%, 91%, 92%, 93%, 94%, 95%, 96%, 97%, 98%, or 99% identical to SEQ ID NO: 31 or 32 or a fragment or a variant thereof.

[0120] RPS9-derived 3′-UTR: The artificial RNA of the invention may comprise a 3′-UTR which is derived from a 3′-UTR of a gene encoding a 40S ribosomal protein S9 (RPS9) protein, or a homolog, variant, fragment or derivative thereof. Such 3′-UTRs preferably comprise or consist of a nucleic acid sequence derived from the 3′-UTR of a 40S ribosomal protein S9 (RPS9) gene, preferably from a vertebrate, more preferably a mammalian, most preferably a human 40S ribosomal protein S9 (RPS9) gene, or a homolog, variant, fragment or derivative thereof. Said gene may preferably encode a 40S ribosomal protein S9 (RPS9) protein corresponding to a human 40S ribosomal protein S9 (RPS9) protein (UniProt Ref. No. P46781, entry version #179 of 30 Aug. 2017). Accordingly, the artificial RNA of the invention may comprise a 3′-UTR derived from a RPS9 gene, wherein said 3′-UTR derived from a RPS9 gene comprises or consists of a nucleic acid sequence being identical or at least 70%, 80%, 85%, 86%, 87%, 88%, 89%, 90%, 91%, 92%, 93%, 94%, 95%, 96%, 97%, 98%, or 99% identical to SEQ ID NO: 33 or 34 or a fragment or a variant thereof.

[0121] Further 3′-UTRs: In embodiments, the artificial RNA as defined herein comprises a 3′-UTR as described in WO2016/107877. In this context, the disclosure of WO2016/107877 relating to 3′-UTR sequences is herewith incorporated by reference. Particularly suitable 3′-UTRs are SEQ ID NOs: 1 to 24 and SEQ ID NOs: 49 to 318 of patent application WO2016/107877, or fragments or variants of these sequences. Accordingly, the 3′-UTRs of the artificial RNA of the present invention may comprise or consists of a corresponding RNA sequence of the nucleic acid sequence according SEQ ID NOs: 1 to 24 and SEQ ID NOs: 49 to 318 of the patent application WO2016/107877. In other embodiments, the artificial RNA as defined herein comprises a 3′-UTR as described in WO2017/036580. In this context, the disclosure of WO2017/036580 relating to 3′-UTR sequences is herewith incorporated by reference. Particularly suitable 3-UTRs are SEQ ID NOs: 152 to 204 of the patent application WO2017/036580, or fragments or variants of these sequences. Accordingly, the 3′-UTR of the artificial RNA of the present invention may comprise or consist of a corresponding RNA sequence of the nucleic acid sequence according SEQ ID NOs: 152 to 204 of the patent application WO2017/036580.

[0122] According to preferred embodiments the artificial RNA comprises at least one heterologous 5′-UTR.

[0123] In preferred embodiments, the at least one artificial nucleic acid as defined herein, particularly the RNA as defined herein may comprise at least one heterologous 5′-UTR.

[0124] Preferably, the at least one 5′-UTR comprises or consists of a nucleic acid sequence derived from the 5′-UTR of a chordate gene, preferably a vertebrate gene, more preferably a mammalian gene, most preferably a human gene, or from a variant of the 5′-UTR of a chordate gene, preferably a vertebrate gene, more preferably a mammalian gene, most preferably a human gene.

[0125] Preferably the artificial RNA of the present invention comprises a 5′-UTR, which may be derivable from a gene that relates to an RNA with an enhanced half-life (that provides a stable RNA), for example a 5′-UTR as defined and described below.

[0126] Preferably, the at least one heterologous 5′-UTR comprises a nucleic acid sequence derived from a 5′-UTR of a gene, which preferably encodes a stable mRNA, or from a homolog, a fragment or a variant of said gene.

[0127] In preferred embodiments of the first aspect, the artificial RNA of the invention comprises at least one heterologous 5′-UTR, wherein the at least one heterologous 5′-UTR comprises a nucleic acid sequence derived from a 5′-UTR of gene selected from HSD17B4, RPL32, ASAH1, ATP5A1, MP68, NDUFA4, NOSIP, RPL31, SLC7A3, TUBB4B, and UBQLN2, or from a homolog, a fragment or variant of any one of these genes.

[0128] RPL32-derived 5′-UTR: The artificial RNA of the invention may comprise a 5′-UTR derived from a 5′-UTR of a gene encoding a 60S ribosomal protein L32, or a homolog, variant, fragment or derivative thereof, wherein said 5′-UTR preferably lacks the 5′TOP motif. Such 5′-UTRs preferably comprise or consist of a nucleic acid sequence derived from the 5′-UTR of a 60S ribosomal protein L32 (RPL32) gene, preferably from a vertebrate, more preferably a mammalian, most preferably a human 60S ribosomal protein L32 (RPL32) gene, or a homolog, variant, fragment or derivative thereof, wherein the 5′-UTR preferably does not comprise the 5′TOP of said gene. Said gene may preferably encode a 60S ribosomal protein L32 (RPL32) corresponding to a human 60S ribosomal protein L32 (RPL32) (UniProt Ref. No. P62899, entry version #138 of 30 Aug. 2017). Accordingly, the artificial RNA of the invention may comprise a 5′-UTR derived from a RPL32 gene, wherein said 5′-UTR derived from a RPL32 gene comprises or consists of a nucleic acid sequence being identical or at least 70%, 80%, 85%, 86%, 87%, 88%, 89%, 90%, 91%, 92%, 93%, 94%, 95%, 96%, 97%, 98%, or 99% identical to SEQ ID NO: 21 or 22 or a fragment or a variant thereof.

[0129] HSD17B4-derived 5′-UTR: The artificial RNA of the invention may comprise a 5′-UTR derived from a 5′-UTR of a gene encoding a 17-beta-hydroxysteroid dehydrogenase 4, or a homolog, variant, fragment or derivative thereof, preferably lacking the 5′TOP motif. Such 5′-UTRs preferably comprise or consist of a nucleic acid sequence derived from the 5′-UTR of a 17-beta-hydroxysteroid dehydrogenase 4 (also referred to as peroxisomal multifunctional enzyme type 2) gene, preferably from a vertebrate, more preferably mammalian, most preferably human 17-beta-hydroxysteroid dehydrogenase 4 (HSD17B4) gene, or a homolog, variant, fragment or derivative thereof, wherein preferably the 5′-UTR does not comprise the 5′TOP of said gene. Said gene may preferably encode a 17-beta-hydroxysteroid dehydrogenase 4 protein corresponding to human 17-beta-hydroxysteroid dehydrogenase 4 (UniProt Ref. No. Q9BPX1, entry version #139 of Aug. 30, 2017), or a homolog, variant, fragment or derivative thereof. Accordingly, the artificial RNA of the invention may comprise a 5′-UTR derived from a HSD17B4 gene, wherein said 5′-UTR derived from a HSD17B4 gene comprises or consists of a nucleic acid sequence being identical or at least 70%, 80%, 85%, 86%, 87%, 88%, 89%, 90%, 91%, 92%, 93%, 94%, 95%, 96%, 97%, 98%, or 99% identical to SEQ ID NO: 1 or 2 or a fragment or a variant thereof.

[0130] ASAH1-derived 5′-UTR: The artificial RNA of the invention may comprise a 5′-UTR derived from a 5′-UTR of a gene encoding acid ceramidase (ASAH1), or a homolog, variant, fragment or derivative thereof. Such 5′-UTRs preferably comprise or consist of a nucleic acid sequence derived from the 5′-UTR of an acid ceramidase (ASAH1) gene, preferably from a vertebrate, more preferably mammalian, most preferably human acid ceramidase (ASAH1) gene, or a homolog, variant, fragment or derivative thereof. Said gene may preferably encode an acid ceramidase (ASAH1) protein corresponding to human acid ceramidase (ASAH1) (UniProt Ref. No. Q13510, entry version #177 of Jun. 7, 2017), or a homolog, variant, fragment or derivative thereof. Accordingly, the artificial RNA of the invention may comprise a 5′-UTR derived from a ASAH1 gene, wherein said 5′-UTR derived from a ASAH1 gene comprises or consists of a nucleic acid sequence being identical or at least 70%, 80%, 85%, 86%, 87%, 88%, 89%, 90%, 91%, 92%, 93%, 94%, 95%, 96%, 97%, 98%, or 99% identical to SEQ ID NO: 3 or 4 or a fragment or a variant thereof.

[0131] ATP5A1-derived 5′-UTR: The artificial RNA of the invention may comprise a 5′-UTR which is derived from a 5′-UTR of a gene encoding mitochondrial ATP synthase subunit alpha (ATP5A1), or a homolog, variant, fragment or derivative thereof, wherein said 5′-UTR preferably lacks the 5′TOP motif. Such 5′-UTRs preferably comprise or consist of a nucleic acid sequence derived from the 5′-UTR of a mitochondrial ATP synthase subunit alpha (ATP5A1) gene, preferably from a vertebrate, more preferably a mammalian and most preferably a human mitochondrial ATP synthase subunit alpha (ATP5A1) gene, or a homolog, variant, fragment or derivative thereof, wherein the 5′-UTR preferably does not comprise the 5′TOP of said gene. Said gene may preferably encode a mitochondrial ATP synthase subunit alpha protein corresponding to human acid mitochondrial ATP synthase subunit alpha (UniProt Ref. No. P25705, entry version #208 of Aug. 30, 2017), or a homolog, variant, fragment or derivative thereof. Accordingly, the artificial RNA of the invention may comprise a 5′-UTR derived from a ATP5A1 gene, wherein said 5′-UTR derived from a ATP5A1 gene comprises or consists of a nucleic acid sequence being identical or at least 70%, 80%, 85%, 86%, 87%, 88%, 89%, 90%, 91%, 92%, 93%, 94%, 95%, 96%, 97%, 98%, or 99% identical to SEQ ID NO: 5 or 6 or a fragment or a variant thereof.

[0132] MP68-derived 5′-UTR: The artificial RNA of the invention may comprise a 5′-UTR which is derived from a 5′-UTR of a gene encoding MP68, or a homolog, fragment or variant thereof. Such 5′-UTRs preferably comprise or consist of a nucleic acid sequence derived from the 5′-UTR of a 6.8 kDa mitochondrial proteolipid (MP68) gene, preferably from a vertebrate, more preferably a mammalian 6.8 kDa mitochondrial proteolipid (MP68) gene, or a homolog, variant, fragment or derivative thereof. Said gene may preferably encode a 6.8 kDa mitochondrial proteolipid (MP68) protein corresponding to a human 6.8 kDa mitochondrial proteolipid (MP68) protein (UniProt Ref. No. P56378, entry version #127 of 15 Feb. 2017). Accordingly, the artificial RNA of the invention may comprise a 5′-UTR derived from a MP68 gene, wherein said 5′-UTR derived from a MP68 gene comprises or consists of a nucleic acid sequence being identical or at least 70%, 80%, 85%, 86%, 87%, 88%, 89%, 90%, 91%, 92%, 93%, 94%, 95%, 96%, 97%, 98%, or 99% identical to SEQ ID NO: 7 or 8 or a fragment or a variant thereof.

[0133] NDUFA4-derived 5′-UTR: The artificial RNA of the invention may comprise a 5′-UTR which is derived from a 5′-UTR of a gene encoding a Cytochrome c oxidase subunit (NDUFA4), or a homolog, fragment or variant thereof. Such 5′-UTRs preferably comprise or consist of a nucleic acid sequence derived from the 5′-UTR of a Cytochrome c oxidase subunit (NDUFA4) gene, preferably from a vertebrate, more preferably a mammalian Cytochrome c oxidase subunit (NDUFA4) gene, or a homolog, variant, fragment or derivative thereof. Said gene may preferably encode a Cytochrome c oxidase subunit (NDUFA4) protein corresponding to a human Cytochrome c oxidase subunit (NDUFA4) protein (UniProt Ref. No. 000483, entry version #149 of 30 Aug. 2017). Accordingly, the artificial RNA of the invention may comprise a 5′-UTR derived from a NDUFA4 gene, wherein said 5′-UTR derived from a NDUFA4 gene comprises or consists of a nucleic acid sequence being identical or at least 70%, 80%, 85%, 86%, 87%, 88%, 89%, 90%, 91%, 92%, 93%, 94%, 95%, 96%, 97%, 98%, or 99% identical to SEQ ID NO: 9 or 10 or a fragment or a variant thereof.

[0134] NOSIP-derived 5′-UTR: The artificial RNA of the invention may comprise a 5′-UTR which is derived from a 5-UTR of a gene encoding a Nitric oxide synthase-interacting (NOSIP) protein, or a homolog, variant, fragment or derivative thereof. Such 5′-UTRs preferably comprise or consist of a nucleic acid sequence derived from the 5′-UTR of a Nitric oxide synthase-interacting protein (NOSIP) gene, preferably from a vertebrate, more preferably a mammalian, most preferably a human Nitric oxide synthase-interacting protein (NOSIP) gene, or a homolog, variant, fragment or derivative thereof. Said gene may preferably encode a Nitric oxide synthase-interacting protein (NOSIP) protein corresponding to a human Nitric oxide synthase-interacting protein (NOSIP) protein (UniProt Ref. No. Q9Y314, entry version #130 of 7 Jun. 2017). Accordingly, the artificial RNA of the invention may comprise a 5′-UTR derived from a NOSIP gene, wherein said 5′-UTR derived from a NOSIP gene comprises or consists of a nucleic acid sequence being identical or at least 70%, 80%, 85%, 86%, 87%, 88%, 89%, 90%, 91%, 92%, 93%, 94%, 95%, 96%, 97%, 98%, or 99% identical to SEQ ID NO: 11 or 12 or a fragment or a variant thereof.

[0135] RPL31-derived 5′-UTR: The artificial RNA of the invention may comprise a 5′-UTR which is derived from a 5′-UTR of a gene encoding a 60S ribosomal protein L31, or a homolog, variant, fragment or derivative thereof, wherein said 5′-UTR preferably lacks the 5′TOP motif. Such 5′-UTR preferably comprise or consist of a nucleic acid sequence derived from the 5′-UTR of a 60S ribosomal protein L31 (RPL31) gene, preferably from a vertebrate, more preferably a mammalian60S ribosomal protein L31 (RPL31) gene, or a homolog, variant, fragment or derivative thereof, wherein the 5′-UTR preferably does not comprise the 5′TOP of said gene. Said gene may preferably encode a 60S ribosomal protein L31 (RPL31) corresponding to a human 60S ribosomal protein L31 (RPL31) (UniProt Ref. No. P62899, entry version #138 of 30 Aug. 2017). Accordingly, the artificial RNA of the invention may comprise a 5′-UTR derived from a RPL31 gene, wherein said 5′-UTR derived from a RPL31 gene comprises or consists of a nucleic acid sequence being identical or at least 70%, 80%, 85%, 86%, 87%, 88%, 89%, 90%, 91%, 92%, 93%, 94%, 95%, 96%, 97%, 98%, or 99% identical to SEQ ID NO: 13 or 14 or a fragment or a variant thereof.

[0136] SLC7A3-derived 5′-UTR: The artificial RNA of the invention may comprise a 5′-UTR which is derived from a 5′-UTR of a gene encoding a cationic amino acid transporter 3 (solute carrier family 7 member 3, SLC7A3) protein, or a homolog, variant, fragment or derivative thereof. Such 5′-UTRs preferably comprise or consist of a nucleic acid sequence derived from the 5′-UTR of a cationic amino acid transporter 3 (SLC7A3) gene, preferably from a vertebrate, more preferably a mammalian cationic amino acid transporter 3 (SLC7A3) gene, or a homolog, variant, fragment or derivative thereof. Said gene may preferably encode a cationic amino acid transporter 3 (SLC7A3) protein corresponding to a human cationic amino acid transporter 3 (SLC7A3) protein (UniProt Ref. No. Q8WY07, entry version #139 of 30 Aug. 2017). Accordingly, the artificial RNA of the invention may comprise a 5′-UTR derived from a SLC7A3 gene, wherein said 5′-UTR derived from a SLC7A3 gene comprises or consists of a nucleic acid sequence being identical or at least 70%, 80%, 85%, 86%, 87%, 88%, 89%, 90%, 91%, 92%, 93%, 94%, 95%, 96%, 97%, 98%, or 99% identical to SEQ ID NO: 15 or 16 or a fragment or a variant thereof.

[0137] TUBB4B-derived 5′-UTR: The artificial RNA of the invention may comprise a 5′-UTR which is derived from a 5′-UTR of a gene encoding a tubulin beta-4B chain (TUBB4B) protein, or a homolog, variant, fragment or derivative thereof. Such 5′-UTRs preferably comprise or consist of a nucleic acid sequence derived from the 5′-UTR of a tubulin beta-4B chain (TUBB4B) gene, preferably from a vertebrate, more preferably a mammalian and most preferably a human tubulin beta-48 chain (TUBB4B) gene, or a homolog, variant, fragment or derivative thereof. Said gene may preferably encode a tubulin beta-4B chain (TUBB4B) protein corresponding to human tubulin beta-4B chain (TUBB4B) protein (UniProt Ref. No. Q8WY07, entry version #142 of 30 Aug. 2017). Accordingly, the artificial RNA of the invention may comprise a 5′-UTR derived from a TUBB4B gene, wherein said 5′-UTR derived from a TUBB4B gene comprises or consists of a nucleic acid sequence being identical or at least 70%, 80%, 85%, 86%, 87%, 88%, 89%, 90%, 91%, 92%, 93%, 94%, 95%, 96%, 97%, 98%, or 99% identical to SEQ ID NO: 17 or 18 or a fragment or a variant thereof.

[0138] UBQLN2-derived 5′-UTR: The artificial RNA of the invention may comprise a 5′-UTR which is derived from a 5′-UTR of a gene encoding an ubiquilin-2 (UBQLN2) protein, or a homolog, variant, fragment or derivative thereof. Such 5′-UTRs preferably comprise or consist of a nucleic acid sequence derived from the 5′-UTR of an ubiquilin-2 (UBQLN2) gene, preferably from a vertebrate, more preferably a mammalian ubiquilin-2 (UBQLN2) gene, or a homolog, variant, fragment or derivative thereof. Said gene may preferably encode an ubiquilin-2 (UBQLN2) protein corresponding to UniProt Ref. No. Q9UHD9, entry version #151 of 30 Aug. 2017. Accordingly, the artificial RNA of the invention may comprise a 5′-UTR derived from a UBQLN2 gene, wherein said 5′-UTR derived from a UBQLN2 gene comprises or consists of a nucleic acid sequence being identical or at least 70%, 80%, 85%, 86%, 87%, 88%, 89%, 90%, 91%, 92%, 93%, 94%, 95%, 96%, 97%, 98%, or 99% identical to SEQ ID NO: 19 or 20 or a fragment or a variant thereof.

[0139] Further 5′-UTRs: In embodiments, the artificial RNA as defined herein comprises a 5′-UTR as described in WO2013/143700. In this context, the disclosure of WO2013/143700 relating to 5′-UTR sequences is herewith incorporated by reference. Particularly preferred 5′-UTRs are nucleic acid sequences derived from SEQ ID NOs: 1-1363, SEQ ID NO: 1395, SEQ ID NO: 1421 and SEQ ID NO: 1422 of the patent application WO2013/143700, or fragments or variants of these sequences. In this context, it is preferred that the 5′-UTR of the artificial RNA according to the present invention comprises or consists of a corresponding RNA sequence of the nucleic acid sequence according SEQ ID NOs: 1-1363, SEQ ID NO: 1395, SEQ ID NO: 1421 and SEQ ID NO: 1422 of the patent application WO2013/143700. In other embodiments, the artificial RNA of the invention comprises a 5′-UTR as described in WO2016/107877. In this context, the disclosure of WO2016/107877 relating to 5′-UTR sequences is herewith incorporated by reference. Particularly preferred 5′-UTRs are nucleic acid sequences according to SEQ ID NOs: 25 to 30 and SEQ ID NOs: 319 to 382 of the patent application WO2016/107877, or fragments or variants of these sequences. In this context, it is particularly preferred that the 5′-UTR of the artificial RNA comprises or consists of a corresponding RNA sequence of the nucleic acid sequence according SEQ ID NOs: 25 to 30 and SEQ ID NOs: 319 to 382 of the patent application WO2016/107877. In other embodiments, the artificial RNA of the invention comprises a 5′-UTR as described in WO2017/036580. In this context, the disclosure of WO2017/036580 relating to 5′-UTR sequences is herewith incorporated by reference. Particularly preferred 5′-UTRs are nucleic acid sequences according to SEQ ID NOs: 1 to 151 of the patent application WO2017/036580, or fragments or variants of these sequences. In this context, it is particularly preferred that the 5′-UTR of the artificial RNA comprises or consists of a corresponding RNA sequence of the nucleic acid sequence according to SEQ ID NOs: 1 to 151 of the patent application WO2017/036580.

[0140] The inventors observed that certain combinations of at least one heterologous 5′-UTR and/or at least one heterologous 3′-UTR are advantageously increasing the translation of the at least one coding sequence operably linked to said 3′-UTR and/or 5′-UTR encoding at least one antigenic peptide or protein derived from a RSV F protein in the target tissue (e.g., muscle, dermis).

[0141] Accordingly it is preferred that the at least one heterologous 5′-UTR as defined herein and the at least one heterologous 3′-UTR as defined herein act synergistically to increase production (that is translation) of antigenic peptide or protein from the artificial RNA of the invention. These advantageous combinations of 5′-UTR and 3-UTR are specified in the following. Each of the abbreviation introduced below, namely “a-1”, “a-2”, “a-3”, “a-4”, “a-5”, “b-1”, “b-2”, “b-3”, “b-4”, “b-5”, “c-1”, “c-2”, “c-3” “c-4”, “c-5”, “d-1”, “d-2”, “d-3”, “d-4”, “d-5”, “e-1” “e-2” “e-3”, “e-4”, “e-5”, “e-6”, “f-1”, “f-2”, “f-3”, “f-4”, “f-5, “g-1”, “g-2”, “g-3”, “g-4”, “g-5”, “h-1”, “h-2”, “h-3”, “h-4”, “h-5”, i-1”, “i-2”, “i-3”, are used throughout the specification of the present invention and represent one advantageous combination of 5′-UTR and/or 3′UTR of the invention.

[0142] Accordingly, in preferred embodiments of the first aspect, the artificial RNA of the invention comprises
[0143] a-1. at least one 5′-UTR derived from a 5′-UTR of a HSD174 gene, or from a corresponding RNA sequence, homolog, fragment or variant thereof and at least one 3′-UTR derived from a 3′-UTR of a PSMB3 gene, or from a corresponding RNA sequence, homolog, fragment or variant thereof; or
[0144] a-2. at least one 5′-UTR derived from a 5′-UTR of a NDUFA4 gene, or from a corresponding RNA sequence, homolog, fragment or variant thereof and at least one 3′-UTR derived from a 3′-UTR of a PSMB3 gene, or from a corresponding RNA sequence, homolog, fragment or variant thereof; or
[0145] a-3. at least one 5′-UTR derived from a 5′-UTR of a SLC7A3 gene, or from a corresponding RNA sequence, homolog, fragment or variant thereof and at least one 3′-UTR derived from a 3′-UTR of a PSMB3 gene, or from a corresponding RNA sequence, homolog, fragment or variant thereof; or
[0146] a-4. at least one 5′-UTR from a 5′-UTR of a NOSIP gene, or from a corresponding RNA sequence, homolog, fragment or variant thereof and at least one 3′-UTR derived from a 3′-UTR of a PSMB3 gene, or from a corresponding RNA sequence, homolog, fragment or variant thereof; or
[0147] a-5. at least one 5′-UTR derived from a 5′-UTR of a MP68 gene, or from a corresponding RNA sequence, homolog, fragment or variant thereof and at least one 3′-UTR derived from a 3′-UTR of a PSMB3 gene, or from a corresponding RNA sequence, homolog, fragment or variant thereof; or
[0148] b-1. at least one 5′-UTR derived from a 5′-UTR of a UBQLN2 gene, or from a corresponding RNA sequence, homolog, fragment or variant thereof and at least one 3-UTR derived from a 3′-UTR of a RPS9 gene, or from a corresponding RNA sequence, homolog, fragment or variant thereof; or
[0149] b-2. at least one 5′-UTR derived from a 5′-UTR of a ASAH1 gene, or from a corresponding RNA sequence, homolog, fragment or variant thereof and at least one 3′-UTR derived from a 3′-UTR of a RPS9 gene, or from a corresponding RNA sequence, homolog, fragment or variant thereof; or
[0150] b-3. at least one 5′-UTR derived from a 5′-UTR of a HSD17B4 gene, or from a corresponding RNA sequence, homolog, fragment or variant thereof and at least one 3′-UTR derived from a 3′-UTR of a RPS9 gene, or from a corresponding RNA sequence, homolog, fragment or variant thereof; or
[0151] b-4. at least one 5′-UTR derived from a 5′-UTR of a HSD17B4 gene, or from a corresponding RNA sequence, homolog, fragment or variant thereof and at least one 3′-UTR derived from a 3′-UTR of a CASP1 gene, or from a corresponding RNA sequence, homolog, fragment or variant thereof; or
[0152] b-5. at least one 5′-UTR derived from a 5′-UTR of a NOSIP gene, or from a corresponding RNA sequence, homolog, fragment or variant thereof and at least one 3′-UTR derived from a 3′-UTR of a COX6B1 gene, or from a corresponding RNA sequence, homolog, fragment or variant thereof; or
[0153] c-1. at least one 5′-UTR derived from a 5′-UTR of a NDUFA4 gene, or from a corresponding RNA sequence, homolog, fragment or variant thereof and at least one 3′-UTR derived from a 3′-UTR of a RPS9 gene, or from a corresponding RNA sequence, homolog, fragment or variant thereof; or
[0154] c-2. at least one 5′-UTR derived from a 5′-UTR of a NOSIP gene, or from a corresponding RNA sequence, homolog, fragment or variant thereof and at least one 3′-UTR derived from a 3′-UTR of a NDUFA1 gene, or from a corresponding RNA sequence, homolog, fragment or variant thereof; or
[0155] c-3. at least one 5′-UTR derived from a 5′-UTR of a NDUFA4 gene, or from a corresponding RNA sequence, homolog, fragment or variant thereof and at least one 3′-UTR derived from a 3′-UTR of a COX6B1 gene, or from a corresponding RNA sequence, homolog, fragment or variant thereof; or
[0156] c-4. at least one 5′-UTR derived from a 5′-UTR of a NDUFA4 gene, or from a corresponding RNA sequence, homolog, fragment or variant thereof and at least one 3′-UTR derived from a 3′-UTR of a NDUFA1 gene, or from a corresponding RNA sequence, homolog, fragment or variant thereof; or
[0157] c-5. at least one 5′-UTR derived from a 5′-UTR of a ATP5A1 gene, or from a corresponding RNA sequence, homolog, fragment or variant thereof and at least one 3′-UTR derived from a 3′-UTR of a PSMB3 gene, or from a corresponding RNA sequence, homolog, fragment or variant thereof; or
[0158] d-1. at least one 5′-UTR derived from a 5′-UTR of a RPL31 gene, or from a corresponding RNA sequence, homolog, fragment or variant thereof and at least one 3′-UTR derived from a 3′-UTR of a PSMB3 gene, or from a corresponding RNA sequence, homolog, fragment or variant thereof; or
[0159] d-2. at least one 5′-UTR derived from a 5′-UTR of a ATP5A1 gene, or from a corresponding RNA sequence, homolog, fragment or variant thereof and at least one 3′-UTR derived from a 3′-UTR of a CASP1 gene, or from a corresponding RNA sequence, homolog, fragment or variant thereof; or
[0160] d-3. at least one 5′-UTR derived from a 5′-UTR of a SLC7A3 gene, or from a corresponding RNA sequence, homolog, fragment or variant thereof and at least one 3′-UTR derived from a 3′-UTR of a GNAS gene, or from a corresponding RNA sequence, homolog, fragment or variant thereof; or
[0161] d-4. at least one 5′-UTR derived from a 5′-UTR of a HSD17B4 gene, or from a corresponding RNA sequence, homolog, fragment or variant thereof and at least one 3′-UTR derived from a 3′-UTR of a NDUFA1 gene, or from a corresponding RNA sequence, homolog, fragment or variant thereof; or
[0162] d-5. at least one 5′-UTR derived from a 5′-UTR of a SLC7A3 gene, or from a corresponding RNA sequence, homolog, fragment or variant thereof and at least one 3′-UTR derived from a 3′-UTR of a NDUFA1 gene, or from a corresponding RNA sequence, homolog, fragment or variant thereof; or
[0163] e-1. at least one 5′-UTR derived from a 5′-UTR of a TUBB4B gene, or from a corresponding RNA sequence, homolog, fragment or variant thereof and at least one 3′-UTR derived from a 3′-UTR of a RPS9 gene, or from a corresponding RNA sequence, homolog, fragment or variant thereof; or
[0164] e-2. at least one 5′-UTR derived from a 5′-UTR of a RPL31 gene, or from a corresponding RNA sequence, homolog, fragment or variant thereof and at least one 3′-UTR derived from a 3′-UTR of a RPS9 gene, or from a corresponding RNA sequence, homolog, fragment or variant thereof; or
[0165] e-3. at least one 5′-UTR derived from a 5′-UTR of a MP68 gene, or from a corresponding RNA sequence, homolog, fragment or variant thereof and at least one 3′-UTR derived from a 3′-UTR of a RPS9 gene, or from a corresponding RNA sequence, homolog, fragment or variant thereof; or
[0166] e-4. at least one 5′-UTR derived from a 5′-UTR of a NOSIP gene, or from a corresponding RNA sequence, homolog, fragment or variant thereof and at least one 3′-UTR derived from a 3′-UTR of a RPS9 gene, or from a corresponding RNA sequence, homolog, fragment or variant thereof; or
[0167] e-5. at least one 5′-UTR derived from a 5′-UTR of a ATP5A1 gene, or from a corresponding RNA sequence, homolog, fragment or variant thereof and at least one 3′-UTR derived from a 3′-UTR of a RPS9 gene, or from a corresponding RNA sequence, homolog, fragment or variant thereof; or
[0168] e-6. at least one 5′-UTR derived from a 5′-UTR of a ATP5A1 gene, or from a corresponding RNA sequence, homolog, fragment or variant thereof and at least one 3′-UTR derived from a 3′-UTR of a COX6B1 gene, or from a corresponding RNA sequence, homolog, fragment or variant thereof; or
[0169] f-1. at least one 5′-UTR derived from a 5′-UTR of a ATP5A1 gene, or from a corresponding RNA sequence, homolog, fragment or variant thereof and at least one 3′-UTR derived from a 3′-UTR of a GNAS gene, or from a corresponding RNA sequence, homolog, fragment or variant thereof; or
[0170] f-2. at least one 5′-UTR derived from a 5′-UTR of a ATP5A1 gene, or from a corresponding RNA sequence, homolog, fragment or variant thereof and at least one 3′-UTR derived from a 3′-UTR of a NDUFA1 gene, or from a corresponding RNA sequence, homolog, fragment or variant thereof; or
[0171] f-3. at least one 5′-UTR derived from a 5′-UTR of a HSD17B4 gene, or from a corresponding RNA sequence, homolog, fragment or variant thereof and at least one 3′-UTR derived from a 3′-UTR of a COX6B1 gene, or from a corresponding RNA sequence, homolog, fragment or variant thereof; or
[0172] f-4 at least one 5′-UTR derived from a 5′-UTR of a HSD17B4 gene, or from a corresponding RNA sequence, homolog, fragment or variant thereof and at least one 3′-UTR derived from a 3-UTR of a GNAS gene, or from a corresponding RNA sequence, homolog, fragment or variant thereof; or
[0173] f-5. at least one 5′-UTR derived from a 5′-UTR of a MP68 gene, or from a corresponding RNA sequence, homolog, fragment or variant thereof and at least one 3′-UTR derived from a 3′-UTR of a COX6B1 gene, or from a corresponding RNA sequence, homolog, fragment or variant thereof; or
[0174] g-1. at least one 5′-UTR derived from a 5′-UTR of a MP68 gene, or from a corresponding RNA sequence, homolog, fragment or variant thereof and at least one 3′-UTR derived from a 3′-UTR of a NDUFA1 gene, or from a corresponding RNA sequence, homolog, fragment or variant thereof; or
[0175] g-2. at least one 5′-UTR derived from a 5′-UTR of a NDUFA4 gene, or from a corresponding RNA sequence, homolog, fragment or variant thereof and at least one 3′-UTR derived from a 3′-UTR of a CASP1 gene, or from a corresponding RNA sequence, homolog, fragment or variant thereof; or
[0176] g-3. at least one 5′-UTR derived from a 5′-UTR of a NDUFA4 gene, or from a corresponding RNA sequence, homolog, fragment or variant thereof and at least one 3′-UTR derived from a 3′-UTR of a GNAS gene, or from a corresponding RNA sequence, homolog, fragment or variant thereof; or
[0177] g-4. at least one 5′-UTR derived from a 5′-UTR of a NOSIP gene, or from a corresponding RNA sequence, homolog, fragment or variant thereof and at least one 3′-UTR derived from a 3′-UTR of a CASP1 gene, or from a corresponding RNA sequence, homolog, fragment or variant thereof; or
[0178] g-5. at least one 5′-UTR derived from a 5′-UTR of a RPL31 gene, or from a corresponding RNA sequence, homolog, fragment or variant thereof and at least one 3′-UTR derived from a 3′-UTR of a CASP1 gene, or from a corresponding RNA sequence, homolog, fragment or variant thereof; or
[0179] h-1. at least one 5′-UTR derived from a 5′-UTR of a RPL31 gene, or from a corresponding RNA sequence, homolog, fragment or variant thereof and at least one 3′-UTR derived from a 3′-UTR of a COX6B1 gene, or from a corresponding RNA sequence, homolog, fragment or variant thereof; or
[0180] h-2. at least one 5′-UTR derived from a 5′-UTR of a RPL31 gene, or from a corresponding RNA sequence, homolog, fragment or variant thereof and at least one 3′-UTR derived from a 3′-UTR of a GNAS gene, or from a corresponding RNA sequence, homolog, fragment or variant thereof; or
[0181] h-3. at least one 5′-UTR derived from a 5′-UTR of a RPL31 gene, or from a corresponding RNA sequence, homolog, fragment or variant thereof and at least one 3′-UTR derived from a 3′-UTR of a NDUFA1 gene, or from a corresponding RNA sequence, homolog, fragment or variant thereof; or
[0182] h-4. at least one 5′-UTR derived from a 5′-UTR of a SLC7A3 gene, or from a corresponding RNA sequence, homolog, fragment or variant thereof and at least one 3-UTR derived from a 3′-UTR of a CASP1 gene, or from a corresponding RNA sequence, homolog, fragment or variant thereof; or
[0183] h-5. at least one 5′-UTR derived from a 5′-UTR of a SLC7A3 gene, or from a corresponding RNA sequence, homolog, fragment or variant thereof and at least one 3′-UTR derived from a 3′-UTR of a COX6B1 gene, or from a corresponding RNA sequence, homolog, fragment or variant thereof; or
[0184] i-1. at least one 5′-UTR derived from a 5′-UTR of a SLC7A3 gene, or from a corresponding RNA sequence, homolog, fragment or variant thereof and at least one 3′-UTR derived from a 3′-UTR of a RPS9 gene, or from a corresponding RNA sequence, homolog, fragment or variant thereof.
[0185] i-2. at least one 5′-UTR derived from a 5′-UTR of a RPL32 gene, or from a corresponding RNA sequence, homolog, fragment or variant thereof and at least one 3′-UTR derived from a 3′-UTR of a ALB7 gene, or from a corresponding RNA sequence, homolog, fragment or variant thereof.
[0186] i-3. at least one 3′-UTR derived from a 3′-UTR of a alpha-globin gene gene, or from a corresponding RNA sequence, homolog, fragment or variant thereof.

[0187] Suitably, the artificial RNA of the invention comprises at least one coding sequence encoding at least one antigenic peptide or protein derived from a RSV F protein as specified herein operably linked to a 3′-UTR and a 5′-UTR selected from a-1 (HSD17B4/PSMB3), a-2 (Ndufa4/PSMB3), a-3 (SLC7A3/PSMB3), a-4 (NOSIP/PSMB3), a-5 (MP68/PSMB3), b-1 (UBQLN2/RPS9), b-2 (ASAH1/RPS9), b-3 (HSD17B4/RPS9), b-4 (HSD17B4/CASP1), b-5 (NOSIP/COX6B1), c-1 (NDUFA4/RPS9), c-2 (NOSIP/NDUFA1), c-3 (NDUFA4/COX6B1), c-4 (NDUFA4/NDUFA1), c-5 (ATP5A1/PSMB3), d-1 (Rpl31/PSMB3), d-2 (ATP5A1/CASP1), d-3 (SLC7A3/GNAS), d-4 (HSD17B4/NDUFA1), d-5 (Sc7a3/Ndufa1), e-1 (TUBB4B/RPS9), e-2 (RPL31/RPS9), e-3 (MP68/RPS9), e-4 (NOSIP/RPS9), e-5 (ATP5A1/RPS9), e-6 (ATP5A1/COX6B1), f-1 (ATP5A1/GNAS), f-2 (ATP5A1/NDUFA1), f-3 (HSD17B4/COX6B1), f-4 (HSD17B4/GNAS), f-5 (MP68/COX6B1), g-1 (MP68/NDUFA1), g-2 (NDUFA4/CASP1), g-3 (NDUFA4/GNAS), g-4 (NOSIP/CASP1), g-5 (RPL31/CASP1), h-1 (RPL31/COX6B1), h-2 (RPL31/GNAS), h-3 (RPL31/NDUFA1), h-4 (Slc7a3/CASP1), h-5 (SLC7A3/COX6B1), i-1 (SLC7A3/RPS9), i-2 (RPL32/ALB7), or i-3 (a-globin gene).

[0188] In particularly preferred embodiments of the first aspect, the artificial RNA of the invention comprise UTR elements according to a-1 (HSD17B4/PSMB3), a-4 (NDUFA4/PSMB3), c-1 (NDUFA4/RPS9), e-4 (NOSIP/RPS9), g-2 (NDUFA4/CASP1), i-2 (RPL32/ALB7), or i-3 (alpha-globin (muag)).

[0189] In a particularly preferred embodiment of the first aspect, the artificial RNA of the invention comprises UTR elements according to a-1 (HSD17B4/PSMB3).

[0190] The invention relates to an artificial RNA, preferably an RNA suitable for vaccination, comprising at least one heterologous 5′-UTR as defined above and/or at least one heterologous 3′-UTR as defined above and at least one coding sequence operably linked to said 3′-UTR and/or 5′-UTR, wherein said coding sequence encodes at least one antigenic peptide or protein derived from a Respiratory syncytial virus (“RSV”), or a fragment or variant thereof.

[0191] As used herein, the term “Respiratory syncytial virus” or the corresponding abbreviation “RSV” is not limited to a particular virus strain, variant, serotype, or isolate, etc. comprising any Respiratory syncytial virus of any origin.

[0192] According to various embodiments, the artificial RNA, preferably the coding sequence of the artificial RNA comprises or consists of a nucleic acid sequence that is derived from viruses, with NCBI Taxonomy ID (“NCBI-ID”) provided in List 1 below.

[0193] List 1: RSV Virus Strains:

[0194] Human orthopneumovirus, HRSV (NCBI-ID 11250); Human respiratory syncytial virus A, HRSV-A, Respiratory syncytial virus group A (NCBI-ID 208893); Human respiratory syncytial virus A strain Long, Human respiratory syncytial virus (subgroup A/strain Long) (NCBI-ID 11260); Human respiratory syncytial virus A2, Human respiratory syncytial virus (strain A2), HRSVA (NCBI-ID 11259); Human respiratory syncytial virus (strain RSB1734), (NCBI-ID 11253); Human respiratory syncytial virus (strain RSB5857) (NCBI-ID 11254); Human respiratory syncytial virus (strain RSB6190), (NCBI-ID 11255); Human respiratory syncytial virus (strain RSB6256), (NCBI-ID 11256); Human respiratory syncytial virus (strain RSB642), (NCBI-ID 11252); Human respiratory syncytial virus (strain RSB6614), (NCBI-ID 11257); Human respiratory syncytial virus B, HRSV-B, Respiratory syncytial virus group B, (NCBI-ID 208895); Human Respiratory syncytial virus 9320 (NCBI-ID 253182); Human respiratory syncytial virus B1 (NCBI-ID 79692); Human respiratory syncytial virus (subgroup B/strain 18537), (NCBI-ID 11251); Human respiratory syncytial virus (subgroup B/strain 8/60), (NCBI-ID 11258); Human respiratory syncytial virus S2, (NCBI-ID 410078); Human respiratory syncytial virus strain RSS-2, (NCBI-ID 11261); unclassified Human respiratory syncytial virus, (NCBI-ID 410233); Human respiratory syncytial virus (strain RSP112/Sweden/02-03), (NCBI-ID 410237); Human respiratory syncytial virus (strain RSP120/Sweden/02-03), (NCBI-ID 410238); Human respiratory syncytial virus (strain RSP121/Sweden/02-03), (NCBI-ID 410239); Human respiratory syncytial virus (strain RSP122/Sweden/02-03), (NCBI-ID 410247); Human respiratory syncytial virus (strain RSP13/Sweden/02-03), (NCBI-ID 410241); Human respiratory syncytial virus (strain RSP140/Sweden/02-03), (NCBI-ID 410248); Human respiratory syncytial virus (strain RSP16/Sweden/02-03), (NCBI-ID 410242); Human respiratory syncytial virus (strain RSP171/Sweden/02-03), (NCBI-ID 410246); Human respiratory syncytial virus (strain RSP183/Sweden/02-03), (NCBI-ID 410249); Human respiratory syncytial virus (strain RSP191/Sweden/02-03), (NCBI-ID 410240); Human respiratory syncytial virus (strain RSP199/Sweden/02-03), (NCBI-ID 410250); Human respiratory syncytial virus (strain RSP212/Sweden/02-03), (NCBI-ID 410251); Human respiratory syncytial virus (strain RSP41/Sweden/02-03), (NCBI-ID 410234); Human respiratory syncytial virus (strain RSP45/Sweden/02-03), (NCBI-ID 410235); Human respiratory syncytial virus (strain RSP56/Sweden/02-03), (NCBI-ID 410243); Human respiratory syncytial virus (strain RSP58/Sweden/02-03), (NCBI-ID 410236); Human respiratory syncytial virus (strain RSP67/Sweden/02-03), (NCBI-ID 410244); Human respiratory syncytial virus (strain RSP94/Sweden/02-03) (NCBI-ID 410245); Respiratory syncytial virus isolate RSV Memphis-37, (strain Memphis-37) (NCBI-ID 12814).

[0195] In preferred embodiments of the invention, the at least one antigenic peptide or protein is derived from a Respiratory syncytial virus isolate RSV Memphis-37 (strain Memphis-37) (NCBI-ID: 12814). Throughout the present invention, including the information contained in the ST25 sequence listing, the abbreviation “HRSV(Memphis-37)” is used for said particularly preferred RSV virus.

[0196] In preferred embodiments of the invention, the at least one antigenic peptide or protein is derived from a Human respiratory syncytial virus A2, Human respiratory syncytial virus (strain A2) (NCBI-ID: 11259). Throughout the present invention, including the information contained in the ST25 sequence listing, the abbreviation “HRSV(A2)” is used for said particularly preferred RSV virus.

[0197] It has to be understood that the skilled person may also use amino acid sequences and nucleic acid sequences derived from any RSV strains provided in List 1 to adapt the teaching of the present invention and to obtain RNA constructs, compositions, and vaccines according to the invention.

[0198] In various embodiments, the at least one antigenic peptide or protein may be selected from fusion protein (F), glycoprotein G, short hydrophobic protein SH, matrix protein M, nucleoprotein N, large polymerase L, M2-1 protein, M2-2 protein, phosphoprotein P, non-structural protein NS1, or non-structural protein NS2 of Respiratory syncytial virus (RSV) or a fragment, variant or derivative thereof.

[0199] In particularly preferred embodiments of the first aspect, the at least one antigenic peptide or protein is derived from an RSV fusion (F) protein. In this context, the amino acid sequence of the at least one antigenic peptide or protein may be selected from any peptide or protein derived from RSV fusion protein F or from a fragment, variant or derivative thereof.

[0200] RSV F protein is initially expressed (after infection of a host cell) as a single polypeptide precursor, designated full-length fusion protein F (herein referred to as “F0”). F0 forms a trimer in the endoplasmic reticulum and is processed by a cellular/host furin-like protease at two conserved sites, generating, F1, F2, and Pep27 polypeptides. The Pep27 polypeptide is excised and does not form part of the mature F protein. The F2 polypeptide originates from the N-terminal portion of the F0 precursor and links to the F1 polypeptide via two disulfide bonds. The F1 polypeptide originates from the C-terminal portion of the F0 precursor and anchors the mature F protein in the membrane via a transmembrane domain, which is linked to a cytoplasmic tail. Three F2-F1 heterodimer units (“protomers”) assemble to form a mature F protein. Initially, the mature F protein is in a metastable form (herein referred to as “pre-fusion conformation”). Upon triggering, it undergoes a dramatic and irreversible conformational change (herein referred to as “postfusion conformation”) that fuses the viral and target-cell membranes.

[0201] Accordingly, the artificial RNA of the first aspect, preferably the artificial RNA suitable for vaccination, encodes at least one antigenic peptide or protein derived from a RSV F protein or a fragment or variant thereof.

[0202] In preferred embodiments, at least one antigenic peptide or protein derived from a RSV F protein may be derived from any one of the following amino acid sequences (NCBI Protein Accession numbers) provided in List 2 below.

[0203] List 2: NCBI Protein Accession Numbers of RSV Fusion (F) Proteins:

[0204] Accession No. Protein, AJF44801.1, AJF44759.1, AJF44661.1, AJF44602.1, 2207424A, AAB38520.1, AAB38517.1, AAB38519.1, AAB38518.1, AVQ93587.1, AVQ93599.1, AVQ93571.1, AVQ93568.1, AVQ93589.1, AVQ93597.1, AVQ93563.1, AVQ93594.1, AVQ93606.1, AVQ93601.1, AVQ93562.1, AVQ93561.1, AVQ93607.1, AVQ93588.1, AVQ93575.1, AVQ93468.1, AVQ93467.1, AVQ93590.1, AVQ93552.1, AVQ93556.1, AVQ93471.1, AVQ93458.1, AVQ93494.1, AVQ93470.1, AVQ93489.1, AVQ93542.1, AVQ93472.1, AVQ93514.1, AVQ93485.1, AVQ93533.1, AVQ93481.1, AVQ93546.1, AVQ93512.1, AVQ93554.1, AVQ93551.1, AVQ93547.1, AVQ93558.1, AVQ93461.1, AVQ93500.1, AVQ93426.1, AVQ93398.1, AVQ93401.1, AVQ93361.1, AVQ93408.1, AVQ93443.1, AVQ93429.1, AVQ93359.1, AVQ93365.1, AVQ93366.1, AVQ93402.1, AVQ93377.1, AVQ93412.1, AVQ93391.1, AVQ93457.1, AVQ93372.1, AVQ93455.1, AVQ93364.1, AVQ93378.1, AVQ93393.1, AVQ93362.1, AVQ93585.1, ART28504.1, AVQ93404.1, AOS49123.1, AOS48496.1, AMT78271.1, AHX57174.1, AHW81390.1, AHV81506.1, AFX60128.1, AFX60129.1, AEQ63389.1, ARB66328.1, ANZ80034.1, AMN91253.1, P03420.1, A1008046.1, NP_056863.1, AFX60234.1, AFX60231.1, AFX60232.1, AFX60222.1, AFX60219.1, AFX60215.1, AFX60214.1, AFX60212.1, AFX60208.1, AFX60202.1, AFX60220.1, AFX60213.1, AFX60190.1, AFX60187.1, AFX60201.1, AFX60173.1, AFX60169.1, AFX60162.1, AFX60156.1, AFX60151.1, AFX60150.1, AFX60148.1, AFX60141.1, AFX60127.1, AFX60137.1, AFX60135.1, AFV46420.1, AFX60200.1, AFV46419.1, AFV46417.1, AFV46413.1, AFV46414.1, AFV46410.1, AFV46403.1, AFV46409.1, AFP99061.1, AFM95400.1, AFV46401.1, AFP99064.1, AFM95376.1, AFX60138.1, AFP99060.1, AFM95365.1, AFM55563.1, AFM55530.1, AFM55442.1, AFM55420.1, AFM55552.1, AFM55365.1, AFP99059.1, AFM95385.1, AFM55354.1, AFM55343.1, AFM55387.1, AFM55299.1, AFM55288.1, AFM55266.1, AFM55277.1, AFM55255.1, AFM55222.1, AFM55211.1, AFI25262.1, AFD34266.1, AFM55332.1, AFD34264.1, AFD34262.1, AFD34265.1, AFD34261.1, AFD34260.1, AFD34259.1, AEQ63641.1, AEQ63487.1, AEQ63520.1, AEQ63378.1, AEQ63367.1, 4CCF_A, AEQ63334.1, AEO45949.1, AEO45939.1, AEQ63312.1, AEQ63586.1, AEO45919.1, AEO45909.1, AEO45889.1, AEO45879.1, AEO45869.1, AEO45929.1, AEO45850.1, AEO45859.1, AEQ63444.1, AEO23054.1, AEO23052.1, AEO23051.1, AEC32087.1, ADZ95785.1, AEC32085.1, ADZ95784.1, ADZ95783.1, ADZ95782.1, ADZ95781.1, ADZ95779.1, ADZ95780.1, ADZ95777.1, ADZ95778.1, ADZ95776.1, ADZ95775.1, ACY68435.1, ACO83302.1, AB35685.1, AFI25251.1, AAX23994.1, AAQ97026.1, AAR14266.1, AAQ97027.1, AAQ97030.1, AAQ97028.1, AAC57027.1, AAQ97029.1, AAQ97031.1, AAM68160.1, AAM44851.1, P11209.2, P13843.1, AAO72325.1, AAM68157.1, CAA26143.1, 1512372A, AAB86664.1, AAO72324.1, AAB82446.1, AAO72323.1, AAM68154.1, AAA47410.1, P12568.1, ARB07894.1, AGG39517.1, BBC54612.1, BBC54636.1, BBC54627.1, BBC54621.1, BBC54570.1, BBC54579.1, BBC54595.1, BBC54555.1, BBC54552.1, BBC54564.1, BBC54581.1, BBC54571.1, BBC54553.1, BBC54565.1, BBC54245.1, BBC54243.1, BBC54238.1, BBC54242.1, BBC54239.1, BBC54235.1, BBC54234.1, BBC54236.1, BBC54244.1, BBC54186.1, BBC54178.1, BBC54202.1, BBC54151.1, BBC54142.1, BBC54134.1, BBC54170.1, BBC54210.1, BBC54169.1, BBC54213.1, BBC54203.1, BBC54160.1, BBC54163.1, BBC54215.1, BBC54156.1, BBC54179.1, BBC54150.1, BBC54207.1, BBC54194.1, BBC54149.1, BBC54138.1, BBC54199.1, BBC54220.1, BBC54181.1, BBC54132.1, BBC54146.1, BBC54122.1, BBC54124.1, BBB35202.1, BBB35201.1, BBB35192.1, BBB35193.1, BBB35199.1, BBB35184.1, BBB35126.1, BBB35133.1, BBB35130.1, BBB35160.1, BBB35162.1, BBB35181.1, BBB35165.1, BBB35121.1, BBB35138.1, BBB35176.1, BBB35142.1, BBB35136.1, BBB35153.1, BBB35115.1, BBB35150.1, BBB35097.1, BBB35109.1, BBB35094.1, BBB35183.1, BBB35104.1, BBB35099.1, BBB35188.1, AKA45871.1, ASV65838.1, AGG39373.1, AII22107.1, AGG39400.1, AGG39457.1, ARR29240.1, ARR29251.1, ARR29189.1, ARR29207.1, AUH15164.1, ATV81343.1, AUC68654.1, AUC68577.1, AUC68566.1, AUC68555.1, AUC68478.1, AUC68445.1, AUC68500.1, AUC68522.1, AUC68291.1, AUC68149.1, AUC68094.1, AMA67097.1, AMA66866.1, AMA66580.1, AIZ95750.1, AIZ95541.1, AIZ95519.1, AHY21419.1, AHY21331.1, AHY21165.1, AHY21143.1, AHY21132.1, AGG39478.1, ATV93506.1, ATV93509.1, AIZ95717.1, ATV81354.1, ART28317.1, BBA57890.1, BBA57901.1, ASZ70099.1, ART28361.1, AQX36844.1, ASK05520.1, ART28427.1, ART28339.1, ART28297.1, ART28328.1, ARQ15966.1, ARN61507.1, ARA15413.1, AGG39394.1, APW78845.1, APW78867.1, APW78900.1, APW78878.1, APW78779.1, APW78702.1, APW78713.1, APW78680.1, APW78658.1, APW78647.1, APW78636.1, AOS48870.1, APW78614.1, AMT78905.1, AMT77402.1, AOZ15479.1, AGN28484.1, AHX57240.1, AHX57031.1, AOS48980.1, AOS48848.1, AOS48815.1, AOS48738.1, AOS49068.1, AOS48727.1, AOS48716.1, AOS48683.1, AOS48551.1, AOS48485.1, AOS48518.1, AOS48441.1, AOS48397.1, AOS48375.1, AOS48353.1, AOS48287.1, AOS48320.1, AOS48265.1, AOS48254.1, AOS48221.1, ANZ79638.1, ALC74025.1, AHV81286.1, AOD40888.1, AOD40516.1, AOD40214.1, AOD40125.1, AOD40104.1, AOD40082.1, AOD39908.1, AJF44826.1, AJF44506.1, AJF44535.1, ANZ80463.1, ANZ80408.1, ANZ80397.1, ANZ80386.1, ANZ80331.1, ANZ80320.1, ANZ80364.1, ANZ80276.1, ANZ80221.1, ANZ80188.1, ANZ80144.1, ANZ80133.1, ANZ80111.1, ANZ80122.1, ANZ80056.1, ANZ80012.1, ANZ80067.1, ANZ79979.1, ANZ79935.1, ANZ79990.1, ANZ79902.1, ANZ79759.1, ANZ79715.1, ANZ79671.1, AMT79718.1, AMT79586.1, AMT79553.1, AMT79542.1, AMT79476.1, AMT79388.1, AMT79201.1, AMT79190.1, AMT79157.1, AMT79124.1, AMT79091.1, AMT79047.1, AMT79014.1, AMT79003.1, AMT78872.1, AMT78832.1, AMT78689.1, AMT78645.1, AMT78513.1, AMT78480.1, AMT78447.1, AMT78392.1, AMT78194.1, AMT78084.1, AMT78051.1, AMT77963.1, AMT77908.1, AMT77776.1, AMT77710.1, AMT77424.1, AMN91385.1, AMN91264.1, AMN91242.1, AHX57504.1, CUS01881.1, CUS01880.1, CUS01877.1, CUS01874.1, CUS01870.1, CUS01875.1, AMA67350.1, AMA67251.1, AMA67262.1, AMA67229.1, AMA67196.1, AMA67130.1, AMA67185.1, AMA67163.1, AMA67086.1, AMA67075.1, AMA66998.1, AMA66987.1, AMA66976.1, AMA66965.1, AMA66921.1, AMA66844.1, AMA66833.1, AMA66624.1, AMA66613.1, AMA66591.1, AMA66569.1, AMA66547.1, AMA66503.1, AMA66492.1, AMA66481.1, AMA66448.1, AMA66415.1, AMA66393.1, AMA66360.1, AGG39553.1, AGG39469.1, AJZ70144.1, AJZ70166.1, AJZ70155.1, AJZ70133.1, AJZ70067.1, AJZ70001.1, AJZ69990.1, AJZ69968.1, AJZ69946.1, AJZ69913.1, AJZ69880.1, AJZ69847.1, AJZ69869.1, AJZ69770.1, AJZ69748.1, AJZ69726.1, AJZ69682.1, AJZ69671.1, AJZ69704.1, AJZ69660.1, AJZ69715.1, AJZ69627.1, AJZ69616.1, AJZ69638.1, AJO16077.1, AJO16055.1, AKE31881.1, AKE31882.1, AKE31878.1, AJF44835.1, AJF44790.1, AJF44737.1, AJF44716.1, AJF44725.1, AJF44643.1, AJF44628.1, AJF44624.1, AJF44613.1, AJF44566.1, AJF44555.1, AJF44526.1, AJF44517.1, AKA45882.1, AKA45849.1, AHA83913.1, AGN28715.1, AHA83902.1, AHA83837.1, AHA83826.1, AHA83705.1, AHA83630.1, AGG39505.1, AIY70242.1, AIY70198.1, AII30203.1, AHY21463.1, AHY21397.1, AHY21320.1, AHY21298.1, AHY21287.1, AHY21276.1, AHY21254.1, AHY21199.1, AHY21176.1, AHX57537.1, AHX57471.1, AHX57427.1, AHX57042.1, AIZ95981.1, AIZ95893.1, AIZ95871.1, AIZ95816.1, AIZ95772.1, AIZ95629.1, AIZ95673.1, AIZ95596.1, AIZ95585.1, AIZ95552.1, AEQ63553.2, AEQ63542.2, AEQ63575.1, AEQ63531.1, AEQ63498.1, AEQ63422.1, AEQ63411.1, AHX57570.1, AHX57152.1, AHX57064.1, AHX57009.1, AHX56987.1, AHV82100.1, AHV82001.1, AHV81891.1, AHV81880.1, AHV81836.1, AHV81682.1, AHV81649.1, AHV81484.1, AHV81462.1, AHV81385.1, AHV81363.1, AHV81330.1, AHV81253.1, AHV81154.1, AHV81122.1, AHV81089.1, AHV81012.1, AHV80957.1, AHV80880.1, AHV80869.1, AHV80836.1, AHV80803.1, AGG39559.1, AGG39562.1, AGG39556.1, AGG39550.1, AGG39547.1, AGG39544.1, AGG39541.1, AGG39529.1, AGG39526.1, AGG39523.1, AGG39514.1, AGG39502.1, AGG39499.1, AGG39496.1, AGG39493.1, AGG39484.1, AGG39490.1, AGG39487.1, AGG39475.1, AGG39472.1, AGG39466.1, AGG39463.1, AGG39454.1, AGG39442.1, AGG39439.1, AGG39436.1, AGG39415.1, AGG39403.1, AGG39397.1, AGG39391.1, AGG39379.1, AHL84194.1, AHA84012.1, AHJ60043.1, BAO49770.1, BAO49766.1, BAO49767.1, AHA84034.1, AHA84023.1, AHA83990.1, AHA83957.1, AHA83924.1, AHA83891.1, AHA83880.1, AHA83782.1, AHA83760.1, AHA83694.1, AGT75357.1, AGN92848.1, AGN28792.1, AGN28781.1, AGN28759.1, AGN28748.1, AGN28693.1, AGN28638.1, AGN28627.1, AGN28539.1, AGN28528.1, AGN28462.1, AGN28440.1, AGL96787.1, AGL96786.1, AGL96784.1, AAS93662.1, AAS93657.1, AAS93656.1, AAS93659.1, AAS93660.1, AAS93663.1, AAS93664.1, AAS93655.1, CUS01869.1, AHG54517.1, ASF87348.1, ASF87341.1, ASF87344.1, ASF87351.1, ASF87338.1, ASF87342.1, ASF87352.1, ASF87337.1, ASF87336.1, AEQ98756.1, AEQ98757.1, AEQ98755.1, AEQ98752.1, AEQ98753.1, AEQ98747.1, ASF87325.1, ASF87326.1, 5W23_A, 5EA3_F, 5UDD_A, 5EA8_F, AHG54458.1, AEN74947.1, AHG54485.1, AHG54477.1, AHG54451.1, AHG54463.1, AHG54445.1, AEO12131.1, AEN74945.1, AEN74944.1, ASF87335.1, AHG54515.1, AHA61605.1, AHV81660.1, AHG54441.1 or AIY60640.1.

[0205] In the context of the present invention, “RSV F protein”, “RSV fusion protein (F)”, “RSV F”, or “F” may be understood in its broadest sense and refers to F0 (F polypeptide precursor), F1, F2 and Pep27 polypeptides, F2-F1 heterodimer, or the mature F protein (comprising three F2-F1 heterodimers), or fragments and variants of any of these. Accordingly, the term “peptide or protein derived from a RSV fusion (F) protein” refers to a peptide, protein, fragment or variant derived from e.g. F0 (F protein polypeptide precursor), F1, F2 and Pep27 polypeptides, F2-F1 heterodimer, or the mature F protein. Additionally, the term “peptide or protein derived from a RSV fusion (F) protein” refers to peptide, protein, fragment or variant derived from “RSV F protein” or “RSV fusion protein (F)” as defined above which may be genetically engineered to e.g. to lack certain protein elements (e.g. the cytoplasmic tail, the furin cleavage site, Pep27) or e.g. comprise additional elements (e.g., linker elements, heterologous signal peptides etc.). For example, the term “peptide or protein derived from a RSV fusion (F) protein” refers to peptide, protein, fragment or variant derived from F0, F-del, F0_DSCav1, F_DSCav1_mut1, F_DSCav1_mut2, F_DSCav1_mut3, F_DSCav1_mut4, F_DSCav1_mut5, F_DSCav1_mut6, F_DSCav1_mut7, F_DSCav1_mut8, F_DSCav1_mut0, F-del_DSCav1, F-del_DSCav1_mut1, F-del_DSCav1_mut2, F-del_DSCav1_mut3, F-del_DSCav1_mut4, F-del_DSCav1_mut5, F-del_DSCav1_mut6, F-del_DSCav1_mut7, F-del_DSCav1_mut8, F-del_DSCav1_mut0 (for explanation of the constructs see Table 1). Particularly suitable F protein variants that may be encoded by the RNA of the first aspect are specified in the following and are provided in Table 1.

[0206] It has to be noted that where reference is made to amino acid (aa) residues and their position in an RSV F protein, any numbering used herein—unless stated otherwise—relates to the position of the respective aa residue in a corresponding F0 precursor protein of HRSV(A2) (SEQ ID NO: 68) or a corresponding F0 precursor protein of HRSV(Memphis-37) (SEQ ID NO: 8937 or 11726) wherein position “1” corresponds to the first aa residue, i.e. the aa residue at the N-terminus of a HRSV(A2) F0 precursor protein or a HRSV(Memphis-37) F0 precursor protein.

[0207] In preferred embodiments, the at least one coding sequence of the RNA of the first aspect encodes at least one antigenic peptide or protein from RSV F protein, wherein RSV F protein is a full-length F protein (F0) or an F protein with deleted C-terminus (F-del), or a fragment or a variant thereof.

[0208] In this context, any RSV F full-length protein (precursor protein, referred to as “F0”) may be used as suitable antigen and may preferably be derived from any NCBI Protein Accession numbers provided in List 2 or may be chosen from any one of SEQ ID NOs: 68, 8279-8967 or 11726. In preferred embodiments of the invention, the full-length F protein (F0) of HRSV(A2) (SEQ ID NO: 68) is suitably used, see overview Table 1. In other preferred embodiments of the invention, the full-length F protein (F0) of HRSV(Memphis-37) (SEQ ID NO: 8937 or 11726) is suitably used, see overview Table 1.

[0209] In this context, any RSV F with deleted C-terminus (F-del) may be used as suitable antigen and may preferably be derived from any NCBI Protein Accession numbers provided in List 2 or may be chosen from any one of SEQ ID NOs: 483, 8968-9683, or 12095. An example of such a deletion mutant is the RSV-Fdel554-574 protein according to (Oomens et al. 2006. J. Virol. 80(21):10465-77) where aa residue 554-574 of the full-length F0 protein are removed. Deletion of the main part of the cytoplasmic tail (aa 554-574) of F0 leads to improved intracellular trafficking/cell surface transport in vitro and increases cell surface expression of RSV F significantly. Increased cell surface presentation results in improved B cell recognition (in line with published data; see WO2015024668). In preferred embodiments of the invention, F protein with deleted C-terminus, herein referred to as “F-del” (SEQ ID NO: 483, 9653 or 12095) is suitably used, see overview Table 1. In the light of high level of structural conservation of the RSV F protein among different RSV strains (see e.g. Hause et al., 2017, PLOS ONE 12(6): e0180623), the deletion of aa 554-574 is applicable to different RSV F protein sequences of different RSV isolates.

[0210] In particularly preferred embodiments, the artificial RNA of the first aspect encodes least one antigenic peptide or protein derived from RSV F protein, wherein said RSV F protein is designed to stabilize the antigen in pre-fusion conformation. A pre-fusion conformation is particularly advantageous in the context of an efficient RSV vaccine, as several potential epitopes for neutralizing antibodies are merely accessible in said protein conformation.

[0211] In several embodiments, the RSV F protein includes one or more amino acid substitutions that stabilize the F protein in the pre-fusion conformation, for example, substitutions that stabilize the membrane distal portion of the F protein (including the N-terminal region of the F1 polypeptide) in the pre-fusion conformation. For example, the amino acid substitution can introduce a non-natural disulfide bond or can be a cavity-filling amino acid substitution.

[0212] Accordingly, in several embodiments, a preferred RSV F protein includes S155C and S290C substitutions that form a non-natural disulfide bond that stabilizes the protein in a pre-fusion conformation; that is, in a conformation that specifically binds to one or more pre-fusion specification antibodies, and/or presents a suitable antigenic site that is present on the pre-fusion conformation but not in the postfusion conformation of RSV F protein. In further embodiments, the recombinant RSV F protein can additionally include F, L, W, Y, H, or M substitution at position 190, position 207, or positions 190 and 207.

[0213] An example of an RSV F protein designed to stabilize the antigen in pre-fusion conformation is RSV F protein comprising a DSCav1 mutation (S155C, S290C, S190F, and V207L), or a fragment or a variant thereof. Such RSV F DSCav1 proteins have been described in the art (W2014160463).

[0214] Accordingly, in particularly preferred embodiments, the artificial RNA of the first aspect encodes least one antigenic peptide or protein derived from RSV F protein, wherein the RSV F protein comprises a DSCav1 mutation (S155C, S290C, S190F, and V207L), or a fragment or a variant thereof.

[0215] It has to be understood in the context of the invention that any RSV F may be mutated at positions S155C, S290C, S190F, and V207L to stabilize the protein in the pre-fusion conformation and may be suitably used in the context of the invention. Accordingly, any NCBI Protein Accession numbers provided above, or any protein selected from SEQ ID NOs: 68, 8279-8967, 483, 8968-9683, 12095, or 11726 or fragments or variants thereof can be chosen by the skilled person to introduce such amino acid changes according to S155C, S290C, S190F, and V207L to generate various RSV F DSCav1 proteins.

[0216] In preferred embodiments, RSV F full-length protein (precursor protein, “F0”) of HRSV(A2) (SEQ ID NO: 68) is used to introduce S155C, S290C, S190F, and V207L amino acid changes, leading to an amino acid sequence according to SEQ ID NO: 898. Such a RSV F protein is herein referred to as “F0_DSCav1” throughout the present invention (see overview Table 1 (preferred RSV F protein antigen designs)).

[0217] In other preferred embodiments, RSV F_del protein (deleted cytoplasmic tail (aa 554-574)) of HRSV(A2) (SEQ ID NO: 483) is used to introduce S155C, S290C, S190F, and V207L amino acid changes, leading to an amino acid sequence according to SEQ ID NO: 1267. Such a RSV F protein is herein referred to as “F-del_DSCav1” throughout the present invention (see overview Table 1 (preferred RSV F protein antigen designs)).

[0218] In preferred embodiments, RSV F full-length protein (precursor protein, “F0”) of HRSV(Memphis-37) (SEQ ID NO: 8937 or 11726) is used to introduce S155C, S290C, S190F, and V207L amino acid changes, leading to an amino acid sequence according to SEQ ID NO: 12464. Such a RSV F protein is herein referred to as “FO_DSCav1” throughout the present invention (see overview Table 1 (preferred RSV F protein antigen designs)).

[0219] In other preferred embodiments, RSV F_del protein (deleted cytoplasmic tail (aa 554-574)) of HRSV(Memphis-37) (SEQ ID NO: 9653 or 12095) is used to introduce S155C, S290C, S190F, and V207L amino acid changes, leading to an amino acid sequence according to SEQ ID NO: 12833. Such a RSV F protein is herein referred to as “F-del_DSCav1” throughout the present invention (see overview Table 1 (preferred RSV F protein antigen designs).

[0220] In preferred embodiments, the at least one antigenic peptide or protein may be an engineered protein comprising the two subunits, F1 and F2 of mature F as a single polypeptide chain, wherein F2 and F1 are preferably connected via a linker (GS). Examples of said engineered F2-linker-F1 fusion proteins (e.g., F(1-103)-GS-F(145-574) or F(1-103)-GS-F(145-553)) have been described in the art (Joyce, M. Gordon, et al. “Iterative structure-based improvement of a fusion-glycoprotein vaccine against RSV.” Nature structural & molecular biology 23.9 (2016): 811; WO2017172890). Said F2-linker-F1 RSV F proteins lack aa104-144 (comprising the furine cleavage site and Pep27) and comprise a linker element between F2 polypeptide and F1 polypeptide (e.g. GSlinker). Said F2-linker-F1 proteins may show superior properties in terms of stability and/or antigenicity.

[0221] Accordingly, in preferred embodiments, the RSV F protein comprises the two subunits F2 and F1 fused into a single polypeptide chain, wherein F2 and F1 are connected via a linker element, preferably a GS linker as specified herein, preferably generating a stable F2-linker-F1 proteins.

[0222] Preferably, said F2-linker-F1 fusion proteins, e.g. F(1-103)-GS-F(145-574) or F(1-103)-GS-F(145-553) additionally comprise a DScav1 mutation as outlined above (herein referred to as “mut0”; e.g., SEQ ID NOs: 3850, 4219 or 13940, 14309).

[0223] In particularly preferred embodiments, the RSV F protein may additionally comprise at least one further mutation selected from (S46G, A149C, S215P, Y458C, K465Q), (S46G, E92D, A149C, S215P, Y458C, K465Q), (S46G, N671, E92D, A149C, S215P, Y458C, K465Q), (A149C, Y458C), (N183GC, N428C), (Q98C, Q361C, S46G, E92D, L95M, S215P, I217P, I221M, R429K, K465Q), (Q98C, Q361C, L95M, I221M, R429K), or (N183GC, N428C, S46G, N671, E92D, S215P, K465Q) or a fragment or a variant thereof.

[0224] In particularly preferred embodiments, said F2-linker-F1 proteins (F(1-103)-GS-F(145-574) or F(1-103)-GS-F(145-553)) may additionally comprise, preferably in addition to the DSCav1 mutation, at least one mutation selected from S46G, A149C, S215P, Y458C, K465Q, herein referred to as “mut1”, e.g., SEQ ID NOs: 1636, 2005, or 14678, 15047; or S46G, E92D, A149C, S215P, Y458C, K465Q, herein referred to as “mut2”, e.g., SEQ ID NOs: 2374, 2743 or 15416, 15785; or S46G, N671, E92D, A149C, S215P, Y458C, K465Q, herein referred to as “mut3”, e.g., SEQ ID NOs: 3112, 3481 or 13202, 13571, or a fragment or a variant of any of these (see overview Table 1 (preferred RSV F protein antigen designs)).

[0225] In other embodiments, said F2-linker-F1 proteins (F(1-103)-GS-F(145-574) or F(1-103)-GS-F(145-553)) may additionally comprise, preferably in addition to the DSCav1 mutation, at least one mutation selected from A149C, Y458C, herein referred to as “mut4”, e.g., SEQ ID NOs: 4588, 4957 or 16154, 16523; or N183GC, N428C, herein referred to as “mut5”, e.g., SEQ ID NOs: 5326, 5695 or 16892, 17261; or Q98C, Q361C, S46G, E92D, L95M, S215P, I217P, I221M, R429K, K465Q, herein referred to as “mut6”, e.g., SEQ ID NOs: 6064, 6433 or 17630, 17999; or Q98C, Q361C, L95M, I221M, R429K, herein referred to as “mut7”, e.g., SEQ ID NOs: 6802, 7171 or 18368, 18737; or N183GC, N428C, S46G, N671, E92D, S215P, K465Q, herein referred to as “mut8”, e.g., SEQ ID NOs: 7540, 7909 or 19106, 19475, or a fragment or a variant thereof.

[0226] It has to be understood in the context of the invention that any RSV F may be adapted in a way that the two subunits, F1 and F2 are comprised in a single polypeptide chain, wherein F2 and F1 may be connected via a linker, e.g. a (GS) linker to enhance stability of the protein as explained for mutations “mut1”, “mut2” and “mut3”, e.g. by deleting aa104-144 of the F0 polypeptide chain (as explained above), by introducing a linker element between F2 and F1 as explained above, and by introducing suitable amino acid substitutions as explained above. Accordingly, any NCBI Protein Accession numbers provided above (see List 2), or any protein selected from SEQ ID NOs: 68, 8279-8967, 483, 8968-9683, 11726, 12095 or fragments or variants thereof can be adapted by the skilled person to generate F2-linker-F1 fusion proteins as outlined herein, and may additionally be adapted by introducing (S46G, A149C, S215P, Y458C, K465Q), (S46G, E92D, A149C, S215P, Y458C, K465Q), (S46G, N671, E92D, A149C, S215P, Y458C, K465Q), (A149C, Y458C), (N183GC, N428C), (Q98C, Q361C, S46G, E92D, L95M, S215P, I217P, I221M, R429K, K465Q), (Q98C, Q361C, L95M, I221M, R429K), or (N183GC, N428C, S46G, N671, E92D, S215P, K465Q) aa substitutions and/or a DSCav1 mutation. Moreover, apart from using a GS linker as outlined above, the skilled person may of course choose between various known linker elements to arrive at similar likewise suitable RSV F protein variants (e.g. selected from SEQ ID NOs: 117-162 of the patent application WO2017/172890 or fragments or variants of these sequences, or selected from SEQ ID NOs: 1509-1565 of the patent application WO2017/081082, or fragments or variants of these sequences).

[0227] In preferred embodiments, F2-linker-F1 proteins (F(1-103)-GS-F(145-574) or F(1-103)-GS-F(145-553) comprise a DSCav-1 mutation as outlined above, herein referred to as F_DSCav1_mut0 or F-del_DSCav1_mut0. In preferred embodiments, F2-linker-F1 proteins (F(1-103)-GS-F(145-574) or F(1-103)-GS-F(145-553) comprise a DSCav-1 mutation as outlined above, and additionally an amino acid substitution mut1 as defined above, herein referred to as F_DSCav1_mut1 or F-del_DSCav1_mut1. In preferred embodiments, F2-linker-F1 proteins (F(1-103)-GS-F(145-574) or F(1-103)-GS-F(145-553) comprise a DSCav-1 mutation as outlined above, and additionally an amino acid substitution mut2 as defined above, herein referred to as F_DSCav1_mut2 or F-del_DSCav1_mut2. In preferred embodiments, F2-linker-F1 proteins (F(1-103)-GS-F(145-574) or F(1-103)-GS-F(145-553) comprise a DSCav-1 mutation as outlined above, and additionally an amino acid substitution mut3 as defined above, herein referred to as F_DSCav1_mut3 or F-del_DSCav1_mut3. In preferred embodiments, F2-linker-F1 proteins (F(1-103)-GS-F(145-574) or F(1-103)-GS-F(145-553) comprise a DSCav-1 mutation as outlined above, and additionally an amino acid substitution mut4 as defined above, herein referred to as F_DSCav1_mut4 or F-del_DSCav1_mut4. In preferred embodiments, F2-linker-F1 proteins (F(1-103)-GS-F(145-574) or F(1-103)-GS-F(145-553) comprise a DSCav-1 mutation as outlined above, and additionally an amino acid substitution mut5 as defined above, herein referred to as F_DSCav1_mut5 or F-del_DSCav1_mut5. In preferred embodiments, F2-linker-F1 proteins (F(1-103)-GS-F(145-574) or F(1-103)-GS-F(145-553) comprise a DSCav-1 mutation as outlined above, and additionally an amino acid substitution mut6 as defined above, herein referred to as F_DSCav1_mut6 or F-del_DSCav1_mut6 . In preferred embodiments, F2-linker-F1 proteins (F(1-103)-GS-F(145-574) or F(1-103)-GS-F(145-553) comprise a DSCav-1 mutation as outlined above, and additionally an amino acid substitution mut7 as defined above, herein referred to as F_DSCav1_mut7 or F-del_DSCav1_mut7. In preferred embodiments, F2-linker-F1 proteins (F(1-103)-GS-F(145-574) or F(1-103)-GS-F(145-553) comprise a DSCav-1 mutation as outlined above, and additionally an amino acid substitution mut8 as defined above, herein referred to as F_DSCav1 mut8 or F-del_DSCav1 mut8.

[0228] A detailed description of particularly preferred RSV F proteins is provided in Table 1.

[0229] In Table 1 all references made to amino acid (aa) residues and their position in an RSV F protein relates to the position of the respective aa residue in a corresponding F0 precursor protein of HRSV(A2) (SEQ ID NO: 68) or HRSV(Memphis-37) (SEQ ID NO: 8937 or 11726). Moreover, the abbreviations for suitable RSV F protein antigen designs in Table 1 are used throughout the description of the invention (e.g., “F0”, “F-del”, “F0_DSCav1”, “F-del_DSCav1”, “F_DSCav1_mut1”, “F-del_DSCav1_mut1”, “F_DSCav1_mut2”, “F-del_DSCav1_mut2”, “F_DSCav1_mut3”, “F-del_DSCav1_mut3”, “F_DSCav1_mut4”, “F-del_DSCav1_mut4”, “F_DSCav1_mut5”, “F-del_DSCav1_mut5”, “F_DSCav1_mut6”, “F-del_DSCav1_mut6”, “F_DSCav1_mut7”, “F-del_DSCav1_mut7 ”, “F_DSCav1_mut8”, “F-del_DSCav1_mut8”, “F_DSCav1_mut0”, “F-del_DSCav1_mut0”). Column A of Table 1 provides protein SEQ ID NOs of respective RSV F protein antigen designs derived from HRSV(A2); Column B of Table 1 provides protein SEQ ID NOs of respective RSV F protein antigen designs derived from HRSV(Memphis-37). Notably, the description of the invention explicitly includes the information provided under <223> identifier of the ST25 sequence listing of the present application.

TABLE 1
Preferred RSV F protein antigen designs

| Antigen Name | Protein design description | A | B |
|---|---|---|---|
| F0 | aa1-574, | 68 | 8937, |
| | full-length RSV F0 precursor | | 11726 |
| F-del | aa1-553, | 483 | 9653, |
| | deletion of aa 554-574 of the C-terminus | | 12095 |
| F0_DSCav1 | aa1-574, | 898 | 12464 |
| | aa substitutions: S155C, S290C, S190F, and V207L | | |
| F-del_DSCav1 | aa1-553, | 1267 | 12833 |
| | deletion of aa 554-574 of the C-terminus, | | |
| | aa substitutions: S155C, S290C, S190F, and V207L | | |
| F_DSCav1_mut0 | aa1-103 - GS(linker) - aa145-574 | 3850 | 13940 |
| | F2-linker-F1 construct | | |
| | aa substitutions: S155C, S290C, S190F, and V207L | | |
| F-del_DSCav1_mut0 | aa1-103 - GS(linker) - aa145-553 | 4219 | 14309 |
| | deletion of aa 554-574 of the C-terminus, | | |
| | F2-linker-F1 construct | | |
| | aa substitutions: S155C, S290C, S190F, and V207L | | |
| F_DSCav1_mut1 | aa1-103 - GS(linker) - aa145-574, | 1636 | 14678 |
| | F2-linker-F1 construct, | | |
| | aa substitutions: S155C, S290C, S190F, and V207L; | | |
| | S46G, A149C, S215P, Y458C, K465Q | | |
| F-del_DSCav1_mut1 | aa1-103 - GS(linker) - aa145-553 | 2005 | 15047 |
| | deletion of aa 554-574 of the C-terminus, | | |
| | F2-linker-F1 construct, | | |
| | aa substitutions: S155C, S290C, S190F, and V207L; | | |
| | S46G, A149C, S215P, Y458C, K465Q | | |
| F_DSCav1_mut2 | aa1-103 - GS(linker) - aa145-574 | 2374 | 15416 |
| | F2-linker-F1 construct, | | |
| | aa substitutions: S155C, S290C, S190F, and V207L; | | |
| | S46G, E92D, A149C, S215P, Y458C, K465Q | | |
| F-del_DSCav1_mut2 | aa1-103 - GS(linker) - aa145-553 | 2743 | 15785 |
| | deletion of aa 554-574 of the C-terminus, | | |
| | F2-linker-F1 construct, | | |
| | aa substitutions: S155C, S290C, S190F, and V207L; | | |
| | S46G, E92D, A149C, S215P, Y458C, K465Q | | |
| F_DSCav1_mut3 | aa1-103 - GS(linker) - aa145-574 | 3112 | 13202 |
| | F2-linker-F1 construct, | | |
| | aa substitutions: S155C, S290C, S190F, and V207L; | | |
| | S46G, N67I, E92D, A149C, S215P, Y458C, K465Q | | |
| F-del_DSCav1_mut3 | aa1-103 - GS(linker) - aa145-553 | 3481 | 13571 |
| | deletion of aa 554-574 of the C-terminus, | | |
| | F2-linker-F1 construct, | | |
| | aa substitutions: S155C, S290C, S190F, and V207L; | | |
| | S46G, N67I, E92D, A149C, S215P, Y458C, K465Q | | |
| F_DSCav1_mut4 | aa1-103 - GS(linker) - aa145-574 | 4588 | 16154 |
| | F2-linker-F1 construct, | | |
| | aa substitutions: S155C, S290C, S190F, and V207L; | | |
| | A149C, Y458C | | |
| F-del_DSCav1_mut4 | aa1-103 - GS(linker) - aa145-553 | 4957 | 16523 |
| | deletion of aa 554-574 of the C-terminus, | | |
| | F2-linker-F1 construct, | | |
| | aa substitutions: S155C, S290C, S190F, and V207L; | | |
| | A149C, Y458C | | |
| F_DSCav1_mut5 | aa1-103 - GS(linker) - aa145-574 | 5326 | 16892 |
| | F2-linker-F1 construct, | | |
| | aa substitutions: S155C, S290C, S190F, and V207L; | | |
| | N183GC, N428C | | |
| F-del_DSCav1_mut5 | aa1-103 - GS(linker) - aa145-553 | 5695 | 17261 |
| | deletion of aa 554-574 of the C-terminus, | | |
| | F2-linker-F1 construct, | | |
| | aa substitutions: S155C, S290C, S190F, and V207L; | | |
| | N183GC, N428C | | |
| F_DSCav1_mut6 | aa1-103 - GS(linker) - aa145-574 | 6064 | 17630 |
| | F2-linker-F1 construct, | | |
| | aa substitutions: S155C, S290C, S190F, and V207L; | | |
| | Q98C, Q361C, S46G, E92D, L95M, S215P, I217P, I221M, | | |
| | R429K, K465Q | | |
| F-del_DSCav1_mut6 | aa1-103 - GS(linker) - aa145-553 | 6433 | 17999 |
| | deletion of aa 554-574 of the C-terminus, | | |
| | F2-linker-F1 construct, | | |
| | aa substitutions: S155C, S290C, S190F, and V207L; | | |
| | Q98C, Q361C, S46G, E92D, L95M, S215P, I217P, I221M, | | |
| | R429K, K465Q | | |
| F_DSCav1_mut7 | aa1-103 - GS(linker) - aa145-574 | 6802 | 18368 |
| | F2-linker-F1 construct, | | |
| | aa substitutions: S155C, S290C, S190F, and V207L; | | |
| | Q98C, Q361C, L95M, I221M, R429K | | |
| F-del_DSCav1_mut7 | aa1-103 - GS(linker) - aa145-553 | 7171 | 18737 |
| | deletion of aa 554-574 of the C-terminus, | | |
| | F2-linker-F1 construct, | | |
| | aa substitutions: S155C, S290C, S190F, and V207L; | | |
| | Q98C, Q361C, L95M, I221M, R429K | | |
| F_DSCav1_mut8 | aa1-103 - GS(linker) - aa145-574 | 7540 | 19106 |
| | F2-linker-F1 construct, | | |
| | aa substitutions: S155C, S290C, S190F, and V207L; | | |
| | N183GC, N428C, S46G, N67I, E92D, S215P, K465Q | | |
| F-del_DSCav1_mut8 | aa1-103 - GS(linker) - aa145-553 | 7909 | 19475 |
| | deletion of aa 554-574 of the C-terminus, | | |
| | F2-linker-F1 construct, | | |
| | aa substitutions: S155C, S290C, S190F, and V207L; | | |
| | N183GC, N428C, S46G, N67I, E92D, S215P, K465Q | | |

[0230] In particularly preferred embodiments, the artificial RNA according to the first aspect encodes at least one antigenic peptide or protein derived from a RSV fusion (F) protein, wherein the RSV F protein is selected from F0, F-del, F0_DSCav1, F_DSCav1_mut0, F_DSCav1_mut1, F_DSCav1_mut2, F_DSCav1_mut3, F_DSCav1_mut4, F_DSCav1_mut5, F_DSCav1_mut6, F_DSCav1_mut7, F_DSCav1_mut8, F-del_DSCav1, F-del_DSCav1_mut0, F-del_DSCav1_mut1, F-del_DSCav1_mut2, F-del_DSCav1_mut3, F-del_DSCav1_mut4, F-del_DSCav1_mut5, F-del_DSCav1_mut6, F-del_DSCav1_mut7, F-del_DSCav1_mut8, or a fragment or a variant thereof (see e.g. Table 1).

[0231] Particularly preferred and advantageous in the context of the invention are RSV F proteins selected from F-del_DSCav1, F-del_DSCav1_mut0, F-del_DSCav1_mut1, F-del_DSCav1_mut2, F-del_DSCav1_mut3, F-del_DSCav1_mut4, F-del_DSCav1_mut5, F-del_DSCav1_mut6, F-del_DSCav1_mut7, F-del_DSCav1_mut8 or a fragment or a variant thereof (see e.g. Table 1).

[0232] In preferred embodiments, the artificial RNA of the first aspect comprises at least one coding sequence encoding at least one antigenic peptide or protein comprising or consisting of at least one amino acid sequences being identical or at least 70%, 80%, 85%, 86%, 87%, 88%, 89%, 90%, 91%, 92%, 93%, 94%, 95%, 96%, 97%, 98%, 19475 (see e.g. Table 1), or 8279-9683 or a fragment or variant of any of these sequences. Additional information regarding each of these suitable amino acid sequences encoding RSV proteins may also be derived from the or 99% identical to any one of SEQ ID NO: 68, 483, 898, 1267, 1636, 2005, 2374, 2743, 3112, 3481, 3850, 4219, 4588, 4957, 5326, 5695, 6064, 6433, 6802, 7171, 7540, 7909, 11726, 12095, 12464, 12833, 13940, 14309, 14678, 15047, 15416, 15785, 13202, 13571, 16154, 16523, 16892, 17261, 17630, 17999, 18368, 18737, 19106, sequence listing, in particular from the details provided therein under identifier <223> as explained in the following.

[0233] In preferred embodiments, the artificial RNA of the first aspect comprises at least one coding sequence encoding at least one antigenic peptide or protein comprising or consisting of at least one amino acid sequences being identical or at least 70%, 80%, 85%, 86%, 87%, 88%, 89%, 90%, 91%, 92%, 93%, 94%, 95%, 96%, 97%, 98%, or 99% identical to any one of SEQ ID NO: 68, 483, 898, 1267, 1636, 2005, 2374, 2743, 3112, 3481, 3850, 4219, 4588, 4957, 5326, 5695, 6064, 6433, 6802, 7171, 7540, 7909, 11726, 12095, 12464, 12833, 13940, 14309, 14678, 15047, 15416, 15785, 13202, 13571, 16154, 16523, 16892, 17261, 17630, 17999, 18368, 18737, 19106, 19475 (see e.g. Table 1) or a fragment or variant of any of these sequences. Additional information regarding each of these suitable amino acid sequences encoding RSV proteins may also be derived from the sequence listing, in particular from the details provided therein under identifier <223> as explained in the following.

[0234] In particularly preferred embodiments, the artificial RNA of the first aspect comprises at least one coding sequence encoding at least one antigenic peptide or protein comprising or consisting of at least one amino acid sequences being identical or at least 70%, 80%, 85%, 86%, 87%, 88%, 89%, 90%, 91%, 92%, 93%, 94%, 95%, 96%, 97%, 98%, or 99% identical to any one of SEQ ID NO: 1267, 2005, 2743, 3481, 4219, 4957, 5695, 6433, 7171, 7909, 12833, 14309, 15047, 15785, 13571, 16523, 17261, 17999, 18737, 19475 (see e.g. Table 1) or a fragment or variant of any of these sequences. Additional information regarding each of these suitable amino acid sequences encoding RSV proteins may also be derived from the sequence listing, in particular from the details provided therein under identifier <223> as explained in the following.

[0235] In other embodiments, the artificial RNA according to the first aspect comprises at least one coding sequence encoding at least one of the amino acid sequences being identical or at least 70%, 80%, 85%, 86%, 87%, 88%, 89%, 90%, 91%, 92%, 93%, 94%, 95%, 96%, 97%, 98%, or 99% identical to any one of SEQ ID NO: 8279-9683 a fragment or variant of any of these sequences. Additional information regarding each of these suitable amino acid sequences encoding RSV proteins may also be derived from the sequence listing, in particular from the details provided therein under identifier <223> as explained in the following.

[0236] In other embodiments, the artificial RNA as defined herein comprises at least one coding sequence encoding at least one antigenic peptide or protein derived from RSV comprising or consisting of at least one amino acid sequences being identical or at least 70%, 80%, 85%, 86%, 87%, 88%, 89%, 90%, 91%, 92%, 93%, 94%, 95%, 96%, 97%, 98%, or 99% identical to any one of SEQ ID NOs: 1-1428 of patent application WO2014/160463 or a fragment or variant of any of these sequences. In this context, SEQ ID NOs: 1-1428 of patent application WO2014/160463 and the disclosure related thereto are herewith incorporated by reference.

[0237] In other embodiments, the artificial RNA as defined herein comprises at least one coding sequence encoding at least one antigenic peptide or protein derived from RSV comprising or consisting of at least one amino acid sequences being identical or at least 70%, 80%, 85%, 86%, 87%, 88%, 89%, 90%, 91%, 92%, 93%, 94%, 95%, 96%, 97%, 98%, or 99% identical to any one of SEQ ID NOs: 1-11 of patent application WO2015/024668 or a fragment or variant of any of these sequences. In this context, SEQ ID NOs: 1-11 of patent application WO2015/024668 and the disclosure related thereto are herewith incorporated by reference.

[0238] In other embodiments, the artificial RNA as defined herein comprises at least one coding sequence encoding at least one antigenic peptide or protein derived from RSV comprising or consisting of at least one amino acid sequences being identical or at least 70%, 80%, 85%, 86%, 87%, 88%, 89%, 90%, 91%, 92%, 93%, 94%, 95%, 96%, 97%, 98%, or 99% identical to any one of SEQ ID NO: 3, 4, 6, 8, 10, 12, 14, 16, 18, 20, 22, 24, 26, 28, 243, or 245 of patent application WO2017/070622 or a fragment or variant of any of these sequences. In this context SEQ ID NO: 3, 4, 6, 8, 10, 12, 14, 16, 18, 20, 22, 24, 26, 28, 243, or 245, of patent application WO2017/070622 and the disclosure related thereto are herewith incorporated by reference.

[0239] In other embodiments, the artificial RNA as defined herein comprises at least one coding sequence encoding at least one antigenic peptide or protein derived from RSV comprising or consisting of at least one amino acid sequences being identical or at least 70%, 80%, 85%, 86%, 87%, 88%, 89%, 90%, 91%, 92%, 93%, 94%, 95%, 96%, 97%, 98%, or 99% identical to any one of SEQ ID NOs: 1-65, 81-95, 110-116 of patent application WO2017/172890 or a fragment or variant of any of these sequences. In this context SEQ ID NOs: 1-65, 81-95, 110-116, of patent application WO2017/172890 and the disclosure related thereto are herewith incorporated by reference.

[0240] According to another preferred embodiment, the artificial RNA of the invention encodes at least one antigenic peptide or protein as defined above and may additionally encode at least one further heterologous peptide or protein element.

[0241] Suitably, the at least one further peptide or protein element may promote secretion of the encoded antigenic peptide or protein of the invention (e.g. via secretory signal sequences), promote anchoring of the encoded antigenic peptide or protein of the invention in the plasma membrane (e.g. via transmembrane elements), promote formation of antigen complexes (e.g. via multimerization domains), promote virus-like particle formation (VLP forming sequence). In addition, the artificial nucleic acid sequence according to the present invention may additionally encode peptide linker elements, self-cleaving peptides, immunologic adjuvant sequences or dendritic cell targeting sequences. Suitable multimerization domains may be selected from the list of amino acid sequences according to SEQ ID NOs: 1116-1167 of the patent application WO2017/081082, or fragments or variants of these sequences. Trimerization and tetramerization elements may be selected from e.g. engineered leucine zippers (engineered α-helical coiled coil peptide that adopt a parallel trimeric state), fibritin foldon domain from enterobacteria phage T4, GCN4pII, GCN4-pLI, and p53. In that context, fibritin foldon domain from enterobacteria phage T4, GCN4pII, GCN4-pLI, and p53 are preferred. Suitable transmembrane elements may be selected from the list of amino acid sequences according to SEQ ID NOs: 1228-1343 of the patent application WO2017/081082, or fragments or variants of these sequences. Suitable VLP forming sequences may be selected from the list of amino acid sequences according to SEQ ID NOs: 1168-1227 of the patent application WO2017/081082, or fragments or variants of these sequences. Suitable peptide linkers may be selected from the list of amino acid sequences according to SEQ ID NOs: 1509-1565 of the patent application WO2017/081082, or fragments or variants of these sequences. Suitable self-cleaving peptides may be selected from the list of amino acid sequences according to SEQ ID NOs: 1434-1508 of the patent application WO2017/081082, or fragments or variants of these sequences. Suitable immunologic adjuvant sequences may be selected from the list of amino acid sequences according to SEQ ID NOs: 1360-1421 of the patent application WO2017/081082, or fragments or variants of these sequences. Suitable dendritic cell (DCs) targeting sequences may be selected from the list of amino acid sequences according to SEQ ID NOs: 1344-1359 of the patent application WO2017/081082, or fragments or variants of these sequences. Suitable secretory signal peptides may be selected from the list of amino acid sequences according to SEQ ID NOs: 1-1115 and SEQ ID NO: 1728 of the patent application WO2017/081082, or fragments or variants of these sequences. On nucleic acid level, any nucleic acid sequence (e.g. RNA sequence) may be selected which encodes such amino acid sequences. In this context, the disclosure of WO2017/081082 is herewith incorporated by reference. The heterologous secretory signal sequence may increase the secretion of the encoded antigenic peptide or protein.

[0242] According to embodiments, the secretory signal sequence comprises an amino acid sequence being identical or at least 70%, 80%, 85%, 86%, 87%, 88%, 89%, 90%, 91%, 92%, 93%, 94%, 95%, 96%, 97%, 98%, or 99% identical to any one of SEQ ID NOs: 21329-21362 or a fragment or variant of any of these sequences. Additional information regarding each of these suitable amino acid sequences encoding secretory signal sequences may also be derived from the sequence listing, in particular from the details provided therein under identifier <223>.

[0243] According to preferred embodiments, the artificial nucleic acid, particularly the artificial RNA comprises at least one coding sequence encoding at least one antigenic peptide or protein derived from RSV as defined herein, preferably derived from RSV F protein, or fragments and variants thereof. In that context, any coding sequence encoding at least one antigenic peptide or protein derived from RSV, preferably derived from RSV F protein, or fragments and variants thereof may be understood as suitable coding sequence and may therefore be comprised in the artificial RNA of the first aspect.

[0244] In preferred embodiments, the artificial RNA of the first aspect may comprise or consist of at least one coding sequence encoding at least one antigenic peptide or protein derived from RSV F protein as defined herein, preferably encoding any one of SEQ ID NO: 68, 483, 898, 1267, 1636, 2005, 2374, 2743, 3112, 3481, 3850, 4219, 4588, 4957, 5326, 5695, 6064, 6433, 6802, 7171, 7540, 7909, 11726, 12095, 12464, 12833, 13940, 14309, 14678, 15047, 15416, 15785, 13202, 13571, 16154, 16523, 16892, 17261, 17630, 17999, 18368, 18737, 19106, 19475 or fragments of variants thereof. It has to be understood that, on nucleic acid level, any nucleic acid sequence, in particular, any RNA sequence which encodes an amino acid sequences being identical to SEQ ID NO: 68, 483, 898, 1267, 1636, 2005, 2374, 2743, 3112, 3481, 3850, 4219, 4588, 4957, 5326, 5695, 6064, 6433, 6802, 7171, 7540, 7909, 11726, 12095, 12464, 12833, 13940, 14309, 14678, 15047, 15416, 15785, 13202, 13571, 16154, 16523, 16892, 17261, 17630, 17999, 18368, 18737, 19106, 19475 or fragments or variants thereof, or any nucleic acid sequence (e.g. DNA sequence, RNA sequence) which encodes amino acid sequences being at least 70%, 80%, 85%, 86%, 87%, 88%, 89%, 90%, 91%, 92%, 93%, 94%, 95%, 96%, 97%, 98%, or 99% identical to any one of SEQ ID NO: 68, 483, 898, 1267, 1636, 2005, 2374, 2743, 3112, 3481, 3850, 4219, 4588, 4957, 5326, 5695, 6064, 6433, 6802, 7171, 7540, 7909, 11726, 12095, 12464, 12833, 13940, 14309, 14678, 15047, 15416, 15785, 13202, 13571, 16154, 16523, 16892, 17261, 17630, 17999, 18368, 18737, 19106, 19475 or fragments or variants thereof, may be selected and may accordingly be understood as suitable coding sequence and may therefore be comprised in the artificial RNA of the first aspect of the invention.

[0245] In other embodiments, the artificial RNA of the first aspect may comprise or consist of at least one coding sequence encoding any one of SEQ ID NOs: 8279-9683 or fragments of variants thereof. It has to be understood that, on nucleic acid level, any nucleic acid sequence, in particular, any RNA sequence which encodes an amino acid sequences being identical to SEQ ID NOs: 8279-9683 or fragments or variants thereof, or any nucleic acid sequence (e.g. DNA sequence, RNA sequence) which encodes amino acid sequences being at least 70%, 80%, 85%, 86%, 87%, 88%, 89%, 90%, 91%, 92%, 93%, 94%, 95%, 96%, 97%, 98%, or 99% identical to any one of SEQ ID NOs: 8279-9683 or fragments or variants thereof, may be selected and may accordingly be understood as suitable coding sequence and may therefore be comprised in the artificial RNA of the first aspect of the invention.

[0246] In other embodiments, the artificial RNA of the first aspect may comprise or consist of at least one coding sequence encoding any one of SEQ ID NOs: 1-1428 of patent application WO2014/160463 or fragments of variants thereof. It has to be understood that, on nucleic acid level, any nucleic acid sequence, in particular, any RNA sequence which encodes an amino acid sequences being identical to SEQ ID NOs: 1-1428 of patent application WO2014/160463 or fragments or variants thereof, or any nucleic acid sequence (e.g. DNA sequence, RNA sequence) which encodes amino acid sequences being at least 70%, 80%, 85%, 86%, 87%, 88%, 89%, 90%, 91%, 92%, 93%, 94%, 95%, 96%, 97%, 98%, or 99% identical to any one of SEQ ID NOs: 1-1428 of patent application WO2014/160463 or fragments or variants thereof, may be selected and may accordingly be understood as suitable coding sequence and may therefore be comprised in the artificial RNA of the first aspect of the invention.

[0247] In other embodiments, the artificial RNA of the first aspect may comprise or consist of at least one coding sequence encoding any one of SEQ ID NOs: 1-11 of patent application WO2015/024668 or fragments of variants thereof. It has to be understood that, on nucleic acid level, any nucleic acid sequence, in particular, any RNA sequence which encodes an amino acid sequences being identical to SEQ ID NOs: 1-11 of patent application WO2015/024668 or fragments or variants thereof, or any nucleic acid sequence (e.g. DNA sequence, RNA sequence) which encodes amino acid sequences being at least 70%, 80%, 85%, 86%, 87%, 88%, 89%, 90%, 91%, 92%, 93%, 94%, 95%, 96%, 97%, 98%, or 99% identical to any one of SEQ ID NOs: 1-11 of patent application WO2015/024668 or fragments or variants thereof, may be selected and may accordingly be understood as suitable coding sequence and may therefore be comprised in the artificial RNA of the first aspect of the invention.

[0248] In other embodiments, the artificial RNA of the first aspect may comprise or consist of at least one coding sequence encoding any one of SEQ ID NO: 3, 4, 6, 8, 10, 12, 14, 16, 18, 20, 22, 24, 26, 28, 243, or 245 of patent application WO2017/070622 or fragments of variants thereof. It has to be understood that, on nucleic acid level, any nucleic acid sequence, in particular, any RNA sequence which encodes an amino acid sequences being identical to SEQ ID NO: 3, 4, 6, 8, 10, 12, 14, 16, 18, 20, 22, 24, 26, 28, 243, or 245 of patent application WO2017/070622 or fragments or variants thereof, or any nucleic acid sequence (e.g. DNA sequence, RNA sequence) which encodes amino acid sequences being at least 70%, 80%, 85%, 86%, 87%, 88%, 89%, 90%, 91%, 92%, 93%, 94%, 95%, 96%, 97%, 98%, or 99% identical to any one of SEQ ID NO: 3, 4, 6, 8, 10, 12, 14, 16, 18, 20, 22, 24, 26, 28, 243, or 245 of patent application WO2017/070622 or fragments or variants thereof, may be selected and may accordingly be understood as suitable coding sequence and may therefore be comprised in the artificial RNA of the first aspect of the invention.

[0249] In other embodiments, the artificial RNA of the first aspect may comprise or consist of at least one coding sequence encoding any one of SEQ ID NOs: 1-65, 81-95, 110-116 of patent application WO2017/172890 or fragments of variants thereof. It has to be understood that, on nucleic acid level, any nucleic acid sequence, in particular, any RNA sequence which encodes an amino acid sequences being identical to SEQ ID NOs: 1-65, 81-95, 110-116 of patent application WO2017/172890 or fragments or variants thereof, or any nucleic acid sequence (e.g. DNA sequence, RNA sequence) which encodes amino acid sequences being at least 70%, 80%, 85%, 86%, 87%, 88%, 89%, 90%, 91%, 92%, 93%, 94%, 95%, 96%, 97%, 98%, or 99% identical to any one of SEQ ID NOs: 1-65, 81-95, 110-116 of patent application WO2017/172890 or fragments or variants thereof, may be selected and may accordingly be understood as suitable coding sequence and may therefore be comprised in the artificial RNA of the first aspect of the invention.

[0250] Suitably, in particularly preferred embodiments, the artificial RNA of the first aspect comprises a coding sequence located between said 5′-UTR and said 3′-UTR, preferably downstream of said 5′-UTR and upstream of said 3′-UTR.

[0251] In preferred embodiments, the artificial RNA of the first aspect comprises a coding sequence that comprises at least one of the nucleic acid sequences being identical or at least 70%, 80%, 85%, 86%, 87%, 88%, 89%, 90%, 91%, 92%, 93%, 94%, 95%, 96%, 97%, 98%, or 99% identical to SEQ ID NOs: 69-482, 484-897, 899-1266, 1268-1635, 1637-2004, 2006-2373, 2375-2742, 2744-3111, 3113-3480, 3482-3849, 3851-4218, 4220-4587, 4589-4956, 4958-5325, 5327-5694, 5696-6063, 6065-6432, 6434-6801, 6803-7170, 7172-7539, 7541-7908, 7910-8277, 8278, 11727-12094, 12096-12463, 12465-12832, 12834-13201, 13941-14308, 14310-14677, 14679-15046, 15048-15415, 15417-15784, 15786-16153, 13203-13570, 13572-13939, 16155-16522, 16524-16891, 16893-17260, 17262-17629, 17631-17998, 18000-17998, 18369-18736, 18738-19105, 19107-19474, 19476-19843, 21363-21706 or a fragment or a fragment or variant of any of these sequences (see also Table 3-6). Additional information regarding each of these suitable nucleic acid sequences encoding may also be derived from the sequence listing, in particular from the details provided therein under identifier <223>.

[0252] In particularly preferred embodiments, the artificial RNA of the first aspect comprises a coding sequence that comprises at least one of the nucleic acid sequences being identical or at least 70%, 80%, 85%, 86%, 87%, 88%, 89%, 90%, 91%, 92%, 93%, 94%, 95%, 96%, 97%, 98%, or 99% identical to SEQ ID NOs: 69-77, 484-492, 899-906, 1268-1275, 1637-1644, 2006-2013, 2375-2382, 2744-2751, 3113-3120, 3482-3489, 3851-3858, 4220-4227, 4589-4596, 4958-4965, 5327-5334, 5696-5703, 6065-6072, 6434-6441, 6803-6810, 7172-7179, 7541-7548, 7910-7917, 21363-21384, 11727-11734, 12096-12103, 12465-12472, 12834-12841, 13941-13948, 14310-14317, 14679-14686, 15048-15055, 15417-15424, 15786-15793, 13203-13210, 13572-13579, 16155-16162, 16524-16531, 16893-16900, 17262-17269, 17631-17638, 18000-18007, 18369-18376, 18738-18745, 19107-19114, 19476-19483, 21389-21410 or a fragment or a fragment or variant of any of these sequences (see also Table 3 and 4). Additional information regarding each of these suitable nucleic acid sequences encoding may also be derived from the sequence listing, in particular from the details provided therein under identifier <223>.

[0253] In other embodiments, the artificial RNA of the first aspect comprises a coding sequence that comprises at least one of the nucleic acid sequences being identical or at least 70%, 80%, 85%, 86%, 87%, 88%, 89%, 90%, 91%, 92%, 93%, 94%, 95%, 96%, 97%, 98%, or 99% identical to SEQ ID NOs: 383-388 of patent application WO2014/160463 or a fragment or a fragment or variant of any of these sequences.

[0254] In other embodiments, the artificial RNA of the first aspect comprises a coding sequence that comprises at least one of the nucleic acid sequences being identical or at least 70%, 80%, 85%, 86%, 87%, 88%, 89%, 90%, 91%, 92%, 93%, 94%, 95%, 96%, 97%, 98%, or 99% identical to SEQ ID NOs: 12-22 of patent application WO2015/024668 or a fragment or a fragment or variant of any of these sequences.

[0255] In other embodiments, the artificial RNA of the first aspect comprises a coding sequence that comprises at least one of the nucleic acid sequences being identical or at least 70%, 80%, 85%, 86%, 87%, 88%, 89%, 90%, 91%, 92%, 93%, 94%, 95%, 96%, 97%, 98%, or 99% identical to SEQ ID NOs: 1, 2, 5, 7, 9, 11, 13, 15, 17, 19, 21, 23, 25, 27, 242, 244, 246, 257, 258-280 of patent application WO2017/070622 or a fragment or a fragment or variant of any of these sequences.

[0256] In other embodiments, the artificial RNA of the first aspect comprises a coding sequence that comprises at least one of the nucleic acid sequences being identical or at least 70%, 80%, 85%, 86%, 87%, 88%, 89%, 90%, 91%, 92%, 93%, 94%, 95%, 96%, 97%, 98%, or 99% identical to SEQ ID NOs: 96-99 of patent application WO2017/172890 or a fragment or a fragment or variant of any of these sequences.

[0257] According to preferred embodiments, the artificial RNA is a modified and/or stabilized artificial RNA.

[0258] According to preferred embodiments, the artificial RNA of the present invention may thus be provided as a “stabilized artificial RNA” that is to say an RNA showing improved resistance to in vivo degradation and/or an artificial RNA showing improved stability in vivo, and/or an artificial RNA showing improved translatability in vivo. In the following, specific suitable modifications in this context are described which are suitably to “stabilize” the artificial RNA.

[0259] Such stabilization may be effected by providing a “dried RNA” and/or a “purified RNA” as specified herein. Alternatively or in addition to that, such stabilization can be effected, for example, by a modified phosphate backbone of the artificial RNA of the present invention. A backbone modification in connection with the present invention is a modification in which phosphates of the backbone of the nucleotides contained in the RNA are chemically modified. Nucleotides that may be preferably used in this connection contain e.g. a phosphorothioate-modified phosphate backbone, preferably at least one of the phosphate oxygens contained in the phosphate backbone being replaced by a sulfur atom. Stabilized RNAs may further include, for example: non-ionic phosphate analogues, such as, for example, alkyl and aryl phosphonates, in which the charged phosphonate oxygen is replaced by an alkyl or aryl group, or phosphodiesters and alkylphosphotriesters, in which the charged oxygen residue is present in alkylated form. Such backbone modifications typically include, without implying any limitation, modifications from the group consisting of methylphosphonates, phosphoramidates and phosphorothioates (e.g. cytidine-5-O-(1-thiophosphate)).

[0260] In the following, suitable modifications are described that are capable of “stabilizing” the artificial RNA of the invention.

[0261] According to embodiments, the artificial RNA according to the invention is a modified artificial RNA, wherein the modification refers to chemical modifications comprising backbone modifications as well as sugar modifications or base modifications.

[0262] In this context, a modified artificial RNA as defined herein may contain nucleotide analogues/modifications, e.g. backbone modifications, sugar modifications or base modifications. A backbone modification in connection with the present invention is a modification, in which phosphates of the backbone of the nucleotides contained in a nucleic acid, e.g. an artificial RNA, are chemically modified. A sugar modification in connection with the present invention is a chemical modification of the sugar of the nucleotides of the RNA as defined herein. Furthermore, a base modification in connection with the present invention is a chemical modification of the base moiety of the nucleotides of the RNA. In this context, nucleotide analogues or modifications are preferably selected from nucleotide analogues which are applicable for transcription and/or translation.

[0263] In particularly preferred embodiments of the present invention, the nucleotide analogues/modifications which may be incorporated into a modified nucleic acid or particularly into a modified RNA as described herein are preferably selected from 2-amino-6-chloropurineriboside-5′-triphosphate, 2-Aminopurine-riboside-5′-triphosphate; 2-aminoadenosine-5′-triphosphate, 2′-Amino-2′-deoxycytidine-triphosphate, 2-thiocytidine-5′-triphosphate, 2-thiouridine-5′-triphosphate, 2′-Fluorothymidine-5′-triphosphate, 2′-O-Methyl-inosine-5′-triphosphate 4-thiouridine-5′-triphosphate, 5-aminoallylcytidine-5′-triphosphate, 5-aminoallyluridine-5′-triphosphate, 5-bromocytidine-5′-triphosphate, 5-bromouridine-5′-triphosphate, 5-Bromo-2′-deoxycytidine-5′-triphosphate, 5-Bromo-2′-deoxyuridine-5′-triphosphate, 5-iodocytidine-5′-triphosphate, 5-Iodo-2′-deoxycytidine-5′-triphosphate, 5-iodouridine-5′-triphosphate, 5-Iodo-2′-deoxyuridine-5′-triphosphate, 5-methylcytidine-5′-triphosphate, 5-methyluridine-5′-triphosphate, 5-Propynyl-2′-deoxycytidine-5′-triphosphate, 5-Propynyl-2′-deoxyuridine-5′-triphosphate, 6-azacytidine-5′-triphosphate, 6-azauridine-5′-triphosphate, 6-chloropurineriboside-5′-triphosphate, 7-deazaadenosine-5′-triphosphate, 7-deazaguanosine-5′-triphosphate, 8-azaadenosine-5′-triphosphate, 8-azidoadenosine-5′-triphosphate, benzimidazole-riboside-5′-triphosphate, N1-methyladenosine-5′-triphosphate, N1-methylguanosine-5′-triphosphate, N6-methyladenosine-5′-triphosphate, 06-methylguanosine-5′-triphosphate, pseudouridine-5′-triphosphate, or puromycin-5′-triphosphate, xanthosine-5′-triphosphate. Particular preference is given to nucleotides for base modifications selected from the group of base-modified nucleotides consisting of 5-methylcytidine-5′-triphosphate, 7-deazaguanosine-5′-triphosphate, 5-bromocytidine-5′-triphosphate, and pseudouridine-5′-triphosphate, pyridin-4-one ribonucleoside, 5-aza-uridine, 2-thio-5-aza-uridine, 2-thiouridine, 4-thio-pseudouridine, 2-thio-pseudouridine, 5-hydroxyuridine, 3-methyluridine, 5-carboxymethyl-uridine, 1-carboxymethyl-pseudouridine, 5-propynyl-uridine, 1-propynyl-pseudouridine, 5-taurinomethyluridine, 1-taurinomethyl-pseudouridine, 5-taurinomethyl-2-thio-uridine, 1-taurinomethyl-4-thio-uridine, 5-methyl-uridine, 1-methyl-pseudouridine, 4-thio-1-methyl-pseudouridine, 2-thio-1-methyl-pseudouridine, 1-methyl-1-deaza-pseudouridine, 2-thio-1-methyl-1-deaza-pseudouridine, dihydrouridine, dihydropseudouridine, 2-thio-dihydrouridine, 2-thio-dihydropseudouridine, 2-methoxyuridine, 2-methoxy-4-thio-uridine, 4-methoxy-pseudouridine, and 4-methoxy-2-thio-pseudouridine, 5-aza-cytidine, pseudoisocytidine, 3-methyl-cytidine, N4-acetylcytidine, 5-formylcytidine, N4-methylcytidine, 5-hydroxymethylcytidine, 1-methyl-pseudoisocytidine, pyrrolo-cytidine, pyrrolo-pseudoisocytidine, 2-thio-cytidine, 2-thio-5-methyl-cytidine, 4-thio-pseudoisocytidine, 4-thio-1-methyl-pseudoisocytidine, 4-thio-1-methyl-1-deaza-pseudoisocytidine, 1-methyl-1-deaza-pseudoisocytidine, zebularine, 5-aza-zebularine, 5-methyl-zebularine, 5-aza-2-thio-zebularine, 2-thio-zebularine, 2-methoxy-cytidine, 2-methoxy-5-methyl-cytidine, 4-methoxy-pseudoisocytidine, and 4-methoxy-1-methyl-pseudoisocytidine, 2-aminopurine, 2, 6-diaminopurine, 7-deaza-adenine, 7-deaza-8-aza-adenine, 7-deaza-2-aminopurine, 7-deaza-8-aza-2-aminopurine, 7-deaza-2,6-diaminopurine, 7-deaza-8-aza-2,6-diaminopurine, 1-methyladenosine, N6-methyladenosine, N6-isopentenyladenosine, N6-(cis-hydroxyisopentenyl)adenosine, 2-methylthio-N6-(cis-hydroxyisopentenyl) adenosine, N6-glycinylcarbamoyladenosine, N6-threonylcarbamoyladenosine, 2-methylthio-N6-threonyl carbamoyladenosine, N6,N6-dimethyladenosine, 7-methyladenine, 2-methylthio-adenine, and 2-methoxy-adenine, inosine, 1-methyl-inosine, wyosine, wybutosine, 7-deaza-guanosine, 7-deaza-8-aza-guanosine, 6-thio-guanosine, 6-thio-7-deaza-guanosine, 6-thio-7-deaza-8-aza-guanosine, 7-methyl-guanosine, 6-thio-7-methyl-guanosine, 7-methylinosine, 6-methoxy-guanosine, 1-methylguanosine, N2-methylguanosine, N2,N2-dimethylguanosine, 8-oxo-guanosine, 7-methyl-8-oxo-guanosine, 1-methyl-6-thio-guanosine, N2-methyl-6-thio-guanosine, and N2,N2-dimethyl-6-thio-guanosine, 5′-O-(1-thiophosphate)-adenosine, 5′-O-(1-thiophosphate)-cytidine, 5′-O-(1-thiophosphate)-guanosine, 5′-O-(1-thiophosphate)-uridine, 5′-O-(1-thiophosphate)-pseudouridine, 6-aza-cytidine, 2-thio-cytidine, alpha-thio-cytidine, Pseudo-iso-cytidine, 5-aminoallyl-uridine, 5-iodo-uridine, N1-methyl-pseudouridine, 5,6-dihydrouridine, alpha-thio-uridine, 4-thio-uridine, 6-aza-uridine, 5-hydroxy-uridine, deoxy-thymidine, 5-methyl-uridine, Pyrrolo-cytidine, inosine, alpha-thio-guanosine, 6-methyl-guanosine, 5-methyl-cytdine, 8-oxo-guanosine, 7-deaza-guanosine, N1-methyl-adenosine, 2-amino-6-Chloro-purine, N6-methyl-2-amino-purine, Pseudo-iso-cytidine, 6-Chloro-purine, N6-methyl-adenosine, alpha-thio-adenosine, 8-azido-adenosine, 7-deaza-adenosine. Particularly preferred and suitable in the context of the invention are pseudouridine (ψ), N1-methylpseudouridine (m1ψ), 5-methylcytosine, and 5-methoxyuridine. Accordingly, the artificial RNA as defined herein may comprise at least one modified nucleotide selected from pseudouridine (ψ), N1-methylpseudouridine (m1ψ), 5-methylcytosine, and 5-methoxyuridine.

[0264] In preferred embodiments, the artificial RNA of the invention comprises at least one coding sequence, wherein the at least one coding sequence is a pseudouridine (ψ) modified coding sequence.

[0265] Accordingly, in preferred embodiments, the artificial RNA of the invention, or the at least one coding sequence, comprises a nucleic acid sequence wherein at least one or more than one, preferably wherein all uracil nucleotides are replaced by pseudouridine (ψ) nucleotides

[0266] In further preferred embodiments, the artificial RNA of the invention comprises at least one coding sequence, wherein the at least one coding sequence is a N1-methylpseudouridine (m1ψ) modified coding sequence.

[0267] Accordingly, in preferred embodiments, the artificial RNA of the invention, or the at least one coding sequence, comprises a nucleic acid sequence wherein at least one or more than one, preferably wherein all uracil nucleotides are replaced by N1-methylpseudouridine (m1ψ) nucleotides

[0268] In preferred embodiments, the artificial RNA of the invention comprises at least one coding sequence, wherein the at least one coding sequence is a codon modified coding sequence.

[0269] In preferred embodiments, the at least one coding sequence of the invention is a codon modified coding sequence, wherein the amino acid sequence encoded by the at least one codon modified coding sequence is preferably not being modified compared to the amino acid sequence encoded by the corresponding wild type coding sequence.

[0270] The term “codon modified coding sequence” relates to coding sequences that differ in at least one codon (triplets of nucleotides coding for one amino acid) compared to the corresponding wild type coding sequence. Suitably, a codon modified coding sequence in the context of the invention may show improved resistance to in vivo degradation and/or improved stability in vivo, and/or improved translatability in vivo. Codon modifications in the broadest sense make use of the degeneracy of the genetic code wherein multiple codons may encode the same amino acid and may be used interchangeably (cf. Table 2) to optimize/modify the coding sequence for in vivo applications as outlined above.

[0271] In particularly preferred embodiments of the first aspect, the at least one sequence is a codon modified coding sequence, wherein the codon modified coding sequence is selected from C maximized coding sequence, CAI maximized coding sequence, human codon usage adapted coding sequence, G/C content modified coding sequence, and G/C optimized coding sequence, or any combination thereof, or any combination thereof.

[0272] According to preferred embodiments, the artificial RNA of the invention may be modified, wherein the C content of the at least one coding sequence may be increased, preferably maximized, compared to the C content of the corresponding wild type coding sequence (herein referred to as “C maximized coding sequence”). The amino acid sequence encoded by the C maximized coding sequence of the RNA is preferably not modified as compared to the amino acid sequence encoded by the respective wild type nucleic acid coding sequence. The generation of a C maximized nucleic acid sequences may suitably be carried out using a modification method according to WO2015/062738. In this context, the disclosure of WO2015/062738 is included herewith by reference. Throughout the disclosure of the invention, including the <223> identifier of the sequence listing, C maximized coding sequences of suitable RSV nucleic acid sequences are indicated by the abbreviation “opt2”.

[0273] According to embodiments, the artificial RNA of the present invention may be modified, wherein the G/C content of the at least one coding sequence of the invention may be modified compared to the G/C content of the corresponding wild type coding sequence (herein referred to as “G/C content modified coding sequence”). In this context, the terms “G/C optimization” or “G/C content modification” relate to a nucleic acid, preferably an artificial nucleic acid of the invention that comprises a modified, preferably an increased number of guanosine and/or cytosine nucleotides as compared to the corresponding wild type nucleic acid sequence. Such an increased number may be generated by substitution of codons containing adenosine or thymidine nucleotides by codons containing guanosine or cytosine nucleotides. If the enriched G/C content occurs in a coding sequence of DNA or RNA, it makes use of the degeneracy of the genetic code. In particular, in case of RNA, sequences having an increased G (guanosine)/C (cytosine) content are more stable than sequences having an increased A (adenosine)/U (uracil) content. The amino acid sequence encoded by the G/C content modified coding sequence of the nucleic acid sequence is preferably not modified as compared to the amino acid sequence encoded by the respective wild type nucleic acid coding sequence. Preferably, the G/C content of the coding sequence of the artificial nucleic acid sequence, e.g. the RNA sequence of the present invention is increased by at least 10%, preferably by at least 20%, more preferably by at least 30%, most preferably by at least 40% compared to the G/C content of the coding sequence of the corresponding wild type nucleic acid sequence (e.g. RNA sequence), which codes for a RSV antigen as defined herein or a fragment or variant thereof.

[0274] According to preferred embodiments, the artificial RNA of the present invention may be modified, wherein the G/C content of the at least one coding sequence of the invention may be optimized compared to the G/C content of the corresponding wild type coding sequence (herein referred to as “G/C content optimized coding sequence”). “Optimized” in that context refers to a coding sequence wherein the G/C content is preferably increased to the essentially highest possible G/C content. The amino acid sequence encoded by the G/C content optimized coding sequence of the nucleic acid sequence is preferably not modified as compared to the amino acid sequence encoded by the respective wild type nucleic acid coding sequence. The generation of a G/C content optimized nucleic RNA sequence may suitably be carried out using a G/C content optimization method according to WO2002/098443. In this context, the disclosure of WO2002/098443 is included in its full scope in the present invention. Throughout the disclosure of the invention, including the <223> identifier of the sequence listing, G/C optimized coding sequences of suitable RSV nucleic acid sequences are indicated by the abbreviation “opt1, opt5, opt6, opt11”.

[0275] According to embodiments, the artificial RNA of the invention may be modified, wherein the codons in the at least one coding sequence of the invention may be adapted to human codon usage (herein referred to as “human codon usage adapted coding sequence”). Codons encoding the same amino acid occur at different frequencies in a subject, e.g. a human. Accordingly, the coding sequence of the artificial RNA is preferably modified such that the frequency of the codons encoding the same amino acid corresponds to the naturally occurring frequency of that codon according to the human codon usage e.g. as shown in Table 2. For example, in the case of the amino acid Ala, the wild type coding sequence is preferably adapted in a way that the codon “GCC” is used with a frequency of 0.40, the codon “GCT” is used with a frequency of 0.28, the codon “GCA” is used with a frequency of 0.22 and the codon “GCG” is used with a frequency of 0.10 etc. (see Table 2). Accordingly, such a procedure (as exemplified for Ala) is applied for each amino acid encoded by the coding sequence of the artificial nucleic acid of the invention to obtain sequences adapted to human codon usage. Throughout the disclosure of the invention, including the <223> identifier of the sequence listing, human codon usage adapted coding sequences of suitable RSV nucleic acid sequences are indicated by the abbreviation “opt3”.

TABLE 2
Human codon usage table with frequencies
indicated for each amino acid

| Amino acid | codon | frequency |
|---|---|---|
| Ala | GCG | 0.10 |
| Ala | GCA | 0.22 |
| Ala | GCT | 0.28 |
| Ala | GCC* | 0.40 |
| Cys | TGT | 0.42 |
| Cys | TGC* | 0.58 |
| Asp | GAT | 0.44 |
| Asp | GAC* | 0.56 |
| Glu | GAG* | 0.59 |
| Glu | GAA | 0.41 |
| Phe | TTT | 0.43 |
| Phe | TTC* | 0.57 |
| Gly | GGG | 0.23 |
| Gly | GGA | 0.26 |
| Gly | GGT | 0.18 |
| Gly | GGC* | 0.33 |
| His | CAT | 0.41 |
| His | CAC* | 0.59 |
| Ile | ATA | 0.14 |
| Ile | ATT | 0.35 |
| Ile | ATC* | 0.52 |
| Lys | AAG* | 0.60 |
| Lys | AAA | 0.40 |
| Leu | TTG | 0.12 |
| Leu | TTA | 0.06 |
| Leu | CTG* | 0.43 |
| Leu | CTA | 0.07 |
| Leu | CTT | 0.12 |
| Leu | CTC | 0.20 |
| Met | ATG* | 1 |
| Asn | AAT | 0.44 |
| Asn | AAC* | 0.56 |
| Pro | CCG | 0.11 |
| Pro | CCA | 0.27 |
| Pro | CCT | 0.29 |
| Pro | CCC* | 0.33 |
| Gln | CAG* | 0.73 |
| Gln | CAA | 0.27 |
| Arg | AGG | 0.22 |
| Arg | AGA* | 0.21 |
| Arg | CGG | 0.19 |
| Arg | CGA | 0.10 |
| Arg | CGT | 0.09 |
| Arg | CGC | 0.19 |
| Ser | AGT | 0.14 |
| Ser | AGC* | 0.25 |
| Ser | TCG | 0.06 |
| Ser | TCA | 0.15 |
| Ser | TCT | 0.18 |
| Ser | TCC | 0.23 |
| Thr | ACG | 0.12 |
| Thr | ACA | 0.27 |
| Thr | ACT | 0.23 |
| Thr | ACC* | 0.38 |
| Val | GTG* | 0.48 |
| Val | GTA | 0.10 |
| Val | GTT | 0.17 |
| Val | GTC | 0.25 |
| Trp | TGG* | 1 |
| Tyr | TAT | 0.42 |
| Tyr | TAC* | 0.58 |
| Stop | TGA* | 0.61 |
| Stop | TAG | 0.17 |
| Stop | TAA | 0.22 |

*most frequent human codon

[0276] According to embodiments, the artificial RNA of the present invention may be modified, wherein the codon adaptation index (CAI) may be increased or preferably maximised in the at least one coding sequence of the invention (herein referred to as “CAI maximized coding sequence”). Accordingly, it is preferred that all codons of the wild type nucleic acid sequence that are relatively rare in e.g. a human cell are exchanged fora respective codon that is frequent in the e.g. a human cell, wherein the frequent codon encodes the same amino acid as the relatively rare codon. Suitably, the most frequent codons are used for each encoded amino acid (see Table 2, most frequent human codons are marked with asterisks). Suitably, the artificial RNA of the invention comprises at least one coding sequence, wherein the codon adaptation index (CAI) of the at least one coding sequence is at least 0.5, at least 0.8, at least 0.9 or at least 0.95. Most preferably, the codon adaptation index (CAI) of the at least one coding sequence is 1. For example, in the case of the amino acid Ala, the wild type coding sequence is adapted in a way that the most frequent human codon “GCC” is always used for said amino acid. Accordingly, such a procedure (as exemplified for Ala) is applied for each amino acid encoded by the coding sequence of the artificial RNA of the invention to obtain CAI maximized coding sequences. Throughout the disclosure of the invention including the <223> identifier of the sequence listing, CAI maximized coding sequences of suitable RSV nucleic acid sequences are indicated by the abbreviation “opt4”.

[0277] Accordingly, in a particularly preferred embodiment, the artificial RNA of the first aspect comprises at least one coding sequence comprising a codon modified nucleic acid sequence which is identical or at least 70%, 80%, 85%, 86%, 87%, 88%, 89%, 90%, 91%, 92%, 93%, 94%, 95%, 96%, 97%, 98%, or 99% identical to a codon modified nucleic acid sequence selected from the group consisting of SEQ ID NOs: 70-77, 485-492, 899-906, 1268-1275, 1637-1644, 2006-2013, 2375-2382, 2744-2751, 3113-3120, 3482-3489, 3851-3858, 4220-4227, 4589-4596, 4958-4965, 5327-5334, 5696-5703, 6065-6072, 6434-6441, 6803-6810, 7172-7179, 7541-7548, 7910-7917, 11728-11734, 12097-12103, 12465-12472, 12834-12841, 13941-13948, 14310-14317, 14679-14686, 15048-15055, 15417-15424, 15786-15793, 13203-13210, 13572-13579, 16155-16162, 16524-16531, 16893-16900, 17262-17269, 17631-17638, 18000-18007, 18369-18376, 18738-18745, 19107-19114, 19476-19483, 21363-21384, 21389-21410 or a fragment or variant of any of these sequences (see also Table 3 and 4). Additional information regarding each of these suitable nucleic acid sequences encoding may also be derived from the sequence listing, in particular from the details provided therein under identifier <223>.

[0278] In particularly preferred embodiment, the artificial RNA of the first aspect comprises at least one coding sequence comprising a codon modified nucleic acid sequence which is identical or at least 50%, 60%, 70%, 80%, 85%, 86%, 87%, 88%, 89%, 90%, 91%, 92%, 93%, 94%, 95%, 96%, 97%, 98%, or 99% identical to any one of the G/C optimized or G/C content modified nucleic acid sequence according to the SEQ ID NOs: 70-71, 75-77, 485-486, 490-492, 899-900, 904-906, 1268-1269, 1273-1275, 1637-1638, 1642-1644, 2006-2007, 2011-2013, 2375-2376, 2380-2382, 2744-2745, 2749-2751, 3113-3114, 3118-3120, 3482-3483, 3487-3489, 3852, 4221, 4590, 4959, 5328, 5697, 6066, 6435, 6804, 7173, 7542, 7911, 3856-3858, 4225-4227, 4594-4596, 4963-4965, 5332-5334, 5701-5703, 6070-6072, 6439-6441, 6808-6810, 7177-7179, 7546-7548, 7915-7917, 11728, 11732-11734, 12097, 12101-12103, 12465, 12466, 12470-12472, 12834, 12835, 12839-12841, 13941, 13942, 13946-13948, 14310, 14311, 14315-14317, 14679, 14680, 14684-14686, 15048, 15049, 15053-15055, 15417, 15418, 15422-15424, 15786, 15787, 15791-15793, 13203, 13204, 13208-13210, 13572, 13573, 13577-13579, 16155, 16156, 16160-16162, 16524, 16525, 16529-16531, 16893, 16894, 16898-16900, 17262, 17263, 17267-17269, 17631, 17632, 17636-17638, 18000, 18001, 18005-18007, 18369, 18370, 18374-18376, 18738, 18739, 18743-18745, 19107, 19108, 19112-19114, 19476, 19477, 19481-19483, 21363-21384, 21389-21410 or a fragment or variant of any of these sequences (see also Table 3 and 4; opt1, 5, 6, 11). Additional information regarding each of these suitable nucleic acid sequences encoding may also be derived from the sequence listing, in particular from the details provided therein under identifier <223>.

[0279] In preferred embodiment, the artificial RNA of the invention comprises at least one coding sequence comprising a codon modified nucleic acid sequence which is identical or at least 50%, 60%, 70%, 80%, 85%, 86%, 87%, 88%, 89%, 90%, 91%, 92%, 93%, 94%, 95%, 96%, 97%, 98%, or 99% identical to any one of the human codon usage adapted nucleic acid sequence according to the SEQ ID NOs: 73, 488, 902, 1271, 1640, 2009, 2378, 2747, 3116, 3485, 3854, 4223, 4592, 4961, 5330, 5699, 6068, 6437, 6806, 7175, 7544, 7913, 11730, 12099, 12468, 12837, 13944, 14313, 14682, 15051, 15420, 15789, 13206, 13575, 16158, 16527, 16896, 17265, 17634, 18003, 18372, 18741, 19110, 19479 or a fragment or variant of any of these sequences (see also Table 3 and 4; opt3). Additional information regarding each of these suitable nucleic acid sequences encoding may also be derived from the sequence listing, in particular from the details provided therein under identifier <223>.

[0280] In particularly preferred embodiment, the artificial RNA of the first aspect comprises at least one coding sequence comprising a codon modified nucleic acid sequence which is identical or at least 50%, 60%, 70%, 80%, 85%, 86%, 87%, 88%, 89%, 90%, 91%, 92%, 93%, 94%, 95%, 96%, 97%, 98%, or 99% identical to any one of the C maximized nucleic acid sequence according to the SEQ ID NOs: 72, 487, 901, 1270, 1639, 2008, 2377, 2746, 3115, 3484, 3853, 4222, 4591, 4960, 5329, 5698, 6067, 6436, 6805, 7174, 7543, 7912, 11729, 12098, 12467, 12836, 13943, 14312, 14681, 15050, 15419, 15788, 13205, 13574, 16157, 16526, 16895, 17264, 17633, 18002, 18371, 18740, 19109, 19478 or a fragment or variant of any of these sequences (see also Table 3 and 4; opt2).

[0281] Additional information regarding each of these suitable nucleic acid sequences encoding may also be derived from the sequence listing, in particular from the details provided therein under identifier <223>.

[0282] In preferred embodiment, the artificial RNA of the invention comprises at least one coding sequence comprising a codon modified nucleic acid sequence which is identical or at least 50%, 60%, 70%, 80%, 85%, 86%, 87%, 88%, 89%, 90%, 91%, 92%, 93%, 94%, 95%, 96%, 97%, 98%, or 99% identical to any one of the CAI maximized nucleic acid sequence according to the SEQ ID NOs 74, 489, 903, 1272, 1641, 2010, 2379, 2748, 3117, 3486, 3855, 4224, 4593, 4962, 5331, 5700, 6069, 6438, 6807, 7176, 7545, 7914, 11731, 12100, 12469, 12838, 13945, 14314, 14683, 15052, 15421, 15790, 13207, 13576, 16159, 16528, 16897, 17266, 17635, 18004, 18373, 18742, 19111, 19480 or a fragment or variant of any of these sequences (see also Table 3 and 4; opt4). Additional information regarding each of these suitable nucleic acid sequences encoding may also be derived from the sequence listing, in particular from the details provided therein under identifier <223>.

[0283] In embodiments, the A/U content in the environment of the ribosome binding site of the artificial nucleic acid, particularly the artificial RNA of the invention may be increased compared to the A/U content in the environment of the ribosome binding site of its respective wild type nucleic acid. This modification (an increased A/U content around the ribosome binding site) increases the efficiency of ribosome binding to the nucleic acid, preferably the RNA. An effective binding of the ribosomes to the ribosome binding site in turn has the effect of an efficient translation of the RNA. Accordingly, in a particularly preferred embodiment, the artificial nucleic acid of the invention comprises a ribosome binding site, also referred to as “Kozak sequence” identical to or at least 80%, 85%, 90%, 95% identical to any one of the sequences SEQ ID NOs: 41, 42, or fragments or variants thereof.

[0284] Preferred RSV polypeptide and nucleic acid coding sequences (“cds”) are provided in Table 3A and 3B and Table 4A and 4B.

[0285] In Table 3A and 3B, Columns A to J represent specific suitable constructs of the invention derived from RSV Fusion (F) protein, wherein Column A provides suitable sequences for F0, Column B provides suitable sequences for F-del, Column C provides suitable sequences for F0_DSCav1, Column D provides suitable sequences for F-del_DSCav1, Column E provides suitable sequences for F_DSCav1_mut1, Column F provides suitable sequences for F-del_DSCav1_mut1, Column G provides suitable sequences for F_DSCav1_mut2, Column H provides suitable sequences for F-del_DSCav1_mut2, Column I provides suitable sequences for F_DSCav1_mut3, Column J provides suitable sequences for F-del_DSCav1_mut3. The specific protein SEQ ID NOs as provided in the sequence listing are in row 2 (“PRT”). The SEQ ID NOs of corresponding wild type/non-modified coding sequences are provided in row 3 (“wt”). The SEQ ID NOs of corresponding codon modified coding sequences for each protein construct are provided in row 4 to row 10 (“opt1”, “opt2”, “opt3”, “opt4”, “opt5”, “opt6”, “opt11”). In Table 3A, coding sequences derived from HRSV(A2) are provided, in Table 3B coding sequences derived from HRSV(Memphis-37) are provided. Further information is provided in the <223> identifier for each of the respective SEQ ID NO in the sequence listing.

TABLE 3A
Preferred coding sequences encoding RSV F (columns A-J), derived from HRSV(A2)

| | A | B | C | D | E | F | G | H | I | J |
|---|---|---|---|---|---|---|---|---|---|---|
| PRT | 68 | 483 | 898 | 1267 | 1636 | 2005 | 2374 | 2743 | 3112 | 3481 |
| wt | 69 | 484 | | | | | | | | |
| opt1 | 70, 71, | 485, | 899, | 1268, | 1637, | 2006, | 2375, | 2744, | 3113, | 3482, |
| | 21363 | 486, | 900, | 1269, | 1638, | 2007, | 2376, | 2745, | 3114, | 3483, |
| | | 21364 | 21365 | 21366 | 21369 | 21370 | 21371 | 21372 | 21373 | 21374 |
| opt2 | 72 | 487 | 901 | 1270 | 1639 | 2008 | 2377 | 2746 | 3115 | 3484 |
| opt3 | 73 | 488 | 902 | 1271 | 1640 | 2009 | 2378 | 2747 | 3116 | 3485 |
| opt4 | 74 | 489 | 903 | 1272 | 1641 | 2010 | 2379 | 2748 | 3117 | 3486 |
| opt5 | 75 | 490 | 904 | 1273 | 1642 | 2011 | 2380 | 2749 | 3118 | 3487 |
| opt6 | 76 | 491 | 905 | 1274 | 1643 | 2012 | 2381 | 2750 | 3119 | 3488 |
| opt11 | 77 | 492 | 906 | 1275 | 1644 | 2013 | 2382 | 2751 | 3120 | 3489 |

TABLE 3B
Preferred coding sequences encoding RSV F (columns A-J), derived from HRSV(Memphis-37)

| | A | B | C | D | E | F | G | H | I | J |
|---|---|---|---|---|---|---|---|---|---|---|
| PRT | 11726 | 12095 | 12464 | 12833 | 13940 | 14309 | 14678 | 15047 | 15416 | 15785 |
| wt | 11727 | 12096 | | | | | | | | |
| opt1 | 11728, | 12097, | 12465, | 12834, | 13941, | 14310, | 14679, | 15048, | 15417, | 15786, |
| | 21389 | 21390 | 12466, | 12835, | 13942, | 14311, | 14680, | 15049, | 15418, | 15787, |
| | | | 21391 | 21392 | 21395 | 21396 | 21397 | 21398 | 21399 | 21400 |
| opt2 | 11729 | 12098 | 12467 | 12836 | 13943 | 14312 | 14681 | 15050 | 15419 | 15788 |
| opt3 | 11730 | 12099 | 12468 | 12837 | 13944 | 14313 | 14682 | 15051 | 15420 | 15789 |
| opt4 | 11731 | 12100 | 12469 | 12838 | 13945 | 14314 | 14683 | 15052 | 15421 | 15790 |
| opt5 | 11732 | 12101 | 12470 | 12839 | 13946 | 14315 | 14684 | 15053 | 15422 | 15791 |
| opt6 | 11733 | 12102 | 12471 | 12840 | 13947 | 14316 | 14685 | 15054 | 15423 | 15792 |
| opt11 | 11734 | 12103 | 12472 | 12841 | 13948 | 14317 | 14686 | 15055 | 15424 | 15793 |

[0286] In Table 4A and 4B, Columns K to V represent specific suitable constructs of the invention derived from RSV Fusion (F) protein, wherein Column K provides suitable sequences for F_DSCav1_mut0, Column L provides suitable sequences for F-del_DSCav1_mut0, Column M provides suitable sequences for F_DSCav1_mut4, Column N provides suitable sequences for F-del_DSCav1_mut4, Column O provides suitable sequences for F_DSCav1_mut5, Column P provides suitable sequences for F-del_DSCav1_mut5, Column Q provides suitable sequences for F_DSCav1_mut6, Column R provides suitable sequences for F-del_DSCav1_mut6, Column S provides suitable sequences for F_DSCav1_mut7, Column T provides suitable sequences for F-del_DSCav1_mut7, Column U provides suitable sequences for F_DSCav1_mut8, Column V provides suitable sequences for F-del_DSCav1_mut8. The specific protein SEQ ID NOs as provided in the sequence listing are in row 2 (“PRT”). The SEQ ID NOs of corresponding codon modified coding sequences for each protein construct are provided in row 3 to row 9 (“opt1”, “opt2”, “opt3”, “opt4”, “opt5”, “opt6”, “opt11”). In Table 4A, coding sequences derived from HRSV(A2) are provided, in Table 4B coding sequences derived from HRSV(Memphis-37) are provided. Further information is provided in the <223> identifier for each of the respective SEQ ID NO in the sequence listing.

TABLE 4A
Preferred coding sequences encoding RSV F (columns K-V), derived from HRSV(A2)

| | K | L | M | N | O | P | Q | R | S | T | U | V |
|---|---|---|---|---|---|---|---|---|---|---|---|---|
| PRT | 3850 | 4219 | 4588 | 4957 | 5326 | 5695 | 6064 | 6433 | 6802 | 7171 | 7540 | 7909 |
| opt1 | 3851, | 4220, | 4589, | 4958, | 5327, | 5696, | 6065, | 6434, | 6803, | 7172, | 7541, | 7910, |
| | 3852, | 4221, | 4590, | 4959, | 5328, | 5697, | 6066, | 6435, | 6804, | 7173, | 7542, | 7911, |
| | 21367 | 21368 | 21375 | 21376 | 21377 | 21378 | 21379 | 21380 | 21381 | 21382 | 21383 | 21384 |
| opt2 | 3853 | 4222 | 4591 | 4960 | 5329 | 5698 | 6067 | 6436 | 6805 | 7174 | 7543 | 7912 |
| opt3 | 3854 | 4223 | 4592 | 4961 | 5330 | 5699 | 6068 | 6437 | 6806 | 7175 | 7544 | 7913 |
| opt4 | 3855 | 4224 | 4593 | 4962 | 5331 | 5700 | 6069 | 6438 | 6807 | 7176 | 7545 | 7914 |
| opt5 | 3856 | 4225 | 4594 | 4963 | 5332 | 5701 | 6070 | 6439 | 6808 | 7177 | 7546 | 7915 |
| opt6 | 3857 | 4226 | 4595 | 4964 | 5333 | 5702 | 6071 | 6440 | 6809 | 7178 | 7547 | 7916 |
| opt11 | 3858 | 4227 | 4596 | 4965 | 5334 | 5703 | 6072 | 6441 | 6810 | 7179 | 7548 | 7917 |

TABLE 4B
Preferred coding sequences encoding RSV F (columns K-V) derived from HRSV(Memphis-37)

| | K | L | M | N | O | P | Q | R | S | T | U | V |
|---|---|---|---|---|---|---|---|---|---|---|---|---|
| PRT | 13202 | 13571 | 16154 | 16523 | 16892 | 17261 | 17630 | 17999 | 18368 | 18737 | 19106 | 19475 |
| opt1 | 13203, | 13572, | 16155, | 16524, | 16893, | 17262, | 17631, | 18000, | 18369, | 18738, | 19107, | 19476, |
| | 13204, | 13573, | 16156, | 16525, | 16894, | 17263, | 17632, | 18001, | 18370, | 18739, | 19108, | 19477, |
| | 21393 | 21394 | 21401 | 21402 | 21403 | 21404 | 21405 | 21406 | 21407 | 21408 | 21409 | 21410 |
| opt2 | 13205 | 13574 | 16157 | 16526 | 16895 | 17264 | 17633 | 18002 | 18371 | 18740 | 19109 | 19478 |
| opt3 | 13206 | 13575 | 16158 | 16527 | 16896 | 17265 | 17634 | 18003 | 18372 | 18741 | 19110 | 19479 |
| opt4 | 13207 | 13576 | 16159 | 16528 | 16897 | 17266 | 17635 | 18004 | 18373 | 18742 | 19111 | 19480 |
| opt5 | 13208 | 13577 | 16160 | 16529 | 16898 | 17267 | 17636 | 18005 | 18374 | 18743 | 19112 | 19481 |
| opt6 | 13209 | 13578 | 16161 | 16530 | 16899 | 17268 | 17637 | 18006 | 18375 | 18744 | 19113 | 19482 |
| opt11 | 13210 | 13579 | 16162 | 16531 | 16900 | 17269 | 17638 | 18007 | 18376 | 18745 | 19114 | 19483 |

[0287] In embodiments, the artificial RNA of the first aspect is monocistronic, bicistronic, or multicistronic.

[0288] In preferred embodiments, the artificial RNA of the invention is monocistronic.

[0289] The term “monocistronic nucleic acid” or “monocistronic nucleic acid” will be recognized and understood by the person of ordinary skill in the art, and is for example intended to refer to an artificial RNA that comprises only one coding sequences as defined herein. The terms “bicistronic nucleic acid, multicistronic nucleic acid” or “monocistronic RNA” as used herein will be recognized and understood by the person of ordinary skill in the art, and are for example intended to refer to an artificial RNA that may have two (bicistronic) or even more (multicistronic) coding sequences.

[0290] In embodiments, the artificial RNA of the invention is monocistronic and the coding sequence of said monocistronic artificial RNA encodes at least two different antigenic peptides or proteins derived from RSV F as defined herein, or a fragment or variant thereof. Accordingly, the at least one coding sequence of the monocistronic artificial RNA may encode at least two, three, four, five, six, seven, eight and more antigenic peptides or proteins derived from a RSV, preferably a RSV F as defined herein linked with or without an amino acid linker sequence, wherein said linker sequence can comprise rigid linkers, flexible linkers, cleavable linkers (e.g. self-cleaving peptides) as defined above, or a combination thereof (herein referred to as “multi-antigen-constructs/nucleic acid”).

[0291] In embodiments, the artificial RNA of the invention is bicistronic or multicistronic and comprises at least two coding sequences, wherein the at least two coding sequences encode two or more different antigenic peptides or proteins derived from RSV, preferably RSV F as defined herein, or a fragment or variant of any of these. Accordingly, the coding sequences in a bicistronic or multicistronic artificial RNA suitably encodes distinct antigenic proteins or peptides as defined herein or a fragment or variant thereof. Preferably, the coding sequences in said bicistronic or multicistronic artificial RNA may be separated by at least one IRES (internal ribosomal entry site) sequence. Thus, the term “encoding two or more antigenic peptides or proteins” may mean, without being limited thereto, that the bicistronic or multicistronic artificial RNA encodes e.g. at least two, three, four, five, six or more (preferably different) antigenic peptides or proteins of different RSV or their fragments or variants within the definitions provided herein. Alternatively, the bicistronic or multicistronic artificial RNA may encode e.g. at least two, three, four, five, six or more (preferably different) antigenic peptides or proteins derived from the same RSV or fragments or variants within the definitions provided herein. In that context, suitable IRES sequences may be selected from the list of nucleic acid sequences according to SEQ ID NOs: 1566-1662 of the patent application WO2017/081082, or fragments or variants of these sequences. In this context, the disclosure of WO2017/081082 relating to IRES sequences is herewith incorporated by reference.

[0292] It has to be understood that in the context of the invention, certain combinations of coding sequences may be generated by any combination of monocistronic, bicistronic and multicistronic artificial nucleic acids and/or multi-antigen-constructs/nucleic acid to obtain a nucleic acid composition encoding multiple antigenic peptides or proteins as defined herein.

[0293] Preferably, the artificial RNA comprising at least one coding sequence as defined herein typically comprises a length of about 50 to about 20000, or 500 to about 20000 nucleotides, or about 500 to about 20000 nucleotides, or about 500 to about 10000 nucleotides, or of about 1000 to about 10000 nucleotides, or preferably of about 1000 to about 5000 nucleotides, or even more preferably of about 1000 to about 2500 nucleotides.

[0294] According to preferred embodiments, the artificial RNA of the first aspect may be an mRNA, a self-replicating RNA, a circular RNA, or a replicon RNA.

[0295] In embodiments, the artificial RNA is a circular RNA. As used herein, “circular RNA” or “circRNAs” has to be understood as a circular polynucleotide that can encode at least one antigenic peptide or protein as defined herein. Accordingly, in preferred embodiments, said circular RNA comprises at least one coding sequence encoding at least one antigenic peptide or protein derived from RSV or a fragment or variant thereof as defined herein. The production of circRNAs can be performed using various methods provided in the art. For example, U.S. Pat. No. 6,210,931 teaches a method of synthesizing circRNAs by inserting DNA fragments into a plasmid containing sequences having the capability of spontaneous cleavage and self-circularization. U.S. Pat. No. 5,773,244 teaches producing circRNAs by making a DNA construct encoding an RNA cyclase ribozyme, expressing the DNA construct as an RNA, and then allowing the RNA to self-splice, which produces a circRNA free from intron in vitro. WO1992/001813 teaches a process of making single strand circular nucleic acids by synthesizing a linear polynucleotide, combining the linear nucleotide with a complementary linking oligonucleotide under hybridization conditions, and ligating the linear polynucleotide. The person skilled in the art may also use methods provided in WO2015/034925 or WO2016/011222 to produce circular RNA. Accordingly, methods for producing circular RNA as provided in U.S. Pat. Nos. 6,210,931, 5,773,244, WO1992/001813, WO2015/034925 and WO2016/011222 are incorporated herewith by reference.

[0296] In embodiments, the artificial RNA is a replicon RNA. The term “replicon RNA” will be recognized and understood by the person of ordinary skill in the art, and are for example intended to be optimized self-replicating artificial RNA constructs. Such constructs include replication elements (replicase) derived from alphaviruses and the substitution of the structural virus proteins with the artificial nucleic acid of interest (in the context of the invention, an artificial nucleic acid comprising at least one coding sequence encoding at least one antigenic peptide or protein derived from RSV. Alternatively, the replicase may be provided on an independent construct comprising a replicase RNA sequence derived from e.g. Semliki forest virus (SFV), Sindbis virus (SIN), Venezuelan equine Encephalitis virus (VEE), Ross-River virus (RRV), or other viruses belonging to the alphavirus family. Downstream of the replicase lies a sub-genomic promoter that controls replication of the artificial nucleic acid of the invention, i.e. an artificial nucleic acid comprising at least one coding sequence encoding at least one antigenic peptide or protein derived from RSV.

[0297] In preferred embodiments the artificial RNA of the first aspect is an mRNA.

[0298] The terms “RNA” and “mRNA” will be recognized and understood by the person of ordinary skill in the art, and are for example intended to be a ribonucleic acid molecule, i.e. a polymer consisting of nucleotides. These nucleotides are usually adenosine-monophosphate, uridine-monophosphate, guanosine-monophosphate and cytidine-monophosphate monomers which are connected to each other along a so-called backbone. The backbone is formed by phosphodiester bonds between the sugar, i.e. ribose, of a first and a phosphate moiety of a second, adjacent monomer. The specific succession of the monomers is called the RNA-sequence. The mRNA (messenger RNA) usually provides the nucleotide sequence that may be translated into an amino-acid sequence of a particular peptide or protein.

[0299] The artificial RNA, preferably the mRNA of the invention may be prepared using any method known in the art, including chemical synthesis such as e.g. solid phase RNA synthesis, as well as in vitro methods, such as RNA in vitro transcription reactions.

[0300] In a preferred embodiment, the artificial RNA, preferably the mRNA is obtained by RNA in vitro transcription.

[0301] Accordingly, the RNA of the invention is preferably an in vitro transcribed RNA.

[0302] The terms “RNA in vitro transcription” or “in vitro transcription” relate to a process wherein RNA is synthesized in a cell-free system (in vitro). RNA may be obtained by DNA-dependent in vitro transcription of an appropriate DNA template, which according to the present invention is a linearized plasmid DNA template or a PCR-amplified DNA template. The promoter for controlling RNA in vitro transcription can be any promoter for any DNA-dependent RNA polymerase. Particular examples of DNA-dependent RNA polymerases are the T7, T3, SP6, or Syn5 RNA polymerases. In a preferred embodiment of the present invention the DNA template is linearized with a suitable restriction enzyme, before it is subjected to RNA in vitro transcription.

[0303] Reagents used in RNA in vitro transcription typically include: a DNA template (linearized plasmid DNA or PCR product) with a promoter sequence that has a high binding affinity for its respective RNA polymerase such as bacteriophage-encoded RNA polymerases (T7, T3, SP6, or Syn5); ribonucleotide triphosphates (NTPs) for the four bases (adenine, cytosine, guanine and uracil); optionally, a cap analogue as defined herein (e.g. m7G(5′)ppp(5′)G (m7G, m7G(5′)ppp(5′)(2′OMeG)pG or m7G(5′)ppp(5′)(2′OMeA)pG)); optionally, further modified nucleotides as defined herein; a DNA-dependent RNA polymerase capable of binding to the promoter sequence within the DNA template (e.g. T7, T3, SP6, or Syn5 RNA polymerase); optionally, a ribonuclease (RNase) inhibitor to inactivate any potentially contaminating RNase; optionally, a pyrophosphatase to degrade pyrophosphate, which may inhibit RNA in vitro transcription; MgCl2, which supplies Mg2+ ions as a co-factor for the polymerase; a buffer (TRIS or HEPES) to maintain a suitable pH value, which can also contain antioxidants (e.g. DTT), and/or polyamines such as spermidine at optimal concentrations, e.g. a buffer system comprising TRIS-Citrate as disclosed in WO2017/109161.

[0304] In embodiments, the nucleotide mixture used in RNA in vitro transcription may additionally contain modified nucleotides as defined herein. In that context, preferred modified nucleotides comprise pseudouridine (ψ), N1-methylpseudouridine (m1ψ), 5-methylcytosine, and/or 5-methoxyuridine.

[0305] In preferred embodiments, the nucleotide mixture (i.e. the fraction of each nucleotide in the mixture) used for RNA in vitro transcription reactions may be optimized for the given RNA sequence, preferably as described WO2015/188933.

[0306] In embodiment where more than one different artificial RNA as defined herein has to be produced, e.g. where 2, 3, 4, 5, 6, 7, 8, 9, 10 or even more different artificial RNAs have to be produced (e.g. encoding different RSV F antigens, or e.g. a combination of RSV F and RSV G; see second aspect), procedures as described in WO2017/109134 may be suitably used.

[0307] In the context of RNA vaccine production, it may be required to provide GMP-grade RNA. GMP-grade RNA may be produced using a manufacturing process approved by regulatory authorities. Accordingly, in a particularly preferred embodiment, RNA production is performed under current good manufacturing practice (GMP), implementing various quality control steps on DNA and RNA level, preferably according to WO2016/180430. In preferred embodiments, the RNA of the invention is a GMP-grade RNA, particularly a GMP-grade mRNA.

[0308] The obtained RNA products are preferably purified using PureMessenger® (CureVac, Tubingen, Germany; RP-HPLC according to WO2008/077592) and/or tangential flow filtration (as described in WO2016/193206).

[0309] In a further preferred embodiment, the RNA, particularly the purified RNA, is lyophilized according to WO2016/165831 or WO2011/069586 to yield a temperature stable dried artificial RNA (powder) as defined herein. The RNA of the invention, particularly the purified RNA may also be dried using spray-drying or spray-freeze drying according to WO2016/184575 or WO2016184576 to yield a temperature stable RNA (powder) as defined herein. Accordingly, in the context of manufacturing and purifying RNA, the disclosures of WO2017/109161, WO2015/188933, WO2016/180430, WO2008/077592, WO2016/193206, WO2016/165831, WO2011/069586, WO2016/184575, and WO2016/184576 are incorporated herewith by reference.

[0310] Accordingly, in preferred embodiments, the RNA is a dried RNA, particularly a dried mRNA.

[0311] The term “dried RNA” as used herein has to be understood as RNA that has been lyophilized, or spray-dried, or spray-freeze dried as defined above to obtain a temperature stable dried RNA (powder).

[0312] In preferred embodiments, the artificial RNA of the invention is a purified RNA, particularly purified mRNA.

[0313] The term “purified RNA” or “purified mRNA” as used herein has to be understood as RNA which has a higher purity after certain purification steps (e.g. HPLC, TFF, Oligo d(T) purification, precipitation steps) than the starting material (e.g. in vitro transcribed RNA). Typical impurities that are essentially not present in purified RNA comprise peptides or proteins (e.g. enzymes derived from DNA dependent RNA in vitro transcription, e.g. RNA polymerases, RNases, pyrophosphatase, restriction endonuclease, DNase), spermidine, BSA, abortive RNA sequences, RNA fragments (short double stranded RNA fragments, abortive sequences etc.), free nucleotides (modified nucleotides, conventional NTPs, cap analogue), template DNA fragments, buffer components (HEPES, TRIS, MgCl2) etc. Other potential impurities that may be derived from e.g. fermentation procedures comprise bacterial impurities (bioburden, bacterial DNA) or impurities derived from purification procedures (organic solvents etc.). Accordingly, it is desirable in this regard for the “degree of RNA purity” to be as close as possible to 100%. It is also desirable for the degree of RNA purity that the amount of full-length RNA transcripts is as close as possible to 100%. Accordingly “purified RNA” as used herein has a degree of purity of more than 75%, 80%, 85%, very particularly 90%, 91%, 92%, 93%, 94%, 95%, 96%, 97%, 98% and most favorably 99% or more. The degree of purity may for example be determined by an analytical HPLC, wherein the percentages provided above correspond to the ratio between the area of the peak for the target RNA and the total area of all peaks representing the by-products. Alternatively, the degree of purity may for example be determined by an analytical agarose gel electrophoresis or capillary gel electrophoresis.

[0314] It has to be understood that “dried RNA” as defined herein and “purified RNA” as defined herein or “GMP-grade mRNA” as defined herein may have superior stability characteristics (in vitro, in vivo) and improved efficiency (e.g. better translatability of the mRNA in vivo) and are therefore particularly suitable in the context of the invention. Moreover, “dried RNA” as defined herein and “purified RNA” as defined herein or “GMP-grade mRNA” may be particularly suitable for medical use as defined herein.

[0315] The artificial RNA may suitably be modified by the addition of a 5′-cap structure, which preferably stabilizes the nucleic acid as described herein. Accordingly, in preferred embodiments, the artificial RNA of the first aspect comprises a 5′-cap structure, preferably m7G, cap0 (e.g. m7G(5′)ppp(5′)G), cap1 (e.g. m7G(5′)ppp(5′)(2′OMeG) or m7G(5′)ppp(5′)(2′OMeA)), cap2, a modified cap0, or a modified cap1 structure (generated using a cap analogue as defined below).

[0316] The term “5′-cap structure” as used herein will be recognized and understood by the person of ordinary skill in the art, and is for example intended to refer to a modified nucleotide (cap analogue), particularly a guanine nucleotide, added to the 5′-end of an RNA molecule, e.g. an mRNA molecule. Preferably, the 5′-cap is added using a 5-5-triphosphate linkage (also named m7GpppN). Further examples of 5′-cap structures include glyceryl, inverted deoxy abasic residue (moiety), 4′,5′ methylene nucleotide, 1-(beta-D-erythrofuranosyl) nucleotide, 4′-thio nucleotide, carbocyclic nucleotide, 1,5-anhydrohexitol nucleotide, L-nucleotides, alpha-nucleotide, modified base nucleotide, threo-pentofuranosyl nucleotide, acyclic 3′,4′-seco nucleotide, acyclic 3,4-dihydroxybutyl nucleotide, acyclic 3,5 dihydroxypentyl nucleotide, 3′-3-inverted nucleotide moiety, 3′-3′-inverted abasic moiety, 3′-2′-inverted nucleotide moiety, 3′-2′-inverted abasic moiety, 1,4-butanediol phosphate, 3′-phosphoramidate, hexylphosphate, aminohexyl phosphate, 3′-phosphate, 3′phosphorothioate, phosphorodithioate, or bridging or non-bridging methylphosphonate moiety.

[0317] Further 5′-cap structures which may be suitable in the context of the present invention are cap1 (additional methylation of the ribose of the adjacent nucleotide of m7GpppN), cap2 (additional methylation of the ribose of the 2nd nucleotide downstream of the m7GpppN), cap3 (additional methylation of the ribose of the 3rd nucleotide downstream of the m7GpppN), cap4 (additional methylation of the ribose of the 4th nucleotide downstream of the m7GpppN), ARCA (anti-reverse cap analogue), modified ARCA (e.g. phosphothioate modified ARCA), inosine, N1-methyl-guanosine, 2′-fluoro-guanosine, 7-deaza-guanosine, 8-oxo-guanosine, 2-amino-guanosine, LNA-guanosine, and 2-azido-guanosine.

[0318] A 5′-cap (cap0 or cap1) structure may also be formed in chemical RNA synthesis or, preferably, RNA in vitro transcription (co-transcriptional capping) using cap analogues.

[0319] The term “cap analogue” as used herein will be recognized and understood by the person of ordinary skill in the art, and is for example intended to refer to a non-polymerizable di-nucleotide that has cap functionality in that it facilitates translation or localization, and/or prevents degradation of a nucleic acid molecule, particularly of an RNA molecule, when incorporated at the 5′-end of the nucleic acid molecule. Non-polymerizable means that the cap analogue will be incorporated only at the 5′-terminus because it does not have a 5′ triphosphate and therefore cannot be extended in the 3′-direction by a template-dependent polymerase, particularly, by template-dependent RNA polymerase. Examples of cap analogues include, but are not limited to, a chemical structure selected from the group consisting of m7GpppG, m7GpppA, m7GpppC; unmethylated cap analogues (e.g. GpppG); dimethylated cap analogue (e.g. m2,7GpppG), trimethylated cap analogue (e.g. m2,2,7GpppG), dimethylated symmetrical cap analogues (e.g. m7Gpppm7G), or anti reverse cap analogues (e.g. ARCA; m7,2′OmeGpppG, m7,2′dGpppG, m7,3′OmeGpppG, m7,3′dGpppG and their tetraphosphate derivatives). Further cap analogues have been described previously (WO2008/016473, WO2008/157688, WO2009/149253, WO2011/015347, and WO2013/059475). Further suitable cap analogons in that context are described in WO2017/066793, WO2017/066781, WO2017/066791, WO2017/066789, WO2017/053297, WO2017/066782, WO2018075827 and WO2017/066797 wherein the disclosures referring to cap analogues are incorporated herewith by reference.

[0320] The 5′-cap structure may suitably be added co-transcriptionally using cap-analogues as defined herein in an RNA in vitro transcription reaction as defined herein.

[0321] In preferred embodiments, a modified cap1 structure is generated using a cap analogue as disclosed in WO2017/053297, WO2017/066793, WO2017/066781, WO2017/066791, WO2017/066789, WO2017/066782, WO2018075827 and WO2017/066797. In particular, any cap structures derivable from the structure disclosed in claim 1-5 of WO2017/053297 may be suitably used to co-transcriptionally generate a modified cap1 structure. Further, any cap structures derivable from the structure defined in claim 1 or claim 21 of WO2018075827 may be suitably used to co-transcriptionally generate a modified cap1 structure.

[0322] Preferred cap-analogues are the di-nucleotide cap analogues m7G(5′)ppp(5′)G (m7G) or 3 O-Me-m7G(5′)ppp(5′)G to co-transcriptionally generate cap0 structures. Particularly preferred cap-analogues are the tri-nucleotide cap analogues m7G(5′)ppp(5′)(2′OMeA)pG or m7G(5′)ppp(5′)(2′OMeG)pG to co-transcriptionally generate cap1 structures.

[0323] In that context, it is preferred that the RNA of the invention comprises a Cap1 structure as defined above, which preferably result in an increased protein expression through e.g. high capping efficiencies and increased translation efficiencies. Further suitably, the RNA of the invention comprising a Cap1 structure displays a decreased stimulation of the innate immune system as compared to Cap0 constructs of the same nucleic acid sequence. The person of ordinary skill knows how to determine translation efficiencies, capping degree, and immune stimulation.

[0324] In a particularly preferred embodiment, the artificial RNA of the first aspect of the invention comprises a cap1 structure, wherein said cap1 structure may be formed enzymatically or co-transcriptionally (e.g. using m7G(5′)ppp(5′)(2′OMeA)pG or m7G(5′)ppp(5′)(2′OMeG)pG analogues).

[0325] In preferred embodiments, the artificial RNA of the first aspect comprises an m7G(5′)ppp(5′)(2′OMeA)pG cap structure. In such embodiments, the coding RNA comprises a 5′ terminal m7G cap, and an additional methylation of the ribose of the adjacent nucleotide of m7GpppN, in that case, a 2′O methylated adenosine.

[0326] In other preferred embodiments, the artificial RNA of the first aspect comprises an m7G(5′)ppp(5′)(2′OMeG)pG cap structure. In such embodiments, the coding RNA comprises a 5′ terminal m7G cap, and an additional methylation of the ribose of the adjacent nucleotide, in that case, a 2′O methylated guanosine.

[0327] Accordingly, whenever reference is made to suitable RNA or mRNA sequences in the context of the invention, the first nucleotide of said RNA or mRNA sequence, that is the nucleotide downstream of the m7G(5′)ppp structure, may be a 2′O methylated guanosine or a 2′O methylated adenosine.

[0328] Accordingly, in other embodiments, the artificial RNA of the invention may comprise a 5′-cap sequence element according to SEQ ID NOs: 43 or 21321, or a fragment or variant thereof.

[0329] In other embodiments, the 5′-cap structure is added via enzymatic capping using capping enzymes (e.g. vaccinia virus capping enzymes, commercially available capping kits) to generate cap or cap1 or cap2 structures. In other embodiments, the 5′-cap structure (cap0, cap1) is added via enzymatic capping using immobilized capping enzymes, e.g. using a capping reactor (WO2016/193226).

[0330] In preferred embodiments, the artificial RNA of the invention comprises at least one poly(A) sequence, preferably comprising 30 to 150 adenosine nucleotides.

[0331] In preferred embodiments, the poly(A) sequence, suitable located at the 3′ terminus, comprises 10 to 500 adenosine nucleotides, 10 to 200 adenosine nucleotides, 40 to 200 adenosine nucleotides or 40 to 150 adenosine nucleotides. In a particularly preferred embodiment, the poly(A) sequence comprises about 64 adenosine nucleotides. In further particularly preferred embodiments, the poly(A) sequence comprises about 75 adenosine nucleotides. In further particularly preferred embodiments, the poly(A) sequence comprises about 100 adenosine nucleotides.

[0332] The terms “poly(A) sequence”, “poly(A) tail” or “3′-poly(A) tail” as used herein will be recognized and understood by the person of ordinary skill in the art, and are for example intended to be a sequence of adenosine nucleotides, typically located at the 3′-end of an RNA, of up to about 1000 adenosine nucleotides. Preferably, said poly(A) sequence is essentially homopolymeric, e.g. a poly(A) sequence of e.g. 100 adenosine nucleotides has essentially the length of 100 nucleotides. In other embodiments, the poly(A) sequence may be interrupted by at least one nucleotide different from an adenosine nucleotide, e.g. a poly(A) sequence of e.g. 100 adenosine nucleotides may have a length of more than 100 nucleotides (comprising 100 adenosine nucleotides and in addition said at least one nucleotide different from an adenosine nucleotide).

[0333] In the context of the present invention, a poly(A) sequence may be located within an mRNA or any other nucleic acid molecule, such as, e.g., in a DNA vector, for example, in a vector serving as template for the generation of an RNA, preferably an mRNA, e.g., by transcription said DNA vector.

[0334] Preferably, the poly(A) sequence of the artificial RNA is obtained from a DNA template during RNA in vitro transcription. In other embodiments, the poly(A) sequence is obtained in vitro by common methods of chemical synthesis without being necessarily transcribed from a DNA template. In other embodiments, poly(A) sequences are generated by enzymatic polyadenylation of the RNA (after RNA in vitro transcription) using commercially available polyadenylation kits and corresponding protocols known in the art, or alternatively, by using immobilized poly(A)polymerases e.g. using a polyadenylation reactor (as described in WO2016/174271).

[0335] In embodiments, the artificial RNA of the invention may contain a poly(A) sequence derived from a vector and may comprise at least one additional poly(A) sequence generated by enzymatic polyadenylation, e.g. as described in WO2016/091391.

[0336] In preferred embodiments, the artificial RNA of the invention comprises at least one poly(C) sequence, preferably comprising 10 to 40 cytosine nucleotides.

[0337] In preferred embodiments, the poly(C) sequence, suitable located at the 3′ terminus, comprises 10 to 200 cytosine nucleotides, 10 to 100 cytosine nucleotides, 20 to 70 cytosine nucleotides, 20 to 60 cytosine nucleotides, or 10 to 40 cytosine nucleotides. In a particularly preferred embodiment, the poly(C) sequence comprises about cytosine nucleotides.

[0338] The term “poly(C) sequence” as used herein will be recognized and understood by the person of ordinary skill in the art, and are for example intended to be a sequence of cytosine nucleotides, typically located at the 3′-end of an RNA, of up to about 200 cytosine nucleotides. In the context of the present invention, a poly(C) sequence may be located within an mRNA or any other nucleic acid molecule, such as, e.g., in a DNA vector, for example, in a vector serving as template for the generation of an RNA, preferably an mRNA, e.g., by transcription of the vector.

[0339] Preferably, the poly(C) sequence in the RNA sequence of the present invention is derived from a DNA template by RNA in vitro transcription. In other embodiments, the poly(C) sequence is obtained in vitro by common methods of chemical synthesis without being necessarily transcribed from a DNA template.

[0340] In other embodiments, the artificial RNA of the invention does not comprises a poly(C) sequence as defined herein.

[0341] In preferred embodiments, the artificial RNA of the first aspect comprises at least one histone stem-loop.

[0342] The term “histone stem-loop” as used herein will be recognized and understood by the person of ordinary skill in the art, and are for example intended to refer to nucleic acid sequences that are predominantly found in histone mRNAs. Exemplary histone stem-loop sequences are described in Lopez et al. (Davila Lopez et al, (2008), RNA, 14(1)). The stem-loops in histone pre-mRNAs are typically followed by a purine-rich sequence known as the histone downstream element (HDE). These pre-mRNAs are processed in the nucleus by a single endonucleolytic cleavage approximately 5 nucleotides downstream of the stem-loop, catalysed by the U7 snRNP through base pairing of the U7 snRNA with the HDE.

[0343] Histone stem-loop sequences/structures may suitably be selected from histone stem-loop sequences as disclosed in WO2012/019780, the disclosure relating to histone stem-loop sequences/structures incorporated herewith by reference. A histone stem-loop sequence that may be used within the present invention may preferably be derived from formulae (I) or (II) of the patent application WO2012/019780. According to a further preferred embodiment the RNA as defined herein may comprise at least one histone stem-loop sequence derived from at least one of the specific formulae (Ia) or (IIa) of the patent application WO2012/019780.

[0344] In particularly preferred embodiment, the artificial RNA of the invention comprises at least one histone stem-loop, wherein said histone stem-loop comprises a nucleic acid sequence according to SEQ ID NO: 39 or 40 or a fragments or variant thereof.

[0345] In other embodiments, the artificial RNA of the first aspect does not comprises a histone stem-loop as defined herein.

[0346] In further embodiments, the artificial RNA of the invention comprises a 3′-terminal sequence element. Said 3′-terminal sequence element has to be understood as a sequence element comprising a poly(A)sequence and a histone-stem-loop sequence, wherein said sequence element is located at the 3′ terminus of the artificial RNA of the invention.

[0347] In other embodiments, the artificial RNA of the invention may comprise a 3′-terminal sequence element according to SEQ ID NOs: 44-63 or 21322-21328 or a fragment or variant thereof.

[0348] In preferred embodiments, the artificial RNA of the invention comprises at least one pseudouridine (ψ) modified coding sequence.

[0349] Accordingly, in preferred embodiments, the artificial RNA of the invention, or the at least one coding sequence, comprises a nucleic acid sequence wherein at least one or more than one, preferably wherein all uracil nucleotides are replaced by pseudouridine (ψ) nucleotides.

[0350] In further preferred embodiments, the artificial RNA of the invention comprises at least one N1-methylpseudouridine (m1ψ) modified coding sequence.

[0351] Accordingly, in preferred embodiments, the artificial RNA of the invention, or the at least one coding sequence, comprises a nucleic acid sequence wherein at least one or more than one, preferably wherein all uracil nucleotides are replaced by N1-methylpseudouridine (m1P) nucleotides

[0352] In preferred embodiments of the first aspect, the artificial RNA, preferably mRNA comprises preferably in 5′- to 3-direction the following elements a)-i):
[0353] a) 5′-cap structure, preferably as specified herein;
[0354] b) optionally, 5′-UTR as specified herein, preferably at least one selected from SEQ ID NOs: 1-22;
[0355] c) a ribosome binding site, preferably as specified herein
[0356] d) at least one coding sequence as specified herein, preferably as specified in Table 3 and Table 4;
[0357] e) 3′-UTR as specified herein, preferably at least one selected from SEQ ID NOs: 23-38;
[0358] f) optionally, a poly(A) sequence, preferably as specified herein;
[0359] g) optionally, a poly(C) sequence, preferably as specified herein;
[0360] h) optionally, a histone stem-loop, preferably as specified herein;
[0361] i) optionally, a 3′-terminal sequence element as specified herein, preferably according to according to SEQ ID NOs: 44-63, or 21322-21328; and
[0362] wherein optionally at least one or more than one, preferably wherein all uracil nucleotides are replaced by pseudouridine (L) nucleotides or N1-methylpseudouridine (m1ψ) nucleotides.

[0363] In further preferred embodiments of the first aspect, the artificial RNA, preferably mRNA comprises the following elements preferably in 5′- to 3-direction:
[0364] a) 5′-cap structure, preferably as specified herein, most preferably a Cap1 structure;
[0365] b) a 3′-UTR and a 5′-UTR element according to a-1, a-4, c-1, e-4, g-2, i-2, or i-3 as specified herein;
[0366] c) a ribosome binding site, preferably as specified herein;
[0367] d) at least one coding sequence as specified herein, wherein said coding sequence is located between said 5′-UTR and said 3′-UTR, preferably downstream of said 5′-UTR and upstream of said 3′-UTR, wherein the coding sequence is preferably selected from any one specified in Table 3 and Table 4;
[0368] e) optionally, a poly(A) sequence, preferably as specified herein;
[0369] f) optionally, poly(C) sequence, preferably as specified herein;
[0370] g) optionally, histone stem-loop, preferably as specified herein;
[0371] h) optionally, a 3′-terminal sequence element as specified herein, preferably according to according to SEQ ID NOs: 44-63, 21322-21328, and
[0372] wherein optionally at least one or more than one, preferably wherein all uracil nucleotides are replaced by pseudouridine (ψ) nucleotides or N1-methylpseudouridine (m1ψ) nucleotides.

[0373] In further preferred embodiments of the first aspect, the artificial RNA, preferably mRNA comprises the following elements preferably in 5′- to 3-direction:
[0374] a) 5′-cap structure, preferably as specified herein, most preferably a Cap1 structure;
[0375] b) a 3′-UTR and a 5′-UTR element according to a-1 or i-3 as specified herein;
[0376] c) a ribosome binding site, preferably as specified herein
[0377] d) at least one coding sequence as specified herein, wherein said coding sequence is located between said 5′-UTR and said 3′-UTR, preferably downstream of said 5′-UTR and upstream of said 3′-UTR, wherein the coding sequence is preferably selected from any one specified in Table 3 and Table 4;
[0378] e) optionally, a histone stem-loop, preferably as specified herein;
[0379] f) a poly(A) sequence, preferably comprising about 100 adenosine nucleotides;
[0380] g) optionally, a 3′-terminal sequence element as specified herein, preferably according to according to SEQ ID NOs: 21322-21328, and
[0381] wherein optionally at least one or more than one, preferably wherein all uracil nucleotides are replaced by pseudouridine (ψ) nucleotides or N1-methylpseudouridine (m1γ) nucleotides.

[0382] In further preferred embodiments of the first aspect, the artificial RNA, preferably mRNA comprises the following elements in 5′- to 3′-direction:
[0383] a) 5′-cap structure, preferably as specified herein, most preferably a Cap1 structure;
[0384] b) a 3′-UTR and a 5′-UTR element according to a-1, a-4, c-1, e-4, g-2, i-2, or i-3 as specified herein;
[0385] c) a ribosome binding site, preferably as specified herein;
[0386] d) at least one coding sequence as specified herein, wherein said coding region is located between said 5′-UTR and said 3′-UTR, preferably downstream of said 5′-UTR and upstream of said 3′-UTR, wherein the coding sequence is preferably selected from any one of SEQ ID NOs: 69-77, 484-492, 899-906, 1268-1275, 1637-1644, 2006-2013, 2375-2382, 2744-2751, 3113-3120, 3482-3489, 3851-3858, 4220-4227, 4589-4596, 4958-4965, 5327-5334, 5696-5703, 6065-6072, 6434-6441, 6803-6810, 7172-7179, 7541-7548, 7910-7917, 11727-11734, 12096-12103, 12465-12472, 12834-12841, 13941-13948, 14310-14317, 14679-14686, 15048-15055, 15417-15424, 15786-15793, 13203-13210, 13572-13579, 16155-16162, 16524-16531, 16893-16900, 17262-17269, 17631-17638, 18000-18007, 18369-18376, 18738-18745, 19107-19114, 19476-19483, 21363-21384, 21389-21410 (or fragments or variants thereof);
[0387] e) a poly(A) sequence comprising about 64 adenosine;
[0388] f) a poly(C) sequence comprising about 30 cysteines;
[0389] g) a histone stem-loop according to SEQ ID NO: 39 or 40, and
[0390] wherein optionally at least one or more than one, preferably wherein all uracil nucleotides are replaced by pseudouridine (ψ) nucleotides or N1-methylpseudouridine (m1ψ) nucleotides.

[0391] In further preferred embodiments of the first aspect, the artificial RNA, preferably mRNA comprises the following elements in 5′- to 3′-direction:
[0392] a) 5′-cap structure, preferably as specified herein, most preferably a Cap1 structure;
[0393] b) a 3′-UTR and a 5′-UTR element according to a-1, a-4, c-1, e-4, g-2, i-2, or i-3 as specified herein;
[0394] c) a ribosome binding site, preferably as specified herein;
[0395] d) at least one coding sequence as specified herein, wherein said coding region is located between said 5′-UTR and said 3′-UTR, preferably downstream of said 5′-UTR and upstream of said 3′-UTR, wherein the coding sequence is preferably selected from any one of SEQ ID NOs: 69-77, 484-492, 899-906, 1268-1275, 1637-1644, 2006-2013, 2375-2382, 2744-2751, 3113-3120, 3482-3489, 3851-3858, 4220-4227, 4589-4596, 4958-4965, 5327-5334, 5696-5703, 6065-6072, 6434-6441, 6803-6810, 7172-7179, 7541-7548, 7910-7917, 11727-11734, 12096-12103, 12465-12472, 12834-12841, 13941-13948, 14310-14317, 14679-14686, 15048-15055, 15417-15424, 15786-15793, 13203-13210, 13572-13579, 16155-16162, 16524-16531, 16893-16900, 17262-17269, 17631-17638, 18000-18007, 18369-18376, 18738-18745, 19107-19114, 19476-19483, 21363-21384, 21389-21410 (or fragments or variants thereof);
[0396] e) a poly(A) sequence comprising about 64 adenosine;
[0397] f) a histone stem-loop according to SEQ ID NO: 39 or 40, and
[0398] wherein optionally at least one or more than one, preferably wherein all uracil nucleotides are replaced by pseudouridine (ψ) nucleotides or N1-methylpseudouridine (m1ψ) nucleotides.

[0399] Preferred RSV polypeptide, nucleic acid, and mRNA sequences are provided in Table 5A, 5B and Table 6A, 6B.

[0400] In Table 5A and 5B, the protein designs are indicated in row 1. Therein, Columns A to J represent specific suitable constructs of the invention derived from RSV Fusion (F) protein, wherein Column A provides suitable sequences for F0, Column B provides suitable sequences for F-del, Column C provides suitable sequences for F0_DSCav1, Column D provides suitable sequences for F-del_DSCav1, Column E provides suitable sequences for F_DSCav1_mut1, Column F provides suitable sequences for F-del_DSCav1_mut1, Column G provides suitable sequences for F_DSCav1_mut2, Column H provides suitable sequences for F-del_DSCav1_mut2, Column I provides suitable sequences for F_DSCav1_mut3, Column J provides suitable sequences for F-del_DSCav1_mut3.

[0401] The protein designs are indicated in row 1 (Columns A to J), the specific protein SEQ ID NOs as provided in the sequence listing are in row 2 (“protein”). The SEQ ID NOs of corresponding coding sequences for each protein construct are provided in row 3 (“cds”, compare with Table 3 for different cds optimizations). Further information e.g. regarding the type of codon modified coding sequence (opt1, opt2, opt3, opt4, opt5, opt6, opt11 etc.) is provided in the <223> identifier of the respective SEQ ID NO in the sequence listing and in Table 3. The SEQ ID NOs of corresponding mRNA constructs comprising said coding sequences and suitable 3′-UTRs and 5′-UTRs according to the invention are provided in rows 4 to 47 (mRNA designs a-1 to i-3 as specified herein). In Table 5A, mRNA sequences derived from HRSV(A2) are provided, in Table 5B mRNA sequences derived from HRSV(Memphis-37) are provided. Further information e.g. regarding the type of coding sequence (wt, opt1, opt2, opt3, opt4, opt5, opt6, opt11 etc.) comprised in the mRNA constructs is provided in the <223> identifier of the respective SEQ ID NO in the sequence listing.

TABLE 5A
Preferred mRNA constructs encoding RSV F (columns A-J), derived from HRSV(A2)

| 1 | | A | B | C | D | E | F | G | H | I | J |
|---|---|---|---|---|---|---|---|---|---|---|---|
| 2 | Protein | 68 | 483 | 898 | 1267 | 1636 | 2005 | 2374 | 2743 | 3112 | 3481 |
| 3 | cds | 69-77, | 484- | 899- | 1268- | 1637- | 2006- | 2375- | 2744- | 3113- | 3482- |
| | | 21363 | 492, | 906, | 1275, | 1644, | 2013, | 2382, | 2751, | 3120, | 3489, |
| | | | 21364 | 21365 | 21366 | 21369 | 21370 | 21371 | 21372 | 21373 | 21374 |
| 4 | mRNA | 78-86, | 493- | 907- | 1276- | 1645- | 2014- | 2383- | 2752- | 3121- | 3490- |
| | Design a-1 | 21415- | 501, | 914, | 1283, | 1652, | 2021, | 2390, | 2759, | 3128, | 3497, |
| | | 21417, | 21418- | 21421- | 21424- | 21433- | 21436- | 21439- | 21442- | 21445- | 21448- |
| | | 21561- | 21420, | 21423, | 21426, | 21435, | 21438, | 21441, | 21444, | 21447, | 21450, |
| | | 21563 | 21564- | 21567- | 21570- | 21579- | 21582- | 21585- | 21588- | 21591- | 21594- |
| | | | 21566 | 21569 | 21572 | 21581 | 21584 | 21587 | 21590 | 21593 | 21596 |
| 5 | mRNA | 87-95 | 502- | 915- | 1284- | 1653- | 2022- | 2391- | 2760- | 3129- | 3498- |
| | Design a-2 | | 510 | 922 | 1291 | 1660 | 2029 | 2398 | 2767 | 3136 | 3505 |
| 6 | mRNA | 96-104 | 511- | 923- | 1292- | 1661- | 2030- | 2399- | 2768- | 3137- | 3506- |
| | Design a-3 | | 519 | 930 | 1299 | 1668 | 2037 | 2406 | 2775 | 3144 | 3513 |
| 7 | mRNA | 105-113 | 520- | 931- | 1300- | 1669- | 2038- | 2407- | 2776- | 3145- | 3514- |
| | Design a-4 | | 528 | 938 | 1307 | 1676 | 2045 | 2414 | 2783 | 3152 | 3521 |
| 8 | mRNA | 114-122 | 529- | 939- | 1308- | 1677- | 2046- | 2415- | 2784- | 3153- | 3522- |
| | Design a-5 | | 537 | 946 | 1315 | 1684 | 2053 | 2422 | 2791 | 3160 | 3529 |
| 9 | mRNA | 123-131 | 538- | 947- | 1316- | 1685- | 2054- | 2423- | 2792- | 3161- | 3530- |
| | Design b-1 | | 546 | 954 | 1323 | 1692 | 2061 | 2430 | 2799 | 3168 | 3537 |
| 10 | mRNA | 132-140 | 547- | 955- | 1324- | 1693- | 2062- | 2431- | 2800- | 3169- | 3538- |
| | Design b-2 | | 555 | 962 | 1331 | 1700 | 2069 | 2438 | 2807 | 3176 | 3545 |
| 11 | mRNA | 141-149 | 556- | 963- | 1332- | 1701- | 2070- | 2439- | 2808- | 3177- | 3546- |
| | Design b-3 | | 564 | 970 | 1339 | 1708 | 2077 | 2446 | 2815 | 3184 | 3553 |
| 12 | mRNA | 150-158 | 565- | 971- | 1340- | 1709- | 2078- | 2447- | 2816- | 3185- | 3554- |
| | Design b-4 | | 573 | 978 | 1347 | 1716 | 2085 | 2454 | 2823 | 3192 | 3561 |
| 13 | mRNA | 159-167 | 574- | 979- | 1348- | 1717- | 2086- | 2455- | 2824- | 3193- | 3562- |
| | Design b-5 | | 582 | 986 | 1355 | 1724 | 2093 | 2462 | 2831 | 3200 | 3569 |
| 14 | mRNA | 168-176 | 583- | 987- | 1356- | 1725- | 2094- | 2463- | 2832- | 3201- | 3570- |
| | Design c-1 | | 591 | 994 | 1363 | 1732 | 2101 | 2470 | 2839 | 3208 | 3577 |
| 15 | mRNA | 177-185 | 592- | 995- | 1364- | 1733- | 2102- | 2471- | 2840- | 3209- | 3578- |
| | Design c-2 | | 600 | 1002 | 1371 | 1740 | 2109 | 2478 | 2847 | 3216 | 3585 |
| 16 | mRNA | 186-194 | 601- | 1003- | 1372- | 1741- | 2110- | 2479- | 2848- | 3217- | 3586- |
| | Design c-3 | | 609 | 1010 | 1379 | 1748 | 2117 | 2486 | 2855 | 3224 | 3593 |
| 17 | mRNA | 195-203 | 610- | 1011- | 1380- | 1749- | 2118- | 2487- | 2856- | 3225- | 3594- |
| | Design c-4 | | 618 | 1018 | 1387 | 1756 | 2125 | 2494 | 2863 | 3232 | 3601 |
| 18 | mRNA | 204-212 | 619- | 1019- | 1388- | 1757- | 2126- | 2495- | 2864- | 3233- | 3602- |
| | Design c-5 | | 627 | 1026 | 1395 | 1764 | 2133 | 2502 | 2871 | 3240 | 3609 |
| 19 | mRNA | 213-221 | 628- | 1027- | 1396- | 1765- | 2134- | 2503- | 2872- | 3241- | 3610- |
| | Design d-1 | | 636 | 1034 | 1403 | 1772 | 2141 | 2510 | 2879 | 3248 | 3617 |
| 20 | mRNA | 222-230 | 637- | 1035- | 1404- | 1773- | 2142- | 2511- | 2880- | 3249- | 3618- |
| | Design d-2 | | 645 | 1042 | 1411 | 1780 | 2149 | 2518 | 2887 | 3256 | 3625 |
| 21 | mRNA | 231-239 | 646- | 1043- | 1412- | 1781- | 2150- | 2519- | 2888- | 3257- | 3626- |
| | Design d-3 | | 654 | 1050 | 1419 | 1788 | 2157 | 2526 | 2895 | 3264 | 3633 |
| 22 | mRNA | 240-248 | 655- | 1051- | 1420- | 1789- | 2158- | 2527- | 2896- | 3265- | 3634- |
| | Design d-4 | | 663 | 1058 | 1427 | 1796 | 2165 | 2534 | 2903 | 3272 | 3641 |
| 23 | mRNA | 249-257 | 664- | 1059- | 1428- | 1797- | 2166- | 2535- | 2904- | 3273- | 3642- |
| | Design d-5 | | 672 | 1066 | 1435 | 1804 | 2173 | 2542 | 2911 | 3280 | 3649 |
| 24 | mRNA | 258-266 | 673- | 1067- | 1436- | 1805- | 2174- | 2543- | 2912- | 3281- | 3650- |
| | Design e-1 | | 681 | 1074 | 1443 | 1812 | 2181 | 2550 | 2919 | 3288 | 3657 |
| 25 | mRNA | 267-275 | 682- | 1075- | 1444- | 1813- | 2182- | 2551- | 2920- | 3289- | 3658- |
| | Design e-2 | | 690 | 1082 | 1451 | 1820 | 2189 | 2558 | 2927 | 3296 | 3665 |
| 26 | mRNA | 276-284 | 691- | 1083- | 1452- | 1821- | 2190- | 2559- | 2928- | 3297- | 3666- |
| | Design e-3 | | 699 | 1090 | 1459 | 1828 | 2197 | 2566 | 2935 | 3304 | 3673 |
| 27 | mRNA | 285-293 | 700- | 1091- | 1460- | 1829- | 2198- | 2567- | 2936- | 3305- | 3674- |
| | Design e-4 | | 708 | 1098 | 1467 | 1836 | 2205 | 2574 | 2943 | 3312 | 3681 |
| 28 | mRNA | 294-302 | 709- | 1099- | 1468- | 1837- | 2206- | 2575- | 2944- | 3313- | 3682- |
| | Design e-5 | | 717 | 1106 | 1475 | 1844 | 2213 | 2582 | 2951 | 3320 | 3689 |
| 29 | mRNA | 303-311 | 718- | 1107- | 1476- | 1845- | 2214- | 2583- | 2952- | 3321- | 3690- |
| | Design e-6 | | 726 | 1114 | 1483 | 1852 | 2221 | 2590 | 2959 | 3328 | 3697 |
| 30 | mRNA | 312-320 | 727- | 1115- | 1484- | 1853- | 2222- | 2591- | 2960- | 3329- | 3698- |
| | Design f-1 | | 735 | 1122 | 1491 | 1860 | 2229 | 2598 | 2967 | 3336 | 3705 |
| 31 | mRNA | 321-329 | 736- | 1123- | 1492- | 1861- | 2230- | 2599- | 2968- | 3337- | 3706- |
| | Design f-2 | | 744 | 1130 | 1499 | 1868 | 2237 | 2606 | 2975 | 3344 | 3713 |
| 32 | mRNA | 330-338 | 745- | 1131- | 1500- | 1869- | 2238- | 2607- | 2976- | 3345- | 3714- |
| | Design f-3 | | 753 | 1138 | 1507 | 1876 | 2245 | 2614 | 2983 | 3352 | 3721 |
| 33 | mRNA | 339-347 | 754- | 1139- | 1508- | 1877- | 2246- | 2615- | 2984- | 3353- | 3722- |
| | Design f-4 | | 762 | 1146 | 1515 | 1884 | 2253 | 2622 | 2991 | 3360 | 3729 |
| 34 | mRNA | 348-356 | 763- | 1147- | 1516- | 1885- | 2254- | 2623- | 2992- | 3361- | 3730- |
| | Design f-5 | | 771 | 1154 | 1523 | 1892 | 2261 | 2630 | 2999 | 3368 | 3737 |
| 35 | mRNA | 357-365 | 772- | 1155- | 1524- | 1893- | 2262- | 2631- | 3000- | 3369- | 3738- |
| | Design g-1 | | 780 | 1162 | 1531 | 1900 | 2269 | 2638 | 3007 | 3376 | 3745 |
| 36 | mRNA | 366-374 | 781- | 1163- | 1532- | 1901- | 2270- | 2639- | 3008- | 3377- | 3746- |
| | Design g-2 | | 789 | 1170 | 1539 | 1908 | 2277 | 2646 | 3015 | 3384 | 3753 |
| 37 | mRNA | 375-383 | 790- | 1171- | 1540- | 1909- | 2278- | 2647- | 3016- | 3385- | 3754- |
| | Design g-3 | | 798 | 1178 | 1547 | 1916 | 2285 | 2654 | 3023 | 3392 | 3761 |
| 38 | mRNA | 384-392 | 799- | 1179- | 1548- | 1917- | 2286- | 2655- | 3024- | 3393- | 3762- |
| | Design g-4 | | 807 | 1186 | 1555 | 1924 | 2293 | 2662 | 3031 | 3400 | 3769 |
| 39 | mRNA | 393-401 | 808- | 1187- | 1556- | 1925- | 2294- | 2663- | 3032- | 3401- | 3770- |
| | Design g-5 | | 816 | 1194 | 1563 | 1932 | 2301 | 2670 | 3039 | 3408 | 3777 |
| 40 | mRNA | 402-410 | 817- | 1195- | 1564- | 1933- | 2302- | 2671- | 3040- | 3409- | 3778- |
| | Design h-1 | | 825 | 1202 | 1571 | 1940 | 2309 | 2678 | 3047 | 3416 | 3785 |
| 41 | mRNA | 411-419 | 826- | 1203- | 1572- | 1941- | 2310- | 2679- | 3048- | 3417- | 3786- |
| | Design h-2 | | 834 | 1210 | 1579 | 1948 | 2317 | 2686 | 3055 | 3424 | 3793 |
| 42 | mRNA | 420-428 | 835- | 1211- | 1580- | 1949- | 2318- | 2687- | 3056- | 3425- | 3794- |
| | Design h-3 | | 843 | 1218 | 1587 | 1956 | 2325 | 2694 | 3063 | 3432 | 3801 |
| 43 | mRNA | 429-437 | 844- | 1219- | 1588- | 1957- | 2326- | 2695- | 3064- | 3433- | 3802- |
| | Design h-4 | | 852 | 1226 | 1595 | 1964 | 2333 | 2702 | 3071 | 3440 | 3809 |
| 44 | mRNA | 438-446 | 853- | 1227- | 1596- | 1965- | 2334- | 2703- | 3072- | 3441- | 3810- |
| | Design h-5 | | 861 | 1234 | 1603 | 1972 | 2341 | 2710 | 3079 | 3448 | 3817 |
| 45 | mRNA | 447-455 | 862- | 1235- | 1604- | 1973- | 2342- | 2711- | 3080- | 3449- | 3818- |
| | Design i-1 | | 870 | 1242 | 1611 | 1980 | 2349 | 2718 | 3087 | 3456 | 3825 |
| 46 | mRNA | 456-473 | 871- | 1243- | 1612- | 1981- | 2350- | 2719- | 3088- | 3457- | 3826- |
| | Design i-2 | | 888 | 1258 | 1627 | 1996 | 2365 | 2734 | 3103 | 3472 | 3841 |
| 47 | mRNA | 474-482 | 889- | 1259- | 1628- | 1997- | 2366- | 2735- | 3104- | 3473- | 3842- |
| | Design i-3 | | 897 | 1266 | 1635 | 2004 | 2373 | 2742 | 3111 | 3480 | 3849 |
| 48 | mRNA | | | | 8278 | | | | | | |
| | Design i-4 | | | | | | | | | | |

TABLE 5B
Preferred mRNA constructs encoding RSV F (columns A-J), derived from HRSV(Memphis-37)

| 1 | | A | B | C | D | E | F | G | H | I | J |
|---|---|---|---|---|---|---|---|---|---|---|---|
| 2 | Protein | 11726 | 12095 | 12464 | 12833 | 13940 | 14309 | 14678 | 15047 | 15416 | 15785 |
| 3 | cds | 11727- | 12096- | 12465- | 12834- | 13941- | 14310- | 14679- | 15048- | 15417- | 15786- |
| | | 11734, | 12103, | 12472, | 12841, | 13948, | 14317, | 14686, | 15055, | 15424, | 15793, |
| | | 21389 | 21390 | 21391 | 21392 | 21395 | 21396 | 21397 | 21398 | 21399 | 21400 |
| 4 | mRNA | 11735- | 12104- | 12473- | 12842- | 13949- | 14318- | 14687- | 15056- | 15425- | 15794- |
| | Design a-1 | 11742, | 12111, | 12480, | 12849, | 13956, | 14325, | 14694, | 15063, | 15432, | 15801, |
| | | 21489, | 21491, | 21493- | 21496- | 21505- | 21508- | 21511- | 21514- | 21517- | 21520- |
| | | 21490, | 21492, | 21495, | 21498, | 21507, | 21510, | 21513, | 21516, | 21519, | 21522, |
| | | 21635, | 21637, | 21639- | 21642- | 21651- | 21654- | 21657- | 21660- | 21663- | 21666- |
| | | 21636 | 21638 | 21641 | 21644 | 21653 | 21656 | 21659 | 21662 | 21665 | 21668 |
| 5 | mRNA | 11743- | 12112- | 12481- | 12850- | 13957- | 14326- | 14695- | 15064- | 15433- | 15802- |
| | Design a-2 | 11750 | 12119 | 12488 | 12857 | 13964 | 14333 | 14702 | 15071 | 15440 | 15809 |
| 6 | mRNA | 11751- | 12120- | 12489- | 12858- | 13965- | 14334- | 14703- | 15072- | 15441- | 15810- |
| | Design a-3 | 11758 | 12127 | 12496 | 12865 | 13972 | 14341 | 14710 | 15079 | 15448 | 15817 |
| 7 | mRNA | 11759- | 12128- | 12497- | 12866- | 13973- | 14342- | 14711- | 15080- | 15449- | 15818- |
| | Design a-4 | 11766 | 12135 | 12504 | 12873 | 13980 | 14349 | 14718 | 15087 | 15456 | 15825 |
| 8 | mRNA | 11767- | 12136- | 12505- | 12874- | 13981- | 14350- | 14719- | 15088- | 15457- | 15826- |
| | Design a-5 | 11774 | 12143 | 12512 | 12881 | 13988 | 14357 | 14726 | 15095 | 15464 | 15833 |
| 9 | mRNA | 11775- | 12144- | 12513- | 12882- | 13989- | 14358- | 14727- | 15096- | 15465- | 15834- |
| | Design b-1 | 11782 | 12151 | 12520 | 12889 | 13996 | 14365 | 14734 | 15103 | 15472 | 15841 |
| 10 | mRNA | 11783- | 12152- | 12521- | 12890- | 13997- | 14366- | 14735- | 15104- | 15473- | 15842- |
| | Design b-2 | 11790 | 12159 | 12528 | 12897 | 14004 | 14373 | 14742 | 15111 | 15480 | 15849 |
| 11 | mRNA | 11791- | 12160- | 12529- | 12898- | 14005- | 14374- | 14743- | 15112- | 15481- | 15850- |
| | Design b-3 | 11798 | 12167 | 12536 | 12905 | 14012 | 14381 | 14750 | 15119 | 15488 | 15857 |
| 12 | mRNA | 11799- | 12168- | 12537- | 12906- | 14013- | 14382- | 14751- | 15120- | 15489- | 15858- |
| | Design b-4 | 11806 | 12175 | 12544 | 12913 | 14020 | 14389 | 14758 | 15127 | 15496 | 15865 |
| 13 | mRNA | 11807- | 12176- | 12545- | 12914- | 14021- | 14390- | 14759- | 15128- | 15497- | 15866- |
| | Design b-5 | 11814 | 12183 | 12552 | 12921 | 14028 | 14397 | 14766 | 15135 | 15504 | 15873 |
| 14 | mRNA | 11815- | 12184- | 12553- | 12922- | 14029- | 14398- | 14767- | 15136- | 15505- | 15874- |
| | Design c-1 | 11822 | 12191 | 12560 | 12929 | 14036 | 14405 | 14774 | 15143 | 15512 | 15881 |
| 15 | mRNA | 11823- | 12192- | 12561- | 12930- | 14037- | 14406- | 14775- | 15144- | 15513- | 15882- |
| | Design c-2 | 11830 | 12199 | 12568 | 12937 | 14044 | 14413 | 14782 | 15151 | 15520 | 15889 |
| 16 | mRNA | 11831- | 12200- | 12569- | 12938- | 14045- | 14414- | 14783- | 15152- | 15521- | 15890- |
| | Design c-3 | 11838 | 12207 | 12576 | 12945 | 14052 | 14421 | 14790 | 15159 | 15528 | 15897 |
| 17 | mRNA | 11839- | 12208- | 12577- | 12946- | 14053- | 14422- | 14791- | 15160- | 15529- | 15898- |
| | Design c-4 | 11846 | 12215 | 12584 | 12953 | 14060 | 14429 | 14798 | 15167 | 15536 | 15905 |
| 18 | mRNA | 11847- | 12216- | 12585- | 12954- | 14061- | 14430- | 14799- | 15168- | 15537- | 15906- |
| | Design c-5 | 11854 | 12223 | 12592 | 12961 | 14068 | 14437 | 14806 | 15175 | 15544 | 15913 |
| 19 | mRNA | 11855- | 12224- | 12593- | 12962- | 14069- | 14438- | 14807- | 15176- | 15545- | 15914- |
| | Design d-1 | 11862 | 12231 | 12600 | 12969 | 14076 | 14445 | 14814 | 15183 | 15552 | 15921 |
| 20 | mRNA | 11863- | 12232- | 12601- | 12970- | 14077- | 14446- | 14815- | 15184- | 15553- | 15922- |
| | Design d-2 | 11870 | 12239 | 12608 | 12977 | 14084 | 14453 | 14822 | 15191 | 15560 | 15929 |
| 21 | mRNA | 11871- | 12240- | 12609- | 12978- | 14085- | 14454- | 14823- | 15192- | 15561- | 15930- |
| | Design d-3 | 11878 | 12247 | 12616 | 12985 | 14092 | 14461 | 14830 | 15199 | 15568 | 15937 |
| 22 | mRNA | 11879- | 12248- | 12617- | 12986- | 14093- | 14462- | 14831- | 15200- | 15569- | 15938- |
| | Design d-4 | 11886 | 12255 | 12624 | 12993 | 14100 | 14469 | 14838 | 15207 | 15576 | 15945 |
| 23 | mRNA | 11887- | 12256- | 12625- | 12994- | 14101- | 14470- | 14839- | 15208- | 15577- | 15946- |
| | Design d-5 | 11894 | 12263 | 12632 | 13001 | 14108 | 14477 | 14846 | 15215 | 15584 | 15953 |
| 24 | mRNA | 11895- | 12264- | 12633- | 13002- | 14109- | 14478- | 14847- | 15216- | 15585- | 15954- |
| | Design e-1 | 11902 | 12271 | 12640 | 13009 | 14116 | 14485 | 14854 | 15223 | 15592 | 15961 |
| 25 | mRNA | 11903- | 12272- | 12641- | 13010- | 14117- | 14486- | 14855- | 15224- | 15593- | 15962- |
| | Design e-2 | 11910 | 12279 | 12648 | 13017 | 14124 | 14493 | 14862 | 15231 | 15600 | 15969 |
| 26 | mRNA | 11911- | 12280- | 12649- | 13018- | 14125- | 14494- | 14863- | 15232- | 15601- | 15970- |
| | Design e-3 | 11918 | 12287 | 12656 | 13025 | 14132 | 14501 | 14870 | 15239 | 15608 | 15977 |
| 27 | mRNA | 11919- | 12288- | 12657- | 13026- | 14133- | 14502- | 14871- | 15240- | 15609- | 15978- |
| | Design e-4 | 11926 | 12295 | 12664 | 13033 | 14140 | 14509 | 14878 | 15247 | 15616 | 15985 |
| 28 | mRNA | 11927- | 12296- | 12665- | 13034- | 14141- | 14510- | 14879- | 15248- | 15617- | 15986- |
| | Design e-5 | 11934 | 12303 | 12672 | 13041 | 14148 | 14517 | 14886 | 15255 | 15624 | 15993 |
| 29 | mRNA | 11935- | 12304- | 12673- | 13042- | 14149- | 14518- | 14887- | 15256- | 15625- | 15994- |
| | Design e-6 | 11942 | 12311 | 12680 | 13049 | 14156 | 14525 | 14894 | 15263 | 15632 | 16001 |
| 30 | mRNA | 11943- | 12312- | 12681- | 13050- | 14157- | 14526- | 14895- | 15264- | 15633- | 16002- |
| | Design f-1 | 11950 | 12319 | 12688 | 13057 | 14164 | 14533 | 14902 | 15271 | 15640 | 16009 |
| 31 | mRNA | 11951- | 12320- | 12689- | 13058- | 14165- | 14534- | 14903- | 15272- | 15641- | 16010- |
| | Design f-2 | 11958 | 12327 | 12696 | 13065 | 14172 | 14541 | 14910 | 15279 | 15648 | 16017 |
| 32 | mRNA | 11959- | 12328- | 12697- | 13066- | 14173- | 14542- | 14911- | 15280- | 15649- | 16018- |
| | Design f-3 | 11966 | 12335 | 12704 | 13073 | 14180 | 14549 | 14918 | 15287 | 15656 | 16025 |
| 33 | mRNA | 11967- | 12336- | 12705- | 13074- | 14181- | 14550- | 14919- | 15288- | 15657- | 16026- |
| | Design f-4 | 11974 | 12343 | 12712 | 13081 | 14188 | 14557 | 14926 | 15295 | 15664 | 16033 |
| 34 | mRNA | 11975- | 12344- | 12713- | 13082- | 14189- | 14558- | 14927- | 15296- | 15665- | 16034- |
| | Design f-5 | 11982 | 12351 | 12720 | 13089 | 14196 | 14565 | 14934 | 15303 | 15672 | 16041 |
| 35 | mRNA | 11983- | 12352- | 12721- | 13090- | 14197- | 14566- | 14935- | 15304- | 15673- | 16042- |
| | Design g-1 | 11990 | 12359 | 12728 | 13097 | 14204 | 14573 | 14942 | 15311 | 15680 | 16049 |
| 36 | mRNA | 11991- | 12360- | 12729- | 13098- | 14205- | 14574- | 14943- | 15312- | 15681- | 16050- |
| | Design g-2 | 11998 | 12367 | 12736 | 13105 | 14212 | 14581 | 14950 | 15319 | 15688 | 16057 |
| 37 | mRNA | 11999- | 12368- | 12737- | 13106- | 14213- | 14582- | 14951- | 15320- | 15689- | 16058- |
| | Design g-3 | 12006 | 12375 | 12744 | 13113 | 14220 | 14589 | 14958 | 15327 | 15696 | 16065 |
| 38 | mRNA | 12007- | 12376- | 12745- | 13114- | 14221- | 14590- | 14959- | 15328- | 15697- | 16066- |
| | Design g-4 | 12014 | 12383 | 12752 | 13121 | 14228 | 14597 | 14966 | 15335 | 15704 | 16073 |
| 39 | mRNA | 12015- | 12384- | 12753- | 13122- | 14229- | 14598- | 14967- | 15336- | 15705- | 16074- |
| | Design g-5 | 12022 | 12391 | 12760 | 13129 | 14236 | 14605 | 14974 | 15343 | 15712 | 16081 |
| 40 | mRNA | 12023- | 12392- | 12761- | 13130- | 14237- | 14606- | 14975- | 15344- | 15713- | 16082- |
| | Design h-1 | 12030 | 12399 | 12768 | 13137 | 14244 | 14613 | 14982 | 15351 | 15720 | 16089 |
| 41 | mRNA | 12031- | 12400- | 12769- | 13138- | 14245- | 14614- | 14983- | 15352- | 15721- | 16090- |
| | Design h-2 | 12038 | 12407 | 12776 | 13145 | 14252 | 14621 | 14990 | 15359 | 15728 | 16097 |
| 42 | mRNA | 12039- | 12408- | 12777- | 13146- | 14253- | 14622- | 14991- | 15360- | 15729- | 16098- |
| | Design h-3 | 12046 | 12415 | 12784 | 13153 | 14260 | 14629 | 14998 | 15367 | 15736 | 16105 |
| 43 | mRNA | 12047- | 12416- | 12785- | 13154- | 14261- | 14630- | 14999- | 15368- | 15737- | 16106- |
| | Design h-4 | 12054 | 12423 | 12792 | 13161 | 14268 | 14637 | 15006 | 15375 | 15744 | 16113 |
| 44 | mRNA | 12055- | 12424- | 12793- | 13162- | 14269- | 14638- | 15007- | 15376- | 15745- | 16114- |
| | Design h-5 | 12062 | 12431 | 12800 | 13169 | 14276 | 14645 | 15014 | 15383 | 15752 | 16121 |
| 45 | mRNA | 12063- | 12432- | 12801- | 13170- | 14277- | 14646- | 15015- | 15384- | 15753- | 16122- |
| | Design i-1 | 12070 | 12439 | 12808 | 13177 | 14284 | 14653 | 15022 | 15391 | 15760 | 16129 |
| 46 | mRNA | 12071- | 12440- | 12809- | 13178- | 14285- | 14654- | 15023- | 15392- | 15761- | 16130- |
| | Design i-2 | 12086 | 12455 | 12824 | 13193 | 14300 | 14669 | 15038 | 15407 | 15776 | 16145 |
| 47 | mRNA | 12087- | 12456- | 12825- | 13194- | 14301- | 14670- | 15039- | 15408- | 15777- | 16146- |
| | Design i-3 | 12094 | 12463 | 12832 | 13201 | 14308 | 14677 | 15046 | 15415 | 15784 | 16153 |

[0402] In Table 6A and 6B, the protein designs are indicated in row 1. Therein, Columns K to V represent specific suitable constructs of the invention derived from RSV Fusion (F) protein, wherein Column K provides suitable sequences for F_DSCav1_mut0, Column L provides suitable sequences for F-del_DSCav1_mut0, Column M provides suitable sequences for F_DSCav1_mut4, Column N provides suitable sequences for F-del_DSCav1_mut4, Column O provides suitable sequences for F_DSCav1_mut5, Column P provides suitable sequences for F-del_DSCav1_mut5, Column Q provides suitable sequences for F_DSCav1_mut6, Column R provides suitable sequences for F-del_DSCav1_mut6, Column S provides suitable sequences for F_DSCav1_mut7, Column T provides suitable sequences for F-del_DSCav1_mut7, Column U provides suitable sequences for F_DSCav1_mut8, Column V provides suitable sequences for F-del_DSCav1_mut8.

[0403] The protein designs are indicated in the first row (Columns K to V), the specific protein SEQ ID NOs as provided in the sequence listing are in row 2, “PRT”. The SEQ ID NOs of corresponding coding sequences for each protein construct are provided in row 3, “cds” (compare with Table 4 for different cds optimizations). Further information e.g. regarding the type of codon modified coding sequence (opt1, opt2, opt3, opt4, opt5, opt6, opt11 etc.) is provided in the <223> identifier of the respective SEQ ID NO in the sequence listing and in Table 4. The SEQ ID NOs of corresponding mRNA constructs comprising said coding sequences and suitable 3′-UTRs and 5′-UTRs according to the invention are provided in each following row (mRNA designs “a-1” to “i-3” as specified herein).

[0404] In Table 6A, mRNA sequences derived from HRSV(A2) are provided, in Table 6B mRNA sequences derived from HRSV(Memphis-37) are provided

[0405] Further information e.g. regarding the type of coding sequence (wt, opt1, opt2, opt3, opt4, opt5, opt6, opt11 etc.) comprised in the mRNA constructs is provided in the <223> identifier of the respective SEQ ID NO in the sequence listing.

TABLE 6A
Preferred mRNA constructs encoding RSV F (column K-V), derived from HRSV(A2)

| | K | L | M | N | O | P | Q | R | S | T | U | V |
|---|---|---|---|---|---|---|---|---|---|---|---|---|
| PRT | 3850 | 4219 | 4588 | 4957 | 5326 | 5695 | 6064 | 6433 | 6802 | 7171 | 7540 | 7909 |
| cds | 3851- | 4220- | 4589- | 4958- | 5327- | 5696- | 6065- | 6434- | 6803- | 7172- | 7541- | 7910- |
| | 3858, | 4227, | 4596, | 4965, | 5334, | 5703, | 6072, | 6441, | 6810, | 7179, | 7548, | 7917, |
| | 21367 | 21368 | 21375 | 21376 | 21377 | 21378 | 21379 | 21380 | 21381 | 21382 | 21383 | 21384 |
| a-1 | 3859- | 4228- | 4597- | 4966- | 5335- | 5704- | 6073- | 6442- | 6811- | 7180- | 7549- | 7918- |
| | 3866, | 4235, | 4604, | 4973, | 5342, | 5711, | 6080, | 6449, | 6818, | 7187, | 7556, | 7925, |
| | 21427- | 21430- | 21451- | 21454- | 21457- | 21460- | 21463- | 21466- | 21469- | 21472- | 21475- | 21478- |
| | 21429, | 21432, | 21453, | 21456, | 21459, | 21462, | 21465, | 21468, | 21471, | 21474, | 21477, | 21480, |
| | 21573- | 21576- | 21597- | 21600- | 21603- | 21606- | 21609- | 21612- | 21615- | 21618- | 21621- | 21624- |
| | 21575 | 21578 | 21599 | 21602 | 21605 | 21608 | 21611 | 21614 | 21617 | 21620 | 21623 | 21626 |
| a-2 | 3867- | 4236- | 4605- | 4974- | 5343- | 5712- | 6081- | 6450- | 6819- | 7188- | 7557- | 7926- |
| | 3874 | 4243 | 4612 | 4981 | 5350 | 5719 | 6088 | 6457 | 6826 | 7195 | 7564 | 7933 |
| a-3 | 3875- | 4244- | 4613- | 4982- | 5351- | 5720- | 6089- | 6458- | 6827- | 7196- | 7565- | 7934- |
| | 3882 | 4251 | 4620 | 4989 | 5358 | 5727 | 6096 | 6465 | 6834 | 7203 | 7572 | 7941 |
| a-4 | 3883- | 4252- | 4621- | 4990- | 5359- | 5728- | 6097- | 6466- | 6835- | 7204- | 7573- | 7942- |
| | 3890 | 4259 | 4628 | 4997 | 5366 | 5735 | 6104 | 6473 | 6842 | 7211 | 7580 | 7949 |
| a-5 | 3891- | 4260- | 4629- | 4998- | 5367- | 5736- | 6105- | 6474- | 6843- | 7212- | 7581- | 7950- |
| | 3898 | 4267 | 4636 | 5005 | 5374 | 5743 | 6112 | 6481 | 6850 | 7219 | 7588 | 7957 |
| b-1 | 3899- | 4268- | 4637- | 5006- | 5375- | 5744- | 6113- | 6482- | 6851- | 7220- | 7589- | 7958- |
| | 3906 | 4275 | 4644 | 5013 | 5382 | 5751 | 6120 | 6489 | 6858 | 7227 | 7596 | 7965 |
| b-2 | 3907- | 4276- | 4645- | 5014- | 5383- | 5752- | 6121- | 6490- | 6859- | 7228- | 7597- | 7966- |
| | 3914 | 4283 | 4652 | 5021 | 5390 | 5759 | 6128 | 6497 | 6866 | 7235 | 7604 | 7973 |
| b-3 | 3915- | 4284- | 4653- | 5022- | 5391- | 5760- | 6129- | 6498- | 6867- | 7236- | 7605- | 7974- |
| | 3922 | 4291 | 4660 | 5029 | 5398 | 5767 | 6136 | 6505 | 6874 | 7243 | 7612 | 7981 |
| b-4 | 3923- | 4292- | 4661- | 5030- | 5399- | 5768- | 6137- | 6506- | 6875- | 7244- | 7613- | 7982- |
| | 3930 | 4299 | 4668 | 5037 | 5406 | 5775 | 6144 | 6513 | 6882 | 7251 | 7620 | 7989 |
| b-5 | 3931- | 4300- | 4669- | 5038- | 5407- | 5776- | 6145- | 6514- | 6883- | 7252- | 7621- | 7990- |
| | 3938 | 4307 | 4676 | 5045 | 5414 | 5783 | 6152 | 6521 | 6890 | 7259 | 7628 | 7997 |
| c-1 | 3939- | 4308- | 4677- | 5046- | 5415- | 5784- | 6153- | 6522- | 6891- | 7260- | 7629- | 7998- |
| | 3946 | 4315 | 4684 | 5053 | 5422 | 5791 | 6160 | 6529 | 6898 | 7267 | 7636 | 8005 |
| c-2 | 3947- | 4316- | 4685- | 5054- | 5423- | 5792- | 6161- | 6530- | 6899- | 7268- | 7637- | 8006- |
| | 3954 | 4323 | 4692 | 5061 | 5430 | 5799 | 6168 | 6537 | 6906 | 7275 | 7644 | 8013 |
| c-3 | 3955- | 4324- | 4693- | 5062- | 5431- | 5800- | 6169- | 6538- | 6907- | 7276- | 7645- | 8014- |
| | 3962 | 4331 | 4700 | 5069 | 5438 | 5807 | 6176 | 6545 | 6914 | 7283 | 7652 | 8021 |
| c-4 | 3963- | 4332- | 4701- | 5070- | 5439- | 5808- | 6177- | 6546- | 6915- | 7284- | 7653- | 8022- |
| | 3970 | 4339 | 4708 | 5077 | 5446 | 5815 | 6184 | 6553 | 6922 | 7291 | 7660 | 8029 |
| c-5 | 3971- | 4340- | 4709- | 5078- | 5447- | 5816- | 6185- | 6554- | 6923- | 7292- | 7661- | 8030- |
| | 3978 | 4347 | 4716 | 5085 | 5454 | 5823 | 6192 | 6561 | 6930 | 7299 | 7668 | 8037 |
| d-1 | 3979- | 4348- | 4717- | 5086- | 5455- | 5824- | 6193- | 6562- | 6931- | 7300- | 7669- | 8038- |
| | 3986 | 4355 | 4724 | 5093 | 5462 | 5831 | 6200 | 6569 | 6938 | 7307 | 7676 | 8045 |
| d-2 | 3987- | 4356- | 4725- | 5094- | 5463- | 5832- | 6201- | 6570- | 6939- | 7308- | 7677- | 8046- |
| | 3994 | 4363 | 4732 | 5101 | 5470 | 5839 | 6208 | 6577 | 6946 | 7315 | 7684 | 8053 |
| d-3 | 3995- | 4364- | 4733- | 5102- | 5471- | 5840- | 6209- | 6578- | 6947- | 7316- | 7685- | 8054- |
| | 4002 | 4371 | 4740 | 5109 | 5478 | 5847 | 6216 | 6585 | 6954 | 7323 | 7692 | 8061 |
| d-4 | 4003- | 4372- | 4741- | 5110- | 5479- | 5848- | 6217- | 6586- | 6955- | 7324- | 7693- | 8062- |
| | 4010 | 4379 | 4748 | 5117 | 5486 | 5855 | 6224 | 6593 | 6962 | 7331 | 7700 | 8069 |
| d-5 | 4011- | 4380- | 4749- | 5118- | 5487- | 5856- | 6225- | 6594- | 6963- | 7332- | 7701- | 8070- |
| | 4018 | 4387 | 4756 | 5125 | 5494 | 5863 | 6232 | 6601 | 6970 | 7339 | 7708 | 8077 |
| e-1 | 4019- | 4388- | 4757- | 5126- | 5495- | 5864- | 6233- | 6602- | 6971- | 7340- | 7709- | 8078- |
| | 4026 | 4395 | 4764 | 5133 | 5502 | 5871 | 6240 | 6609 | 6978 | 7347 | 7716 | 8085 |
| e-2 | 4027- | 4396- | 4765- | 5134- | 5503- | 5872- | 6241- | 6610- | 6979- | 7348- | 7717- | 8086- |
| | 4034 | 4403 | 4772 | 5141 | 5510 | 5879 | 6248 | 6617 | 6986 | 7355 | 7724 | 8093 |
| e-3 | 4035- | 4404- | 4773- | 5142- | 5511- | 5880- | 6249- | 6618- | 6987- | 7356- | 7725- | 8094- |
| | 4042 | 4411 | 4780 | 5149 | 5518 | 5887 | 6256 | 6625 | 6994 | 7363 | 7732 | 8101 |
| e-4 | 4043- | 4412- | 4781- | 5150- | 5519- | 5888- | 6257- | 6626- | 6995- | 7364- | 7733- | 8102- |
| | 4050 | 4419 | 4788 | 5157 | 5526 | 5895 | 6264 | 6633 | 7002 | 7371 | 7740 | 8109 |
| e-5 | 4051- | 4420- | 4789- | 5158- | 5527- | 5896- | 6265- | 6634- | 7003- | 7372- | 7741- | 8110- |
| | 4058 | 4427 | 4796 | 5165 | 5534 | 5903 | 6272 | 6641 | 7010 | 7379 | 7748 | 8117 |
| e-6 | 4059- | 4428- | 4797- | 5166- | 5535- | 5904- | 6273- | 6642- | 7011- | 7380- | 7749- | 8118- |
| | 4066 | 4435 | 4804 | 5173 | 5542 | 5911 | 6280 | 6649 | 7018 | 7387 | 7756 | 8125 |
| f-1 | 4067- | 4436- | 4805- | 5174- | 5543- | 5912- | 6281- | 6650- | 7019- | 7388- | 7757- | 8126- |
| | 4074 | 4443 | 4812 | 5181 | 5550 | 5919 | 6288 | 6657 | 7026 | 7395 | 7764 | 8133 |
| f-2 | 4075- | 4444- | 4813- | 5182- | 5551- | 5920- | 6289- | 6658- | 7027- | 7396- | 7765- | 8134- |
| | 4082 | 4451 | 4820 | 5189 | 5558 | 5927 | 6296 | 6665 | 7034 | 7403 | 7772 | 8141 |
| f-3 | 4083- | 4452- | 4821- | 5190- | 5559- | 5928- | 6297- | 6666- | 7035- | 7404- | 7773- | 8142- |
| | 4090 | 4459 | 4828 | 5197 | 5566 | 5935 | 6304 | 6673 | 7042 | 7411 | 7780 | 8149 |
| f-4 | 4091- | 4460- | 4829- | 5198- | 5567- | 5936- | 6305- | 6674- | 7043- | 7412- | 7781- | 8150- |
| | 4098 | 4467 | 4836 | 5205 | 5574 | 5943 | 6312 | 6681 | 7050 | 7419 | 7788 | 8157 |
| f-5 | 4099- | 4468- | 4837- | 5206- | 5575- | 5944- | 6313- | 6682- | 7051- | 7420- | 7789- | 8158- |
| | 4106 | 4475 | 4844 | 5213 | 5582 | 5951 | 6320 | 6689 | 7058 | 7427 | 7796 | 8165 |
| g-1 | 4107- | 4476- | 4845- | 5214- | 5583- | 5952- | 6321- | 6690- | 7059- | 7428- | 7797- | 8166- |
| | 4114 | 4483 | 4852 | 5221 | 5590 | 5959 | 6328 | 6697 | 7066 | 7435 | 7804 | 8173 |
| g-2 | 4115- | 4484- | 4853- | 5222- | 5591- | 5960- | 6329- | 6698- | 7067- | 7436- | 7805- | 8174- |
| | 4122 | 4491 | 4860 | 5229 | 5598 | 5967 | 6336 | 6705 | 7074 | 7443 | 7812 | 8181 |
| g-3 | 4123- | 4492- | 4861- | 5230- | 5599- | 5968- | 6337- | 6706- | 7075- | 7444- | 7813- | 8182- |
| | 4130 | 4499 | 4868 | 5237 | 5606 | 5975 | 6344 | 6713 | 7082 | 7451 | 7820 | 8189 |
| g-4 | 4131- | 4500- | 4869- | 5238- | 5607- | 5976- | 6345- | 6714- | 7083- | 7452- | 7821- | 8190- |
| | 4138 | 4507 | 4876 | 5245 | 5614 | 5983 | 6352 | 6721 | 7090 | 7459 | 7828 | 8197 |
| g-5 | 4139- | 4508- | 4877- | 5246- | 5615- | 5984- | 6353- | 6722- | 7091- | 7460- | 7829- | 8198- |
| | 4146 | 4515 | 4884 | 5253 | 5622 | 5991 | 6360 | 6729 | 7098 | 7467 | 7836 | 8205 |
| h-1 | 4147- | 4516- | 4885- | 5254- | 5623- | 5992- | 6361- | 6730- | 7099- | 7468- | 7837- | 8206- |
| | 4154 | 4523 | 4892 | 5261 | 5630 | 5999 | 6368 | 6737 | 7106 | 7475 | 7844 | 8213 |
| h-2 | 4155- | 4524- | 4893- | 5262- | 5631- | 6000- | 6369- | 6738- | 7107- | 7476- | 7845- | 8214- |
| | 4162 | 4531 | 4900 | 5269 | 5638 | 6007 | 6376 | 6745 | 7114 | 7483 | 7852 | 8221 |
| h-3 | 4163- | 4532- | 4901- | 5270- | 5639- | 6008- | 6377- | 6746- | 7115- | 7484- | 7853- | 8222- |
| | 4170 | 4539 | 4908 | 5277 | 5646 | 6015 | 6384 | 6753 | 7122 | 7491 | 7860 | 8229 |
| h-4 | 4171- | 4540- | 4909- | 5278- | 5647- | 6016- | 6385- | 6754- | 7123- | 7492- | 7861- | 8230- |
| | 4178 | 4547 | 4916 | 5285 | 5654 | 6023 | 6392 | 6761 | 7130 | 7499 | 7868 | 8237 |
| h-5 | 4179- | 4548- | 4917- | 5286- | 5655- | 6024- | 6393- | 6762- | 7131- | 7500- | 7869- | 8238- |
| | 4186 | 4555 | 4924 | 5293 | 5662 | 6031 | 6400 | 6769 | 7138 | 7507 | 7876 | 8245 |
| i-1 | 4187- | 4556- | 4925- | 5294- | 5663- | 6032- | 6401- | 6770- | 7139- | 7508- | 7877- | 8246- |
| | 4194 | 4563 | 4932 | 5301 | 5670 | 6039 | 6408 | 6777 | 7146 | 7515 | 7884 | 8253 |
| i-2 | 4195- | 4564- | 4933- | 5302- | 5671- | 6040- | 6409- | 6778- | 7147- | 7516- | 7885- | 8254- |
| | 4210 | 4579 | 4948 | 5317 | 5686 | 6055 | 6424 | 6793 | 7162 | 7531 | 7900 | 8269 |
| i-3 | 4211- | 4580- | 4949- | 5318- | 5687- | 6056- | 6425- | 6794- | 7163- | 7532- | 7901- | 8270- |
| | 4218 | 4587 | 4956 | 5325 | 5694 | 6063 | 6432 | 6801 | 7170 | 7539 | 7908 | 8277 |

TABLE 6B
Preferred mRNA constructs encoding RSV F (column K-V), derived from HRSV(Memphis-37)

| | K | L | M | N | O | P | Q | R | S | T | U | V |
|---|---|---|---|---|---|---|---|---|---|---|---|---|
| PRT | 13202 | 13571 | 16154 | 16523 | 16892 | 17261 | 17630 | 17999 | 18368 | 18737 | 19106 | 19475 |
| cds | 13203- | 13572- | 16155- | 16524- | 16893- | 17262- | 17631- | 18000- | 18369- | 18738- | 19107- | 19476- |
| | 13210, | 13579, | 16162, | 16531, | 16900, | 17269, | 17638, | 18007, | 18376, | 18745, | 19114, | 19483, |
| | 21393 | 21394 | 21401 | 21402 | 21403 | 21404 | 21405 | 21406 | 21407 | 21408 | 21409 | 21410 |
| a-1 | 13211- | 13580- | 16163- | 16532- | 16901- | 17270- | 17639- | 18008- | 18377- | 18746- | 19115- | 19484- |
| | 13218, | 13587, | 16170, | 16539, | 16908, | 17277, | 17646, | 18015, | 18384, | 18753, | 19122, | 19491, |
| | 21499- | 21502- | 21523- | 21526- | 21529- | 21532- | 21535- | 21538- | 21541- | 21544- | 21547- | 21550- |
| | 21501, | 21504, | 21525, | 21528, | 21531, | 21534, | 21537, | 21540, | 21543, | 21546, | 21549, | 21552, |
| | 21645- | 21648- | 21669- | 21672- | 21675- | 21678- | 21681- | 21684- | 21687- | 21690- | 21693- | 21696- |
| | 21647 | 21650 | 21671 | 21674 | 21677 | 21680 | 21683 | 21686 | 21689 | 21692 | 21695 | 21698 |
| a-2 | 13219- | 13588- | 16171- | 16540- | 16909- | 17278- | 17647- | 18016- | 18385- | 18754- | 19123- | 19492- |
| | 13226 | 13595 | 16178 | 16547 | 16916 | 17285 | 17654 | 18023 | 18392 | 18761 | 19130 | 19499 |
| a-3 | 13227- | 13596- | 16179- | 16548- | 16917- | 17286- | 17655- | 18024- | 18393- | 18762- | 19131- | 19500- |
| | 13234 | 13603 | 16186 | 16555 | 16924 | 17293 | 17662 | 18031 | 18400 | 18769 | 19138 | 19507 |
| a-4 | 13235- | 13604- | 16187- | 16556- | 16925- | 17294- | 17663- | 18032- | 18401- | 18770- | 19139- | 19508- |
| | 13242 | 13611 | 16194 | 16563 | 16932 | 17301 | 17670 | 18039 | 18408 | 18777 | 19146 | 19515 |
| a-5 | 13243- | 13612- | 16195- | 16564- | 16933- | 17302- | 17671- | 18040- | 18409- | 18778- | 19147- | 19516- |
| | 13250 | 13619 | 16202 | 16571 | 16940 | 17309 | 17678 | 18047 | 18416 | 18785 | 19154 | 19523 |
| b-1 | 13251- | 13620- | 16203- | 16572- | 16941- | 17310- | 17679- | 18048- | 18417- | 18786- | 19155- | 19524- |
| | 13258 | 13627 | 16210 | 16579 | 16948 | 17317 | 17686 | 18055 | 18424 | 18793 | 19162 | 19531 |
| b-2 | 13259- | 13628- | 16211- | 16580- | 16949- | 17318- | 17687- | 18056- | 18425- | 18794- | 19163- | 19532- |
| | 13266 | 13635 | 16218 | 16587 | 16956 | 17325 | 17694 | 18063 | 18432 | 18801 | 19170 | 19539 |
| b-3 | 13267- | 13636- | 16219- | 16588- | 16957- | 17326- | 17695- | 18064- | 18433- | 18802- | 19171- | 19540- |
| | 13274 | 13643 | 16226 | 16595 | 16964 | 17333 | 17702 | 18071 | 18440 | 18809 | 19178 | 19547 |
| b-4 | 13275- | 13644- | 16227- | 16596- | 16965- | 17334- | 17703- | 18072- | 18441- | 18810- | 19179- | 19548- |
| | 13282 | 13651 | 16234 | 16603 | 16972 | 17341 | 17710 | 18079 | 18448 | 18817 | 19186 | 19555 |
| b-5 | 13283- | 13652- | 16235- | 16604- | 16973- | 17342- | 17711- | 18080- | 18449- | 18818- | 19187- | 19556- |
| | 13290 | 13659 | 16242 | 16611 | 16980 | 17349 | 17718 | 18087 | 18456 | 18825 | 19194 | 19563 |
| c-1 | 13291- | 13660- | 16243- | 16612- | 16981- | 17350- | 17719- | 18088- | 18457- | 18826- | 19195- | 19564- |
| | 13298 | 13667 | 16250 | 16619 | 16988 | 17357 | 17726 | 18095 | 18464 | 18833 | 19202 | 19571 |
| c-2 | 13299- | 13668- | 16251- | 16620- | 16989- | 17358- | 17727- | 18096- | 18465- | 18834- | 19203- | 19572- |
| | 13306 | 13675 | 16258 | 16627 | 16996 | 17365 | 17734 | 18103 | 18472 | 18841 | 19210 | 19579 |
| c-3 | 13307- | 13676- | 16259- | 16628- | 16997- | 17366- | 17735- | 18104- | 18473- | 18842- | 19211- | 19580- |
| | 13314 | 13683 | 16266 | 16635 | 17004 | 17373 | 17742 | 18111 | 18480 | 18849 | 19218 | 19587 |
| c-4 | 13315- | 13684- | 16267- | 16636- | 17005- | 17374- | 17743- | 18112- | 18481- | 18850- | 19219- | 19588- |
| | 13322 | 13691 | 16274 | 16643 | 17012 | 17381 | 17750 | 18119 | 18488 | 18857 | 19226 | 19595 |
| c-5 | 13323- | 13692- | 16275- | 16644- | 17013- | 17382- | 17751- | 18120- | 18489- | 18858- | 19227- | 19596- |
| | 13330 | 13699 | 16282 | 16651 | 17020 | 17389 | 17758 | 18127 | 18496 | 18865 | 19234 | 19603 |
| d-1 | 13331- | 13700- | 16283- | 16652- | 17021- | 17390- | 17759- | 18128- | 18497- | 18866- | 19235- | 19604- |
| | 13338 | 13707 | 16290 | 16659 | 17028 | 17397 | 17766 | 18135 | 18504 | 18873 | 19242 | 19611 |
| d-2 | 13339- | 13708- | 16291- | 16660- | 17029- | 17398- | 17767- | 18136- | 18505- | 18874- | 19243- | 19612- |
| | 13346 | 13715 | 16298 | 16667 | 17036 | 17405 | 17774 | 18143 | 18512 | 18881 | 19250 | 19619 |
| d-3 | 13347- | 13716- | 16299- | 16668- | 17037- | 17406- | 17775- | 18144- | 18513- | 18882- | 19251- | 19620- |
| | 13354 | 13723 | 16306 | 16675 | 17044 | 17413 | 17782 | 18151 | 18520 | 18889 | 19258 | 19627 |
| d-4 | 13355- | 13724- | 16307- | 16676- | 17045- | 17414- | 17783- | 18152- | 18521- | 18890- | 19259- | 19628- |
| | 13362 | 13731 | 16314 | 16683 | 17052 | 17421 | 17790 | 18159 | 18528 | 18897 | 19266 | 19635 |
| d-5 | 13363- | 13732- | 16315- | 16684- | 17053- | 17422- | 17791- | 18160- | 18529- | 18898- | 19267- | 19636- |
| | 13370 | 13739 | 16322 | 16691 | 17060 | 17429 | 17798 | 18167 | 18536 | 18905 | 19274 | 19643 |
| e-1 | 13371- | 13740- | 16323- | 16692- | 17061- | 17430- | 17799- | 18168- | 18537- | 18906- | 19275- | 19644- |
| | 13378 | 13747 | 16330 | 16699 | 17068 | 17437 | 17806 | 18175 | 18544 | 18913 | 19282 | 19651 |
| e-2 | 13379- | 13748- | 16331- | 16700- | 17069- | 17438- | 17807- | 18176- | 18545- | 18914- | 19283- | 19652- |
| | 13386 | 13755 | 16338 | 16707 | 17076 | 17445 | 17814 | 18183 | 18552 | 18921 | 19290 | 19659 |
| e-3 | 13387- | 13756- | 16339- | 16708- | 17077- | 17446- | 17815- | 18184- | 18553- | 18922- | 19291- | 19660- |
| | 13394 | 13763 | 16346 | 16715 | 17084 | 17453 | 17822 | 18191 | 18560 | 18929 | 19298 | 19667 |
| e-4 | 13395- | 13764- | 16347- | 16716- | 17085- | 17454- | 17823- | 18192- | 18561- | 18930- | 19299- | 19668- |
| | 13402 | 13771 | 16354 | 16723 | 17092 | 17461 | 17830 | 18199 | 18568 | 18937 | 19306 | 19675 |
| e-5 | 13403- | 13772- | 16355- | 16724- | 17093- | 17462- | 17831- | 18200- | 18569- | 18938- | 19307- | 19676- |
| | 13410 | 13779 | 16362 | 16731 | 17100 | 17469 | 17838 | 18207 | 18576 | 18945 | 19314 | 19683 |
| e-6 | 13411- | 13780- | 16363- | 16732- | 17101- | 17470- | 17839- | 18208- | 18577- | 18946- | 19315- | 19684- |
| | 13418 | 13787 | 16370 | 16739 | 17108 | 17477 | 17846 | 18215 | 18584 | 18953 | 19322 | 19691 |
| f-1 | 13419- | 13788- | 16371- | 16740- | 17109- | 17478- | 17847- | 18216- | 18585- | 18954- | 19323- | 19692- |
| | 13426 | 13795 | 16378 | 16747 | 17116 | 17485 | 17854 | 18223 | 18592 | 18961 | 19330 | 19699 |
| f-2 | 13427- | 13796- | 16379- | 16748- | 17117- | 17486- | 17855- | 18224- | 18593- | 18962- | 19331- | 19700- |
| | 13434 | 13803 | 16386 | 16755 | 17124 | 17493 | 17862 | 18231 | 18600 | 18969 | 19338 | 19707 |
| f-3 | 13435- | 13804- | 16387- | 16756- | 17125- | 17494- | 17863- | 18232- | 18601- | 18970- | 19339- | 19708- |
| | 13442 | 13811 | 16394 | 16763 | 17132 | 17501 | 17870 | 18239 | 18608 | 18977 | 19346 | 19715 |
| f-4 | 13443- | 13812- | 16395- | 16764- | 17133- | 17502- | 17871- | 18240- | 18609- | 18978- | 19347- | 19716- |
| | 13450 | 13819 | 16402 | 16771 | 17140 | 17509 | 17878 | 18247 | 18616 | 18985 | 19354 | 19723 |
| f-5 | 13451- | 13820- | 16403- | 16772- | 17141- | 17510- | 17879- | 18248- | 18617- | 18986- | 19355- | 19724- |
| | 13458 | 13827 | 16410 | 16779 | 17148 | 17517 | 17886 | 18255 | 18624 | 18993 | 19362 | 19731 |
| g-1 | 13459- | 13828- | 16411- | 16780- | 17149- | 17518- | 17887- | 18256- | 18625- | 18994- | 19363- | 19732- |
| | 13466 | 13835 | 16418 | 16787 | 17156 | 17525 | 17894 | 18263 | 18632 | 19001 | 19370 | 19739 |
| g-2 | 13467- | 13836- | 16419- | 16788- | 17157- | 17526- | 17895- | 18264- | 18633- | 19002- | 19371- | 19740- |
| | 13474 | 13843 | 16426 | 16795 | 17164 | 17533 | 17902 | 18271 | 18640 | 19009 | 19378 | 19747 |
| g-3 | 13475- | 13844- | 16427- | 16796- | 17165- | 17534- | 17903- | 18272- | 18641- | 19010- | 19379- | 19748- |
| | 13482 | 13851 | 16434 | 16803 | 17172 | 17541 | 17910 | 18279 | 18648 | 19017 | 19386 | 19755 |
| g-4 | 13483- | 13852- | 16435- | 16804- | 17173- | 17542- | 17911- | 18280- | 18649- | 19018- | 19387- | 19756- |
| | 13490 | 13859 | 16442 | 16811 | 17180 | 17549 | 17918 | 18287 | 18656 | 19025 | 19394 | 19763 |
| g-5 | 13491- | 13860- | 16443- | 16812- | 17181- | 17550- | 17919- | 18288- | 18657- | 19026- | 19395- | 19764- |
| | 13498 | 13867 | 16450 | 16819 | 17188 | 17557 | 17926 | 18295 | 18664 | 19033 | 19402 | 19771 |
| h-1 | 13499- | 13868- | 16451- | 16820- | 17189- | 17558- | 17927- | 18296- | 18665- | 19034- | 19403- | 19772- |
| | 13506 | 13875 | 16458 | 16827 | 17196 | 17565 | 17934 | 18303 | 18672 | 19041 | 19410 | 19779 |
| h-2 | 13507- | 13876- | 16459- | 16828- | 17197- | 17566- | 17935- | 18304- | 18673- | 19042- | 19411- | 19780- |
| | 13514 | 13883 | 16466 | 16835 | 17204 | 17573 | 17942 | 18311 | 18680 | 19049 | 19418 | 19787 |
| h-3 | 13515- | 13884- | 16467- | 16836- | 17205- | 17574- | 17943- | 18312- | 18681- | 19050- | 19419- | 19788- |
| | 13522 | 13891 | 16474 | 16843 | 17212 | 17581 | 17950 | 18319 | 18688 | 19057 | 19426 | 19795 |
| h-4 | 13523- | 13892- | 16475- | 16844- | 17213- | 17582- | 17951- | 18320- | 18689- | 19058- | 19427- | 19796- |
| | 13530 | 13899 | 16482 | 16851 | 17220 | 17589 | 17958 | 18327 | 18696 | 19065 | 19434 | 19803 |
| h-5 | 13531- | 13900- | 16483- | 16852- | 17221- | 17590- | 17959- | 18328- | 18697- | 19066- | 19435- | 19804- |
| | 13538 | 13907 | 16490 | 16859 | 17228 | 17597 | 17966 | 18335 | 18704 | 19073 | 19442 | 19811 |
| i-1 | 13539- | 13908- | 16491- | 16860- | 17229- | 17598- | 17967- | 18336- | 18705- | 19074- | 19443- | 19812- |
| | 13546 | 13915 | 16498 | 16867 | 17236 | 17605 | 17974 | 18343 | 18712 | 19081 | 19450 | 19819 |
| i-2 | 13547- | 13916- | 16499- | 16868- | 17237- | 17606- | 17975- | 18344- | 18713- | 19082- | 19451- | 19820- |
| | 13562 | 13931 | 16514 | 16883 | 17252 | 17621 | 17990 | 18359 | 18728 | 19097 | 19466 | 19835 |
| i-3 | 13563- | 13932- | 16515- | 16884- | 17253- | 17622- | 17991- | 18360- | 18729- | 19098- | 19467- | 19836- |
| | 13570 | 13939 | 16522 | 16891 | 17260 | 17629 | 17998 | 18367 | 18736 | 19105 | 19474 | 19843 |

[0406] In preferred embodiments, the artificial RNA comprises or consists of an RNA sequence which is identical or at least 70%, 80%, 85%, 86%, 87%, 88%, 89%, 90%, 91%, 92%, 93%, 94%, 95%, 96%, 97%, 98%, or 99% identical to a nucleic acid sequence selected from the group consisting of Seq ID NOs: 78-482, 493-897, 907-1266, 1276-1635, 1645-2004, 2014-2373, 2383-2742, 2752-3111, 3121-3480, 3490-3849, 3859-4218, 4228-4587, 4597-4956, 4966-5325, 5335-5694, 5704-6063, 6073-6432, 6442-6801, 6811-7170, 7180-7539, 7549-7908, 7918-8277, 8278, 21415-21480, 21561-21626, 11735-12094, 12104-12463, 12473-12832, 12842-13201, 13949-14308, 14318-14677, 14687-15046, 15056-15415, 15425-15784, 15794-16153, 13211-13570, 13580-13939, 16163-16522, 16532-16891, 16901-17260, 17270-17629, 17639-17998, 18008-18367, 18377-18736, 18746-19105, 19115-19474, 19484-19843, 21489-21552, 21635-21698 or a fragment or variant of any of these sequences, wherein, optionally, at least one or more than one, or wherein all uracil nucleotides are replaced by pseudouridine (ψ) nucleotides or N1-methylpseudouridine (m1ψ) nucleotides.

[0407] In preferred embodiments, the artificial RNA comprises (a) at least one heterologous 5′ untranslated region (5′-UTR) and/or at least one heterologous 3′ untranslated region (3′-UTR) and (b) at least one coding sequence operably linked to said 3′-UTR and/or 5′-UTR encoding at least one antigenic peptide or protein derived from a RSV F or a fragment or variant thereof, wherein
[0408] said artificial RNA comprises or consists of an RNA sequence which is identical or at least 70%, 80%, 85%, 86%, 87%, 88%, 89%, 90%, 91%, 92%, 93%, 94%, 95%, 96%, 97%, 98%, or 99% identical to a nucleic acid sequence selected from the group consisting of SEQ ID NOs: 78-482, 11735-12094, 21415-21417, 21561-21563, 21489, 21490, 21635, 21636 (encoding F0) or a fragment or variant of any of these sequences;
[0409] said artificial RNA comprises or consists of an RNA sequence which is identical or at least 70%, 80%, 85%, 86%, 87%, 88%, 89%, 90%, 91%, 92%, 93%, 94%, 95%, 96%, 97%, 98%, or 99% identical to a nucleic acid sequence selected from the group consisting of SEQ ID NOs: 493-897, 12104-12463, 21418-21420, 21564-21566, 21491, 21492, 21637, 21638 (encoding F-del) or a fragment or variant of any of these sequences;
[0410] said artificial RNA comprises or consists of an RNA sequence which is identical or at least 70%, 80%, 85%, 86%, 87%, 88%, 89%, 90%, 91%, 92%, 93%, 94%, 95%, 96%, 97%, 98%, or 99% identical to a nucleic acid sequence selected from the group consisting of SEQ ID NOs: 907-1266, 12473-12832, 21421-21423, 21567-21569, 21493-21495, 21639-21641 (encoding F0_DSCav1) or a fragment or variant of any of these sequences;
[0411] said artificial RNA comprises or consists of an RNA sequence which is identical or at least 70%, 80%, 85%, 86%, 87%, 88%, 89%, 90%, 91%, 92%, 93%, 94%, 95%, 96%, 97%, 98%, or 99% identical to a nucleic acid sequence selected from the group consisting of SEQ ID NOs: 1276-1635, 8278, 12842-13201, 21424-21426, 21570-21572, 21496-21498, 21642-21644 (encoding F-del_DSCav1) or a fragment or variant of any of these sequences;
[0412] said artificial RNA comprises or consists of an RNA sequence which is identical or at least 70%, 80%, 85%, 86%, 87%, 88%, 89%, 90%, 91%, 92%, 93%, 94%, 95%, 96%, 97%, 98%, or 99% identical to a nucleic acid sequence selected from the group consisting of SEQ ID NOs: 1645-2004, 13949-14308, 21433-21435, 21579-21581, 21505-21507, 21651-21653 (encoding F_DSCav1_mut1) or a fragment or variant of any of these sequences;
[0413] said artificial RNA comprises or consists of an RNA sequence which is identical or at least 70%, 80%, 85%, 86%, 87%, 88%, 89%, 90%, 91%, 92%, 93%, 94%, 95%, 96%, 97%, 98%, or 99% identical to a nucleic acid sequence selected from the group consisting of SEQ ID NOs: 2014-2373, 14318-14677, 21436-21438, 21582-21584, 21508-21510, 21654-21656 (encoding F-del_DSCav1_mut1) or a fragment or variant of any of these sequences;
[0414] said artificial RNA comprises or consists of an RNA sequence which is identical or at least 70%, 80%, 85%, 86%, 87%, 88%, 89%, 90%, 91%, 92%, 93%, 94%, 95%, 96%, 97%, 98%, or 99% identical to a nucleic acid sequence selected from the group consisting of SEQ ID NOs: 2383-2742, 14687-15046, 21439-21441, 21585-21587, 21511-21513, 21657-21659 (encoding F_DSCav1_mut2) or a fragment or variant of any of these sequences;
[0415] said artificial RNA comprises or consists of an RNA sequence which is identical or at least 70%, 80%, 85%, 86%, 87%, 88%, 89%, 90%, 91%, 92%, 93%, 94%, 95%, 96%, 97%, 98%, or 99% identical to a nucleic acid sequence selected from the group consisting of SEQ ID NOs: 2752-3111, 15056-15415, 21442-21444, 21588-21590, 21514-21516, 21660-21662 (encoding F-del_DSCav1_mut2) or a fragment or variant of any of these sequences;
[0416] said artificial RNA comprises or consists of an RNA sequence which is identical or at least 70%, 80%, 85%, 86%, 87%, 88%, 89%, 90%, 91%, 92%, 93%, 94%, 95%, 96%, 97%, 98%, or 99% identical to a nucleic acid sequence selected from the group consisting of SEQ ID NOs: 3121-3480, 15425-15784, 21445-21447, 21591-21593, 21517-21519, 21663-21665 (encoding F_DSCav1_mut3) or a fragment or variant of any of these sequences;
[0417] said artificial RNA comprises or consists of an RNA sequence which is identical or at least 70%, 80%, 85%, 86%, 87%, 88%, 89%, 90%, 91%, 92%, 93%, 94%, 95%, 96%, 97%, 98%, or 99% identical to a nucleic acid sequence selected from the group consisting of SEQ ID NOs: 3490-3849, 15794-16153, 21448-21450, 21594-21596, 21520-21522, 21666-21668 (encoding F-del_DSCav1_mut3) or a fragment or variant of any of these sequences.
[0418] said artificial RNA comprises or consists of an RNA sequence which is identical or at least 70%, 80%, 85%, 86%, 87%, 88%, 89%, 90%, 91%, 92%, 93%, 94%, 95%, 96%, 97%, 98%, or 99% identical to a nucleic acid sequence selected from the group consisting of SEQ ID NOs: 3859-4218, 13211-13570, 21427-21429, 21573-21575, 21499-21501, 21645-21647 (encoding F_DSCav1_mut0) or a fragment or variant of any of these sequences;
[0419] said artificial RNA comprises or consists of an RNA sequence which is identical or at least 70%, 80%, 85%, 86%, 87%, 88%, 89%, 90%, 91%, 92%, 93%, 94%, 95%, 96%, 97%, 98%, or 99% identical to a nucleic acid sequence selected from the group consisting of SEQ ID NOs: 4228-4587, 13580-13939, 21430-21432, 21576-21578, 21502-21504, 21648-21650 (encoding F-del_DSCav1_mut0) or a fragment or variant of any of these sequences;
[0420] said artificial RNA comprises or consists of an RNA sequence which is identical or at least 70%, 80%, 85%, 86%, 87%, 88%, 89%, 90%, 91%, 92%, 93%, 94%, 95%, 96%, 97%, 98%, or 99% identical to a nucleic acid sequence selected from the group consisting of SEQ ID NOs: 4597-4956, 16163-16522, 21451-21453, 21597-21599, 21523-21525, 21669-21671 (encoding F_DSCav1_mut4) or a fragment or variant of any of these sequences;
[0421] said artificial RNA comprises or consists of an RNA sequence which is identical or at least 70%, 80%, 85%, 86%, 87%, 88%, 89%, 90%, 91%, 92%, 93%, 94%, 95%, 96%, 97%, 98%, or 99% identical to a nucleic acid sequence selected from the group consisting of SEQ ID NOs: 4966-5325, 16532-16891, 21454-21456, 21600-21602, 21526-21528, 21672-21674 (encoding F-del_DSCav1_mut4) or a fragment or variant of any of these sequences;
[0422] said artificial RNA comprises or consists of an RNA sequence which is identical or at least 70%, 80%, 85%, 86%, 87%, 88%, 89%, 90%, 91%, 92%, 93%, 94%, 95%, 96%, 97%, 98%, or 99% identical to a nucleic acid sequence selected from the group consisting of SEQ ID NOs: 5335-5694, 16901-17260, 21457-21459, 21603-21605, 21529-21531, 21675-21677 (encoding F_DSCav1_mut5) or a fragment or variant of any of these sequences;
[0423] said artificial RNA comprises or consists of an RNA sequence which is identical or at least 70%, 80%, 85%, 86%, 87%, 88%, 89%, 90%, 91%, 92%, 93%, 94%, 95%, 96%, 97%, 98%, or 99% identical to a nucleic acid sequence selected from the group consisting of SEQ ID NOs: 5704-6063, 17270-17629, 21460-21462, 21606-21608, 21532-21534, 21678-21680 (encoding F-del_DSCav1_mut5) or a fragment or variant of any of these sequences;
[0424] said artificial RNA comprises or consists of an RNA sequence which is identical or at least 70%, 80%, 85%, 86%, 87%, 88%, 89%, 90%, 91%, 92%, 93%, 94%, 95%, 96%, 97%, 98%, or 99% identical to a nucleic acid sequence selected from the group consisting of SEQ ID NOs: 6073-6432, 17639-17998, 21463-21465, 21609-21611, 21535-21537, 21681-21683 (encoding F_DSCav1_mut6) or a fragment or variant of any of these sequences;
[0425] said artificial RNA comprises or consists of an RNA sequence which is identical or at least 70%, 80%, 85%, 86%, 87%, 88%, 89%, 90%, 91%, 92%, 93%, 94%, 95%, 96%, 97%, 98%, or 99% identical to a nucleic acid sequence selected from the group consisting of SEQ ID NOs: 6442-6801, 18008-18367, 21466-21468, 21612-21614, 21538-21540, 21684-21686 (encoding F-del_DSCav1_mut6) or a fragment or variant of any of these sequences;
[0426] said artificial RNA comprises or consists of an RNA sequence which is identical or at least 70%, 80%, 85%, 86%, 87%, 88%, 89%, 90%, 91%, 92%, 93%, 94%, 95%, 96%, 97%, 98%, or 99% identical to a nucleic acid sequence selected from the group consisting of SEQ ID NOs: 6811-7170, 18377-18736, 21469-21471, 21615-21617, 21541-21543, 21687-21689 (encoding F_DSCav1_mut7) or a fragment or variant of any of these sequences;
[0427] said artificial RNA comprises or consists of an RNA sequence which is identical or at least 70%, 80%, 85%, 86%, 87%, 88%, 89%, 90%, 91%, 92%, 93%, 94%, 95%, 96%, 97%, 98%, or 99% identical to a nucleic acid sequence selected from the group consisting of SEQ ID NOs: 7180-7539, 18746-19105, 21472-21474, 21618-21620, 21544-21546, 21690-21692 (encoding F-del_DSCav1_mut7) or a fragment or variant of any of these sequences;
[0428] said artificial RNA comprises or consists of an RNA sequence which is identical or at least 70%, 80%, 85%, 86%, 87%, 88%, 89%, 90%, 91%, 92%, 93%, 94%, 95%, 96%, 97%, 98%, or 99% identical to a nucleic acid sequence selected from the group consisting of SEQ ID NOs: 7549-7908, 19115-19474, 21475-21477, 21621-21623, 21547-21549, 21693-21695 (encoding F_DSCav1_mut8) or a fragment or variant of any of these sequences;
[0429] said artificial RNA comprises or consists of an RNA sequence which is identical or at least 70%, 80%, 85%, 86%, 87%, 88%, 89%, 90%, 91%, 92%, 93%, 94%, 95%, 96%, 97%, 98%, or 99% identical to a nucleic acid sequence selected from the group consisting of SEQ ID NOs: 7918-8277, 19484-19843, 21478-21480, 21624-21626, 21550-21552, 21696-21698 (encoding F-del_DSCav1_mut8) or a fragment or variant of any of these sequences, and
   wherein, optionally, at least one or more than one, or wherein all uracil nucleotides are replaced by pseudouridine (ψ) nucleotides or N1-methylpseudouridine (m1ψ) nucleotides.

[0430] In particularly preferred embodiments, the artificial RNA comprises (a) at least one heterologous 5′ untranslated region (5′-UTR) and/or at least one heterologous 3′ untranslated region (3′-UTR) and (b) at least one coding sequence operably linked to said 3′-UTR and/or 5′-UTR encoding at least one antigenic peptide or protein derived from a RSV F or a fragment or variant thereof, wherein said artificial RNA comprises or consists of an RNA sequence which is identical or at least 70%, 80%, 85%, 86%, 87%, 88%, 89%, 90%, 91%, 92%, 93%, 94%, 95%, 96%, 97%, 98%, or 99% identical to a nucleic acid sequence selected from the group consisting of SEQ ID NOs: 5704-6063, 17270-17629, 21460-21462, 21606-21608, 21532-21534, 21678-21680 (encoding F-del_DSCav1_mut5) or a fragment or variant of any of these sequences.

[0431] As outlined throughout the specification, additional information regarding suitable amino acid sequences or nucleic acid sequences (coding sequences, mRNA sequences) may also be derived from the sequence listing, in particular from the details provided therein under identifier <223> as explained in the following.

[0432] For example, the numeric identifier <223> in the sequence listing of SEQ ID NO: 68 reads as follows: “derived and/or modified protein sequence (artificial) from HRSV(A2)_F0”. It has to be noted that throughout the sequence listing, information provided under numeric identifier <223> follows the same structure: “<SEQUENCE_DESCRIPTOR> from <CONSTRUCT_IDENTIFIER>”. The <SEQUENCE_DESCRIPTOR> relates to the type of sequence (e.g., “derived and/or modified protein sequence”, “derived and/or modified CDS” “mRNA product Design a-1 comprising derived and/or modified sequence”, or “mRNA product Design b-4 comprising derived and/or modified sequence”, or “mRNA product Design c-5 comprising derived and/or modified sequence”, or “mRNA product Design g-4 comprising derived and/or modified sequence” etc.) and whether the sequence comprises or consists of a wild type sequence (“wt”) or whether the sequence comprises or consists of a sequence-optimized sequence (e.g. “opt1”, “opt2”, “opt3”, “opt4”, “opt5”, “opt6”, “opt11”; sequence optimizations are described in further detail below). For example, the <SEQUENCE_DESCRIPTOR> provided under numeric identifier <223> of SEQ ID NO: 68 reads as follows: “derived and/or modified protein sequence (artificial)”. The <CONSTRUCT_IDENTIFIER> provided under numeric identifier <223> has the following structures: (“organism_construct name”, or “organism__accession number__construct name”) and is intended to help the person skilled in the art to explicitly derive suitable nucleic acid sequences (e.g., RNA, mRNA) encoding the same RSV protein according to the invention. For example, the <CONSTRUCT_IDENTIFIER> provided under numeric identifier <223> of SEQ ID NO: 68 reads as follows: “HRSV(A2)_F0”. In that example, the respective protein sequence is derived from “HRSV(A2)” (organism), wherein the protein comprises the structural elements “F0” (construct name, full-length F). If the skilled person uses the construct identifier of SEQ ID NO: 68, namely “HRSV(A2)_F0”, said person easily arrives at a list of suitable nucleic acid coding sequences, e.g. RNA coding sequences and mRNA sequences that can easily be retrieve from the sequence listing of the present invention.

[0433] Composition:

[0434] A second aspect relates to a composition comprising at least one artificial RNA of the first aspect.

[0435] In a preferred embodiment of the second aspect, the composition comprises at least one artificial RNA of the first aspect and, optionally, at least one pharmaceutically acceptable carrier.

[0436] The term “pharmaceutically acceptable carrier” as used herein preferably includes the liquid or non-liquid basis of the composition. If the composition is provided in liquid form, the carrier will preferably be water, typically pyrogen-free water; isotonic saline or buffered (aqueous) solutions, e.g. phosphate, citrate etc. buffered solutions. Water or preferably a buffer, more preferably an aqueous buffer, may be used, containing a sodium salt, preferably at least 50 mM of a sodium salt, a calcium salt, preferably at least 0.01 mM of a calcium salt, and optionally a potassium salt, preferably at least 3 mM of a potassium salt. According to a preferred embodiment, the sodium, calcium and, optionally, potassium salts may occur in the form of their halogenides, e.g. chlorides, iodides, or bromides, in the form of their hydroxides, carbonates, hydrogen carbonates, or sulfates, etc. Without being limited thereto, examples of sodium salts include e.g. NaCl, NaI, NaBr, Na₂CO₃, NaHC₃, Na₂SO₄, examples of the optional potassium salts include e.g. KCl, KI, KBr, K₂CO₃, KHCO₃, K₂SO₄, and examples of calcium salts include e.g. CaCl₂, CaI₂, CaBr₂, CaCO₃, CaSO₄, Ca(OH)₂. Furthermore, organic anions of the aforementioned cations may be contained in the buffer.

[0437] In embodiments, the composition as defined herein may comprise a plurality or at least more than one of the artificial RNAs as defined in the context of the first aspect or the second aspect of the invention.

[0438] In embodiments, the at least one RNA comprised in the composition is a bi- or multicistronic nucleic acid, particularly a bi- or multicistronic nucleic acid as defined herein, which encodes the at least two, three, four, five, six, seven, eight, nine, ten, eleven or twelve distinct antigenic peptides or protein derived from the same RSV and/or a different RSV.

[0439] In embodiment, the composition may comprise at least 2, 3, 4, 5, 6, 7, 8, 9, 10 or even more different artificial RNAs as defined in the context of the first aspect of the invention each encoding at least one antigenic peptide or protein derived from genetically the same RSV or a fragment or variant thereof. The terms “same” or “same RSV” as used in the context of a virus, e.g. “same virus”, have to be understood as genetically the same. Particularly, said (genetically) same virus expresses the same proteins or peptides, wherein all proteins or peptides have the same amino acid sequence. Particularly, said (genetically) same RSV expresses essentially the same proteins, peptides or polyproteins, wherein these protein, peptide or polyproteins preferably do not differ in their amino acid sequence(s). A non-limiting list of exemplary RSV viruses is provided in List 1.

[0440] In embodiments, the composition comprises at least 2, 3, 4, 5, 6, 7, 8, 9, 10 or even more different RNAs as defined in the context of the first aspect of the invention each encoding at least one peptide or protein derived from a genetically different RSV or a fragment or variant thereof. The terms “different” or “different RSV” as used throughout the present specification in the context of a virus, e.g. “different” virus, has to be understood as the difference between at least two respective viruses, wherein the difference is manifested on the RNA genome of the respective different virus. Particularly, said (genetically) different RSV expresses at least one different protein, peptide or polyprotein, wherein the at least one different protein, peptide or polyprotein preferably differs in at least one amino acid.

[0441] In other embodiments, the composition comprises at least 1, 2, 3, 4, 5, 6, 7, 8, 9, 10 or even more further RNA constructs encoding RSV antigens selected from glycoprotein G, short hydrophobic protein SH, matrix protein M, nucleoprotein N, large polymerase L, M2-1 protein, M2-2 protein, phosphoprotein P, non-structural protein NS1 or non-structural protein NS2, or any combination thereof.

[0442] For the production of a composition comprising at least 1, 2, 3, 4, 5, 6, 7, 8, 9, 10 further RNA constructs encoding RSV, methods as disclosed in the PCT application PCT/EP2016/082487 or in published patent application WO2017/1090134A1 are preferably used and adapted accordingly.

[0443] In preferred embodiments, the composition of the second aspect comprises at least one artificial RNA of the first aspect and at least one further artificial RNA comprising at least one coding sequence encoding at least one antigenic peptide or protein derived from RSV selected from matrix protein M, nucleoprotein N, M2-1 protein, and/or phosphoprotein P or combinations thereof. The addition of a further artificial RNA comprising at least one coding sequence encoding at least one antigenic peptide or protein derived from RSV M, N, M2-1, and/or phosphoprotein P (or combinations thereof) is particularly advantageous to e.g. promote a T-cell immune response.

[0444] Notably, embodiments relating to the artificial RNA of the first aspect may likewise be read on and be understood as suitable embodiments of the at least one further artificial RNA of the second aspect (e.g., embodiments relating to UTR combinations, cds optimizations, histone stem loop, PolyA, PolyC, cap structure, mRNA structure, mRNA production and mRNA purification etc.).

[0445] Accordingly, the composition of the second aspect may suitably comprise at least one artificial RNA of the first aspect encoding RSF F and at least one further artificial RNA comprising at least one coding sequence encoding at least one antigenic peptide or protein derived from RSV matrix protein M.

[0446] Alternatively, the composition of the second aspect may suitably comprise at least one artificial RNA of the first aspect encoding RSF F and at least one further artificial RNA comprising at least one coding sequence encoding at least one antigenic peptide or protein derived from RSV N.

[0447] Alternatively, the composition of the second aspect may suitably comprise at least one artificial RNA of the first aspect encoding RSF F and at least one further artificial RNA comprising at least one coding sequence encoding at least one antigenic peptide or protein derived from RSV M2-1.

[0448] Alternatively, the composition of the second aspect may suitably comprise at least one artificial RNA of the first aspect encoding RSF F and at least one further artificial RNA comprising at least one coding sequence encoding at least one antigenic peptide or protein derived from RSV P.

[0449] In preferred embodiments, the composition of the second aspect comprises two further artificial RNA species each comprising at least one coding sequence encoding at least one antigenic peptide or protein derived from RSV selected from matrix protein M, nucleoprotein N, M2-1, and phosphoprotein P.

[0450] Accordingly, the composition of the second aspect may suitably comprise at least one artificial RNA of the first aspect encoding RSF F, at least one further artificial RNA comprising at least one coding sequence encoding at least one antigenic peptide or protein derived from RSV M, and at least one further artificial RNA comprising at least one coding sequence encoding at least one antigenic peptide or protein derived from RSV N.

[0451] Accordingly, the composition of the second aspect may suitably comprise at least one artificial RNA of the first aspect encoding RSF F, at least one further artificial RNA comprising at least one coding sequence encoding at least one antigenic peptide or protein derived from RSV N, and at least one further artificial RNA comprising at least one coding sequence encoding at least one antigenic peptide or protein derived from RSV M2-1.

[0452] Accordingly, the composition of the second aspect may suitably comprise at least one artificial RNA of the first aspect encoding RSF F, at least one further artificial RNA comprising at least one coding sequence encoding at least one antigenic peptide or protein derived from RSV P, and at least one further artificial RNA comprising at least one coding sequence encoding at least one antigenic peptide or protein derived from RSV M2-1.

[0453] Accordingly, the composition of the second aspect may suitably comprise at least one artificial RNA of the first aspect encoding RSF F, at least one further artificial RNA comprising at least one coding sequence encoding at least one antigenic peptide or protein derived from RSV P, and at least one further artificial RNA comprising at least one coding sequence encoding at least one antigenic peptide or protein derived from RSV N.

[0454] Accordingly, the composition of the second aspect may suitably comprise at least one artificial RNA of the first aspect encoding RSF F, at least one further artificial RNA comprising at least one coding sequence encoding at least one antigenic peptide or protein derived from RSV M, and at least one further artificial RNA comprising at least one coding sequence encoding at least one antigenic peptide or protein derived from RSV M2-1.

[0455] Accordingly, the composition of the second aspect may suitably comprise at least one artificial RNA of the first aspect encoding RSF F, at least one further artificial RNA comprising at least one coding sequence encoding at least one antigenic peptide or protein derived from RSV M, and at least one further artificial RNA comprising at least one coding sequence encoding at least one antigenic peptide or protein derived from RSV P.

[0456] In preferred embodiments, the composition of the second aspect comprises three further artificial RNA species each comprising at comprising three further artificial RNA species each comprising at least one coding sequence encoding at least one antigenic peptide or protein derived from RSV selected from matrix protein M, nucleoprotein N, M2-1, and phosphoprotein P.

[0457] Accordingly, the composition of the second aspect may suitably comprise at least one artificial RNA of the first aspect encoding RSF F, at least one further artificial RNA comprising at least one coding sequence encoding at least one antigenic peptide or protein derived from RSV M, at least one further artificial RNA comprising at least one coding sequence encoding at least one antigenic peptide or protein derived from RSV N, and at least one further artificial RNA comprising at least one coding sequence encoding at least one antigenic peptide or protein derived from RSV P.

[0458] Accordingly, the composition of the second aspect may suitably comprise at least one artificial RNA of the first aspect encoding RSF F, at least one further artificial RNA comprising at least one coding sequence encoding at least one antigenic peptide or protein derived from RSV M2-1, at least one further artificial RNA comprising at least one coding sequence encoding at least one antigenic peptide or protein derived from RSV N, and at least one further artificial RNA comprising at least one coding sequence encoding at least one antigenic peptide or protein derived from RSV P.

[0459] Accordingly, the composition of the second aspect may suitably comprise at least one artificial RNA of the first aspect encoding RSF F, at least one further artificial RNA comprising at least one coding sequence encoding at least one antigenic peptide or protein derived from RSV M2-1, at least one further artificial RNA comprising at least one coding sequence encoding at least one antigenic peptide or protein derived from RSV M, and at least one further artificial RNA comprising at least one coding sequence encoding at least one antigenic peptide or protein derived from RSV P.

[0460] Accordingly, the composition of the second aspect may suitably comprise at least one artificial RNA of the first aspect encoding RSF F, at least one further artificial RNA comprising at least one coding sequence encoding at least one antigenic peptide or protein derived from RSV M2-1, at least one further artificial RNA comprising at least one coding sequence encoding at least one antigenic peptide or protein derived from RSV M, and at least one further artificial RNA comprising at least one coding sequence encoding at least one antigenic peptide or protein derived from RSV N.

[0461] Accordingly, the composition of the second aspect may suitably comprise at least one artificial RNA of the first aspect encoding RSF F and at least one further artificial RNA comprising at least one coding sequence encoding at least one antigenic peptide or protein derived from RSV M2-1.

[0462] In preferred embodiments, the composition of the second aspect comprises four further artificial RNA species each comprising at comprising three further artificial RNA species each comprising at least one coding sequence encoding at least one antigenic peptide or protein derived from RSV selected from matrix protein M, nucleoprotein N, M2-1, and phosphoprotein P.

[0463] Accordingly, the composition of the second aspect may suitably comprise at least one artificial RNA of the first aspect encoding RSF F, at least one further artificial RNA comprising at least one coding sequence encoding at least one antigenic peptide or protein derived from RSV M, at least one further artificial RNA comprising at least one coding sequence encoding at least one antigenic peptide or protein derived from RSV N, at least one further artificial RNA comprising at least one coding sequence encoding at least one antigenic peptide or protein derived from RSV P, and at least one further artificial RNA comprising at least one coding sequence encoding at least one antigenic peptide or protein derived from RSV M2-1.

[0464] In preferred embodiments of the second aspect, the coding sequence of the further artificial RNA encodes at least one of the amino acid sequences being identical or at least 70%, 80%, 85%, 86%, 87%, 88%, 89%, 90%, 91%, 92%, 93%, 94%, 95%, 96%, 97%, 98%, or 99% identical to any one of SEQ ID NOs: 9684, 10053-10133, 10134, 10503-10636, 10637, 11006-11182, 11183, 11552-11725, 19844, 20213, 20582, 20951 or a fragment or variant of any of these sequences. Additional information regarding each of these suitable amino acid sequences encoding RSV proteins may also be derived from the sequence listing, in particular from the details provided therein under identifier <223> as explained in the following.

[0465] In further embodiments of the second aspect, the coding sequence of the further artificial RNA encodes at least one antigenic peptide or protein as defined herein and additionally a heterologous secretory signal sequence or heterologous secretory signal peptide. The heterologous secretory signal sequence may increase the secretion of the encoded antigenic peptide or protein.

[0466] Suitable secretory signal peptides may be selected from the list of amino acid sequences according to SEQ ID NOs: 1-1115 and SEQ ID NO: 1728 of the patent application WO2017/081082, or fragments or variants of these sequences. On nucleic acid level, any nucleic acid sequence (e.g. RNA sequence) may be selected which encodes such amino acid sequences. In this context, the disclosure of WO2017/081082 is herewith incorporated by reference.

[0467] According to embodiments, the secretory signal sequence comprises an amino acid sequence being identical or at least 70%, 80%, 85%, 86%, 87%, 88%, 89%, 90%, 91%, 92%, 93%, 94%, 95%, 96%, 97%, 98%, or 99% identical to any one of SEQ ID NOs: 21329-21362 or a fragment or variant of any of these sequences. Additional information regarding each of these suitable amino acid sequences encoding secretory signal sequences may also be derived from the sequence listing, in particular from the details provided therein under identifier <223>.

[0468] In preferred embodiments, the further artificial RNA of the composition comprises
[0469] a) at least one heterologous 5′ untranslated region (5′-UTR) and/or at least one heterologous 3′ untranslated region (3′-UTR); and
[0470] b) at least one coding sequence operably linked to said 3′-UTR and/or 5′-UTR encoding at least one antigenic peptide or protein derived from a RSV M, N, M2-1, and/or phosphoprotein P or a fragment or variant thereof, preferably encoding an amino acid sequence selected from any one of SEQ ID NOs: 9684, 10053-10133, 10134, 10503-10636, 10637, 11006-11182, 11183, 11552-11725, 19844, 20213, 20582, 20951 or a fragment or variant of any of these sequences.

[0471] In preferred embodiments, the further artificial RNA of the composition comprises
[0472] a) at least one heterologous 5′ untranslated region (5′-UTR) and/or at least one heterologous 3′ untranslated region (3′-UTR); and
[0473] b) at least one coding sequence operably linked to said 3′-UTR and/or 5′-UTR encoding at least one antigenic peptide or protein derived from a RSV M2-1 or a fragment or variant thereof, preferably encoding an amino acid sequence selected from any one of SEQ ID NOs: 11183, 20953, 21414 or a fragment or variant of any of these sequences.

[0474] Suitably, the further artificial RNA of the composition comprises a coding sequence is operably linked to a 3′-UTR and a 5′-UTR selected from a-1, a-2, a-3, a-4, a-5, b-1, b-2, b-3, b-4, b-5, c-1, c-2, c-3, c-4, c-5, d-1, d-2, d-3, d-4, d-5, e-1, e-2, e-3, e-4, e-5, e-6, f-1, f-2, f-3, f-4, f-5, g-1, g-2, g-3, g-4, g-5, h-1, h-2, h- 3, h-4, h-5, i-1, i-2, or i-3 (as defined in the context of the first aspect).

[0475] Suitably, the further artificial RNA of the composition comprises a coding sequence wherein at least one or more than one, or wherein preferably all uracil nucleotides are replaced by pseudouridine (L) nucleotides or N1-methylpseudouridine (m1L) nucleotides.

[0476] Accordingly, in other embodiments, the further artificial RNA of of the composition may comprise a 5′-cap sequence element according to SEQ ID NOs: 43 or 21321, or a fragment or variant thereof.

[0477] In preferred embodiments of the second aspect, the coding sequence of the further RNA comprises at least one of the nucleic acid sequences being identical or at least 70%, 80%, 85%, 86%, 87%, 88%, 89%, 90%, 91%, 92%, 93%, 94%, 95%, 96%, 97%, 98%, or 99% identical to SEQ ID NOs: 9685-9692, 10135-10142, 10638-10645, 11184-11119, 19845-19852, 20214-20221, 20583-20590, 20952-20959, 21385-21388, 21411-21414 or a fragment or a fragment or variant of any of these sequences (cds optimizations as defined in the context of the first aspect). Additional information regarding each of these suitable amino acid sequences encoding RSV proteins may also be derived from the sequence listing, in particular from the details provided therein under identifier <223> as explained in the following.

[0478] In preferred embodiments of the second aspect, the further artificial RNA, preferably the further mRNA of the composition comprises preferably in 5′- to 3-direction the following elements a)-i):
[0479] a) 5′-cap structure, preferably as specified in the context of the first aspect, most preferably a Cap1 structure;
[0480] b) optionally, 5′-UTR as specified in the context of the first aspect, preferably at least one selected from SEQ ID NOs: 1-22;
[0481] c) a ribosome binding site, preferably as specified herein; d) at least one coding sequence selected from SEQ ID NOs: 9685-9692, 10135-10142, 10638-10645, 11184-11119, 19845-19852, 20214-20221, 20583-20590, 20952-20959, 21385-21388, 21411-21414;
[0482] e) 3′-UTR as as specified in the context of the first aspect, preferably at least one selected from SEQ ID NOs: 23-38;
[0483] f) optionally, a poly(A) sequence, preferably as specified in the context of the first aspect;
[0484] g) optionally, a poly(C) sequence, preferably as specified in the context of the first aspect;
[0485] h) optionally, a histone stem-loop, preferably as specified in the context of the first aspect;
[0486] i) optionally, a 3′-terminal sequence element as specified in the context of the first aspect, preferably
   [0487] according to according to SEQ ID NOs: 44-63, or 21322-21328, and wherein optionally at least one or more than one, preferably wherein all uracil nucleotides are replaced by pseudouridine (ψ) nucleotides or N1-methylpseudouridine (m1ψ) nucleotides.

[0488] In particularly preferred embodiments of the second aspect, the further artificial RNA, preferably the further mRNA of the composition comprises preferably in 5′- to 3′-direction the following elements a)-i):
[0489] a) 5′-cap structure, preferably as specified in the context of the first aspect, most preferably a Cap1 structure;
[0490] b) optionally, 5′-UTR as specified in the context of the first aspect, preferably at least one selected from SEQ ID NOs: 1-22;
[0491] c) a ribosome binding site, preferably as specified herein;
[0492] d) at least one coding sequence selected from SEQ ID NOs: 11185-11191, 21388, 20952-20959, 21414;
[0493] e) 3′-UTR as as specified in the context of the first aspect, preferably at least one selected from SEQ ID NOs: 23-38;
[0494] f) optionally, a poly(A) sequence, preferably as specified in the context of the first aspect;
[0495] g) optionally, a poly(C) sequence, preferably as specified in the context of the first aspect;
[0496] h) optionally, a histone stem-loop, preferably as specified in the context of the first aspect;
[0497] i) optionally, a 3′-terminal sequence element as specified in the context of the first aspect, preferably according to according to SEQ ID NOs: 44-63, or 21322-21328, and
   [0498] wherein optionally at least one or more than one, preferably wherein all uracil nucleotides are replaced by pseudouridine (Ly) nucleotides or N1-methylpseudouridine (m1Ly) nucleotides.

[0499] In that context, preferred RSV polypeptide, nucleic acid, and mRNA sequences of the second aspect are provided in Table 7A.

[0500] In Table 7A, Columns A to D represent specific suitable constructs of the second aspect derived from RSV protein, wherein Column A provides suitable sequences for M, Column B provides suitable sequences for N, Column C provides suitable sequences for P, and Column D provides suitable sequences M2-1.

[0501] The protein names/designs are indicated in row 1 (Columns A to D), the protein SEQ ID NOs as provided in the sequence listing are in row 2 (“PRT”). Preferred protein SEQ ID NOs of HRSV(A2) are provided in row 3 (“HRSV(A2) PRT”). The SEQ ID NOs of corresponding coding sequences for each indicated HRSV(A2) protein are provided in rows 4-11 (“cds wt”, “cds opt1”, “cds opt2”, “cds opt3”, “cds opt4”, “cds opt5”, “cds opt6”, “cds opt11”, respectively). The SEQ ID NOs of corresponding mRNA constructs comprising said coding sequences and suitable 3′-UTRs and 5′-UTRs according to the invention are provided in rows 12 to 55 (“mRNA design a-1” to “mRNA design i-3” as specified herein).

[0502] Preferred protein SEQ ID NOs of HRSV(Memphis-37) are provided in row 56 (“Memphis-37 PRT”). The SEQ ID NOs of corresponding coding sequences for each indicated HRSV(Memphis-37) protein are provided in rows 57-64 (“cds wt”, “cds opt1”, “cds opt2”, “cds opt3”, “cds opt4”, “cds opt5”, “cds opt6”, “cds opt11”, respectively).

[0503] The SEQ ID NOs of corresponding mRNA constructs comprising said coding sequences and suitable 3′-UTRs and 5′-UTRs according to the invention are provided in rows 65 to 108 (“mRNA design a-” to “mRNA design i-3” as specified herein).

[0504] Further information e.g. regarding the type of coding sequence comprised in the indicated mRNA constructs is provided in the <223> identifier of the respective SEQ ID NO in the sequence listing.

TABLE 7A
Preferred further coding sequences and mRNA constructs of the composition or vaccine

| | | | A | B | C | D |
|---|---|---|---|---|---|---|
| 1 | Strain | Description | RSV M | RSV N | RSV P | RSV M2-1 |
| 2 | divers | PRT | 10053-10133 | 10503-10636 | 11006-11182 | 11552-11725 |
| 3 | HRSV(A2) | PRT | 9684 | 10134 | 10637 | 11183 |
| 4 | HRSV(A2) | cds wt | 9685 | 10135 | 10638 | 11184 |
| 5 | HRSV(A2) | CDS opt1 | 9686, 21385 | 10136, 21386 | 10639, 21387 | 11185, 21388 |
| 6 | HRSV(A2) | cds opt2 | 9687 | 10137 | 10640 | 11186 |
| 7 | HRSV(A2) | cds opt3 | 9688 | 10138 | 10641 | 11187 |
| 8 | HRSV(A2) | cds opt4 | 9689 | 10139 | 10642 | 11188 |
| 9 | HRSV(A2) | cds opt5 | 9690 | 10140 | 10643 | 11189 |
| 10 | HRSV(A2) | cds opt6 | 9691 | 10141 | 10644 | 11190 |
| 11 | HRSV(A2) | cds opt11 | 9692 | 10142 | 10645 | 11191 |
| 12 | HRSV(A2) | mRNA Design a-1 | 9693-9700, | 10143-10150, | 10646-10653, | 11192-11199, |
| | | | 21481, 21482, | 21483, 21484, | 21485, 21486, | 21487, 21488, |
| | | | 21627, 21628 | 21629, 21630 | 21631, 21632 | 21633, 21634 |
| 13 | HRSV(A2) | mRNA Design a-2 | 9701-9708 | 10151-10158 | 10654-10661 | 11200-11207 |
| 14 | HRSV(A2) | mRNA Design a-3 | 9709-9716 | 10159-10166 | 10662-10669 | 11208-11215 |
| 15 | HRSV(A2) | mRNA Design a-4 | 9717-9724 | 10167-10174 | 10670-10677 | 11216-11223 |
| 16 | HRSV(A2) | mRNA Design a-5 | 9725-9732 | 10175-10182 | 10678-10685 | 11224-11231 |
| 17 | HRSV(A2) | mRNA Design b-1 | 9733-9740 | 10183-10190 | 10686-10693 | 11232-11239 |
| 18 | HRSV(A2) | mRNA Design b-2 | 9741-9748 | 10191-10198 | 10694-10701 | 11240-11247 |
| 19 | HRSV(A2) | mRNA Design b-3 | 9749-9756 | 10199-10206 | 10702-10709 | 11248-11255 |
| 20 | HRSV(A2) | mRNA Design b-4 | 9757-9764 | 10207-10214 | 10710-10717 | 11256-11263 |
| 21 | HRSV(A2) | mRNA Design b-5 | 9765-9772 | 10215-10222 | 10718-10725 | 11264-11271 |
| 22 | HRSV(A2) | mRNA Design c-1 | 9773-9780 | 10223-10230 | 10726-10733 | 11272-11279 |
| 23 | HRSV(A2) | mRNA Design c-2 | 9781-9788 | 10231-10238 | 10734-10741 | 11280-11287 |
| 24 | HRSV(A2) | mRNA Design c-3 | 9789-9796 | 10239-10246 | 10742-10749 | 11288-11295 |
| 25 | HRSV(A2) | mRNA Design c-4 | 9797-9804 | 10247-10254 | 10750-10757 | 11296-11303 |
| 26 | HRSV(A2) | mRNA Design c-5 | 9805-9812 | 10255-10262 | 10758-10765 | 11304-11311 |
| 27 | HRSV(A2) | mRNA Design d-1 | 9813-9820 | 10263-10270 | 10766-10773 | 11312-11319 |
| 28 | HRSV(A2) | mRNA Design d-2 | 9821-9828 | 10271-10278 | 10774-10781 | 11320-11327 |
| 29 | HRSV(A2) | mRNA Design d-3 | 9829-9836 | 10279-10286 | 10782-10789 | 11328-11335 |
| 30 | HRSV(A2) | mRNA Design d-4 | 9837-9844 | 10287-10294 | 10790-10797 | 11336-11343 |
| 31 | HRSV(A2) | mRNA Design d-5 | 9845-9852 | 10295-10302 | 10798-10805 | 11344-11351 |
| 32 | HRSV(A2) | mRNA Design e-1 | 9853-9860 | 10303-10310 | 10806-10813 | 11352-11359 |
| 33 | HRSV(A2) | mRNA Design e-2 | 9861-9868 | 10311-10318 | 10814-10821 | 11360-11367 |
| 34 | HRSV(A2) | mRNA Design e-3 | 9869-9876 | 10319-10326 | 10822-10829 | 11368-11375 |
| 35 | HRSV(A2) | mRNA Design e-4 | 9877-9884 | 10327-10334 | 10830-10837 | 11376-11383 |
| 36 | HRSV(A2) | mRNA Design e-5 | 9885-9892 | 10335-10342 | 10838-10845 | 11384-11391 |
| 37 | HRSV(A2) | mRNA Design e-6 | 9893-9900 | 10343-10350 | 10846-10853 | 11392-11399 |
| 38 | HRSV(A2) | mRNA Design f-1 | 9901-9908 | 10351-10358 | 10854-10861 | 11400-11407 |
| 39 | HRSV(A2) | mRNA Design f-2 | 9909-9916 | 10359-10366 | 10862-10869 | 11408-11415 |
| 40 | HRSV(A2) | mRNA Design f-3 | 9917-9924 | 10367-10374 | 10870-10877 | 11416-11423 |
| 41 | HRSV(A2) | mRNA Design f-4 | 9925-9932 | 10375-10382 | 10878-10885 | 11424-11431 |
| 42 | HRSV(A2) | mRNA Design f-5 | 9933-9940 | 10383-10390 | 10886-10893 | 11432-11439 |
| 43 | HRSV(A2) | mRNA Design g-1 | 9941-9948 | 10391-10398 | 10894-10901 | 11440-11447 |
| 44 | HRSV(A2) | mRNA Design g-2 | 9949-9956 | 10399-10406 | 10902-10909 | 11448-11455 |
| 45 | HRSV(A2) | mRNA Design g-3 | 9957-9964 | 10407-10414 | 10910-10917 | 11456-11463 |
| 46 | HRSV(A2) | mRNA Design g-4 | 9965-9972 | 10415-10422 | 10918-10925 | 11464-11471 |
| 47 | HRSV(A2) | mRNA Design g-5 | 9973-9980 | 10423-10430 | 10926-10933 | 11472-11479 |
| 48 | HRSV(A2) | mRNA Design h-1 | 9981-9988 | 10431-10438 | 10934-10941 | 11480-11487 |
| 49 | HRSV(A2) | mRNA Design h-2 | 9989-9996 | 10439-10446 | 10942-10949 | 11488-11495 |
| 50 | HRSV(A2) | mRNA Design h-3 | 9997-10004 | 10447-10454 | 10950-10957 | 11496-11503 |
| 51 | HRSV(A2) | mRNA Design h-4 | 10005-10012 | 10455-10462 | 10958-10965 | 11504-11511 |
| 52 | HRSV(A2) | mRNA Design h-5 | 10013-10020 | 10463-10470 | 10966-10973 | 11512-11519 |
| 53 | HRSV(A2) | mRNA Design i-1 | 10021-10028 | 10471-10478 | 10974-10981 | 11520-11527 |
| 54 | HRSV(A2) | mRNA Design i-2 | 10029-10044 | 10479-10494 | 10982-10997 | 11528-11543 |
| 55 | HRSV(A2) | mRNA Design i-3 | 10045-10052 | 10495-10502 | 10998-11005 | 11544-11551 |
| 56 | Memphis-37 | PRT | 19844 | 20213 | 20582 | 20951 |
| 57 | Memphis-37 | CDS wt | 19845 | 20214 | 20583 | 20952 |
| 58 | Memphis-37 | CDS opt1 | 19846, 21411 | 20215, 21412 | 20584, 21413 | 20953, 21414 |
| 59 | Memphis-37 | CDS opt2 | 19847 | 20216 | 20585 | 20954 |
| 60 | Memphis-37 | CDS opt3 | 19848 | 20217 | 20586 | 20955 |
| 61 | Memphis-37 | CDS opt4 | 19849 | 20218 | 20587 | 20956 |
| 62 | Memphis-37 | CDS opt5 | 19850 | 20219 | 20588 | 20957 |
| 63 | Memphis-37 | CDS opt6 | 19851 | 20220 | 20589 | 20958 |
| 64 | Memphis-37 | CDS opt11 | 19852 | 20221 | 20590 | 20959 |
| 65 | Memphis-37 | mRNA Design a-1 | 19853-19860, | 20222-20229, | 20591-20598, | 20960-20967, |
| | | | 21553, 21554, | 21555, 21556, | 21557, 21558, | 21559, 21560, |
| | | | 21699, 21700 | 21701, 21702 | 21703, 21704 | 21705, 21706 |
| 66 | Memphis-37 | mRNA Design a-2 | 19861-19868 | 20230-20237 | 20599-20606 | 20968-20975 |
| 67 | Memphis-37 | mRNA Design a-3 | 19869-19876 | 20238-20245 | 20607-20614 | 20976-20983 |
| 68 | Memphis-37 | mRNA Design a-4 | 19877-19884 | 20246-20253 | 20615-20622 | 20984-20991 |
| 69 | Memphis-37 | mRNA Design a-5 | 19885-19892 | 20254-20261 | 20623-20630 | 20992-20999 |
| 70 | Memphis-37 | mRNA Design b-1 | 19893-19900 | 20262-20269 | 20631-20638 | 21000-21007 |
| 71 | Memphis-37 | mRNA Design b-2 | 19901-19908 | 20270-20277 | 20639-20646 | 21008-21015 |
| 72 | Memphis-37 | mRNA Design b-3 | 19909-19916 | 20278-20285 | 20647-20654 | 21016-21023 |
| 73 | Memphis-37 | mRNA Design b-4 | 19917-19924 | 20286-20293 | 20655-20662 | 21024-21031 |
| 74 | Memphis-37 | mRNA Design b-5 | 19925-19932 | 20294-20301 | 20663-20670 | 21032-21039 |
| 75 | Memphis-37 | mRNA Design c-1 | 19933-19940 | 20302-20309 | 20671-20678 | 21040-21047 |
| 76 | Memphis-37 | mRNA Design c-2 | 19941-19948 | 20310-20317 | 20679-20686 | 21048-21055 |
| 77 | Memphis-37 | mRNA Design c-3 | 19949-19956 | 20318-20325 | 20687-20694 | 21056-21063 |
| 78 | Memphis-37 | mRNA Design c-4 | 19957-19964 | 20326-20333 | 20695-20702 | 21064-21071 |
| 79 | Memphis-37 | mRNA Design c-5 | 19965-19972 | 20334-20341 | 20703-20710 | 21072-21079 |
| 80 | Memphis-37 | mRNA Design d-1 | 19973-19980 | 20342-20349 | 20711-20718 | 21080-21087 |
| 81 | Memphis-37 | mRNA Design d-2 | 19981-19988 | 20350-20357 | 20719-20726 | 21088-21095 |
| 82 | Memphis-37 | mRNA Design d-3 | 19989-19996 | 20358-20365 | 20727-20734 | 21096-21103 |
| 83 | Memphis-37 | mRNA Design d-4 | 19997-20004 | 20366-20373 | 20735-20742 | 21104-21111 |
| 84 | Memphis-37 | mRNA Design d-5 | 20005-20012 | 20374-20381 | 20743-20750 | 21112-21119 |
| 85 | Memphis-37 | mRNA Design e-1 | 20013-20020 | 20382-20389 | 20751-20758 | 21120-21127 |
| 86 | Memphis-37 | mRNA Design e-2 | 20021-20028 | 20390-20397 | 20759-20766 | 21128-21135 |
| 87 | Memphis-37 | mRNA Design e-3 | 20029-20036 | 20398-20405 | 20767-20774 | 21136-21143 |
| 88 | Memphis-37 | mRNA Design e-4 | 20037-20044 | 20406-20413 | 20775-20782 | 21144-21151 |
| 89 | Memphis-37 | mRNA Design e-5 | 20045-20052 | 20414-20421 | 20783-20790 | 21152-21159 |
| 90 | Memphis-37 | mRNA Design e-6 | 20053-20060 | 20422-20429 | 20791-20798 | 21160-21167 |
| 91 | Memphis-37 | mRNA Design f-1 | 20061-20068 | 20430-20437 | 20799-20806 | 21168-21175 |
| 92 | Memphis-37 | mRNA Design f-2 | 20069-20076 | 20438-20445 | 20807-20814 | 21176-21183 |
| 93 | Memphis-37 | mRNA Design f-3 | 20077-20084 | 20446-20453 | 20815-20822 | 21184-21191 |
| 94 | Memphis-37 | mRNA Design f-4 | 20085-20092 | 20454-20461 | 20823-20830 | 21192-21199 |
| 95 | Memphis-37 | mRNA Design f-5 | 20093-20100 | 20462-20469 | 20831-20838 | 21200-21207 |
| 96 | Memphis-37 | mRNA Design g-1 | 20101-20108 | 20470-20477 | 20839-20846 | 21208-21215 |
| 97 | Memphis-37 | mRNA Design g-2 | 20109-20116 | 20478-20485 | 20847-20854 | 21216-21223 |
| 98 | Memphis-37 | mRNA Design g-3 | 20117-20124 | 20486-20493 | 20855-20862 | 21224-21231 |
| 99 | Memphis-37 | mRNA Design g-4 | 20125-20132 | 20494-20501 | 20863-20870 | 21232-21239 |
| 100 | Memphis-37 | mRNA Design g-5 | 20133-20140 | 20502-20509 | 20871-20878 | 21240-21247 |
| 101 | Memphis-37 | mRNA Design h-1 | 20141-20148 | 20510-20517 | 20879-20886 | 21248-21255 |
| 102 | Memphis-37 | mRNA Design h-2 | 20149-20156 | 20518-20525 | 20887-20894 | 21256-21263 |
| 103 | Memphis-37 | mRNA Design h-3 | 20157-20164 | 20526-20533 | 20895-20902 | 21264-21271 |
| 104 | Memphis-37 | mRNA Design h-4 | 20165-20172 | 20534-20541 | 20903-20910 | 21272-21279 |
| 105 | Memphis-37 | mRNA Design h-5 | 20173-20180 | 20542-20549 | 20911-20918 | 21280-21287 |
| 106 | Memphis-37 | mRNA Design i-1 | 20181-20188 | 20550-20557 | 20919-20926 | 21288-21295 |
| 107 | Memphis-37 | mRNA Design i-2 | 20189-20204 | 20558-20573 | 20927-20942 | 21296-21311 |
| 108 | Memphis-37 | mRNA Design i-3 | 20205-20212 | 20574-20581 | 20943-20950 | 21312-21319 |

[0505] Accordingly, in preferred embodiments, the composition of the second aspect comprises at least one further artificial RNA comprising at least one coding sequence encoding at least one antigenic peptide or protein derived from RSV selected from matrix protein M, nucleoprotein N, M2-1 protein, phosphoprotein P, wherein the further artificial RNA comprises or consists of an RNA sequence which is identical or at least 70%, 80%, 85%, 86%, 87%, 88%, 89%, 90%, 91%, 92%, 93%, 94%, 95%, 96%, 97%, 98%, or 99% identical to a nucleic acid sequence selected from SEQ ID NOs: 9693-10052, 10143-10502, 10646-11005, 11192-11551, 19853-20212, 20222-20581, 20591-20950, 20960-21319, 21481-21488, 21627-21634, 21553-21560, 21699-21706 or a fragment or variant of any of these sequences, wherein, optionally, at least one or more than one, or wherein all uracil nucleotides are replaced by pseudouridine (ψ) nucleotides or N1-methylpseudouridine (m1 ψ) nucleotides. Additional information regarding each of these suitable amino acid sequences encoding RSV proteins may also be derived from the sequence listing, in particular from the details provided therein under identifier <223> as explained in the following.

[0506] In particularly preferred embodiments of the second aspect, the composition of the second aspect comprises
[0507] at least one artificial RNA which is identical or at least 70%, 80%, 85%, 86%, 87%, 88%, 89%, 90%, 91%, 92%, 93%, 94%, 95%, 96%, 97%, 98%, or 99% identical to a nucleic acid sequence selected from SEQ ID NOs: 78-482, 493-897, 907-1266, 1276-1635, 1645-2004, 2014-2373, 2383-2742, 2752-3111, 3121-3480, 3490-3849, 3859-4218, 4228-4587, 4597-4956, 4966-5325, 5335-5694, 5704-6063, 6073-6432, 6442-6801, 6811-7170, 7180-7539, 7549-7908, 7918-8277, 8278, 11735-12094, 12104-12463, 12473-12832, 12842-13201, 13949-14308, 14318-14677, 14687-15046, 15056-15415, 15425-15784, 15794-16153, 13211-13570, 13580-13939, 16163-16522, 16532-16891, 16901-17260, 17270-17629, 17639-17998, 18008-18367, 18377-18736, 18746-19105, 19115-19474, 19484-19843, 21415-21480, 21561-21626, 21489-21552, 21635-21698 (encoding RSV F as defined in the first aspect) and a further artificial RNA which is identical or at least 70%, 80%, 85%, 86%, 87%, 88%, 89%, 90%, 91%, 92%, 93%, 94%, 95%, 96%, 97%, 98%, or 99% identical to a nucleic acid sequence selected from the group consisting of SEQ ID NOs: 9693-10052, 19853-20212, 21481, 21482, 21627, 21628, 21553, 21554, 21699, 21700 (encoding RSV M); or
[0508] at least one artificial RNA which is identical or at least 70%, 80%, 85%, 86%, 87%, 88%, 89%, 90%, 91%, 92%, 93%, 94%, 95%, 96%, 97%, 98%, or 99% identical to a nucleic acid sequence selected from SEQ ID NOs: 78-482, 493-897, 907-1266, 1276-1635, 1645-2004, 2014-2373, 2383-2742, 2752-3111, 3121-3480, 3490-3849, 3859-4218, 4228-4587, 4597-4956, 4966-5325, 5335-5694, 5704-6063, 6073-6432, 6442-6801, 6811-7170, 7180-7539, 7549-7908, 7918-8277, 8278, 11735-12094, 12104-12463, 12473-12832, 12842-13201, 13949-14308, 14318-14677, 14687-15046, 15056-15415, 15425-15784, 15794-16153, 13211-13570, 13580-13939, 16163-16522, 16532-16891, 16901-17260, 17270-17629, 17639-17998, 18008-18367, 18377-18736, 18746-19105, 19115-19474, 19484-19843, 21415-21480, 21561-21626, 21489-21552, 21635-21698 (encoding RSV F as defined in the first aspect) and a further artificial RNA which is identical or at least 70%, 80%, 85%, 86%, 87%, 88%, 89%, 90%, 91%, 92%, 93%, 94%, 95%, 96%, 97%, 98%, or 99% identical to a nucleic acid sequence selected from the group consisting of SEQ ID NOs: 10143-10502, 20222-20581, 21483, 21484, 21629, 21630, 21555, 21556, 21701, 21702 (encoding RSV N); or
[0509] at least one artificial RNA which is identical or at least 70%, 80%, 85%, 86%, 87%, 88%, 89%, 90%, 91%, 92%, 93%, 94%, 95%, 96%, 97%, 98%, or 99% identical to a nucleic acid sequence selected from SEQ ID NOs: 78-482, 493-897, 907-1266, 1276-1635, 1645-2004, 2014-2373, 2383-2742, 2752-3111, 3121-3480, 3490-3849, 3859-4218, 4228-4587, 4597-4956, 4966-5325, 5335-5694, 5704-6063, 6073-6432, 6442-6801, 6811-7170, 7180-7539, 7549-7908, 7918-8277, 8278, 11735-12094, 12104-12463, 12473-12832, 12842-13201, 13949-14308, 14318-14677, 14687-15046, 15056-15415, 15425-15784, 15794-16153, 13211-13570, 13580-13939, 16163-16522, 16532-16891, 16901-17260, 17270-17629, 17639-17998, 18008-18367, 18377-18736, 18746-19105, 19115-19474, 19484-19843, 21415-21480, 21561-21626, 21489-21552, 21635-21698 (encoding RSV F as defined in the first aspect) and at least one further artificial RNA which is identical or at least 70%, 80%, 85%, 86%, 87%, 88%, 89%, 90%, 91%, 92%, 93%, 94%, 95%, 96%, 97%, 98%, or 99% identical to a nucleic acid sequence selected from the group consisting of SEQ ID NOs: 10646-11005, 20591-20950, 21485, 21486, 21631, 21632, 21557, 21558, 21703, 21704 (encoding RSV P); or
[0510] at least one artificial RNA which is identical or at least 70%, 80%, 85%, 86%, 87%, 88%, 89%, 90%, 91%, 92%, 93%, 94%, 95%, 96%, 97%, 98%, or 99% identical to a nucleic acid sequence selected from SEQ ID NOs: 78-482, 493-897, 907-1266, 1276-1635, 1645-2004, 2014-2373, 2383-2742, 2752-3111, 3121-3480, 3490-3849, 3859-4218, 4228-4587, 4597-4956, 4966-5325, 5335-5694, 5704-6063, 6073-6432, 6442-6801, 6811-7170, 7180-7539, 7549-7908, 7918-8277, 8278, 11735-12094, 12104-12463, 12473-12832, 12842-13201, 13949-14308, 14318-14677, 14687-15046, 15056-15415, 15425-15784, 15794-16153, 13211-13570, 13580-13939, 16163-16522, 16532-16891, 16901-17260, 17270-17629, 17639-17998, 18008-18367, 18377-18736, 18746-19105, 19115-19474, 19484-19843, 21415-21480, 21561-21626, 21489-21552, 21635-21698 (encoding RSV F as defined in the first aspect) and at least one further artificial RNA which is identical or at least 70%, 80%, 85%, 86%, 87%, 88%, 89%, 90%, 91%, 92%, 93%, 94%, 95%, 96%, 97%, 98%, or 99% identical to a nucleic acid sequence selected from the group consisting of SEQ ID NOs: 11192-11551, 20960-21319, 21487, 21488, 21633, 21634, 21559, 21560, 21705, 21706 (encoding RSV M2-1); or
[0511] at least one artificial RNA which is identical or at least 70%, 80%, 85%, 86%, 87%, 88%, 89%, 90%, 91%, 92%, 93%, 94%, 95%, 96%, 97%, 98%, or 99% identical to a nucleic acid sequence selected from SEQ ID NOs: 78-482, 493-897, 907-1266, 1276-1635, 1645-2004, 2014-2373, 2383-2742, 2752-3111, 3121-3480, 3490-3849, 3859-4218, 4228-4587, 4597-4956, 4966-5325, 5335-5694, 5704-6063, 6073-6432, 6442-6801, 6811-7170, 7180-7539, 7549-7908, 7918-8277, 8278, 11735-12094, 12104-12463, 12473-12832, 12842-13201, 13949-14308, 14318-14677, 14687-15046, 15056-15415, 15425-15784, 15794-16153, 13211-13570, 13580-13939, 16163-16522, 16532-16891, 16901-17260, 17270-17629, 17639-17998, 18008-18367, 18377-18736, 18746-19105, 19115-19474, 19484-19843, 21415-21480, 21561-21626, 21489-21552, 21635-21698 (encoding RSV F as defined in the first aspect) and at least one further artificial RNA which is identical or at least 70%, 80%, 85%, 86%, 87%, 88%, 89%, 90%, 91%, 92%, 93%, 94%, 95%, 96%, 97%, 98%, or 99% identical to a nucleic acid sequence selected from SEQ ID NOs: 9693-10052, 19853-20212, 21481, 21482, 21627, 21628, 21553, 21554, 21699, 21700 (encoding RSV M) and a further artificial RNA which is identical or at least 70%, 80%, 85%, 86%, 87%, 88%, 89%, 90%, 91%, 92%, 93%, 94%, 95%, 96%, 97%, 98%, or 99% identical to a nucleic acid sequence selected from SEQ ID NOs: 10646-11005, 20591-20950, 21485, 21486, 21631, 21632, 21557, 21558, 21703, 21704 (encoding RSV P);
[0512] at least one artificial RNA which is identical or at least 70%, 80%, 85%, 86%, 87%, 88%, 89%, 90%, 91%, 92%, 93%, 94%, 95%, 96%, 97%, 98%, or 99% identical to a nucleic acid sequence selected from SEQ ID NOs: 78-482, 493-897, 907-1266, 1276-1635, 1645-2004, 2014-2373, 2383-2742, 2752-3111, 3121-3480, 3490-3849, 3859-4218, 4228-4587, 4597-4956, 4966-5325, 5335-5694, 5704-6063, 6073-6432, 6442-6801, 6811-7170, 7180-7539, 7549-7908, 7918-8277, 8278, 11735-12094, 12104-12463, 12473-12832, 12842-13201, 13949-14308, 14318-14677, 14687-15046, 15056-15415, 15425-15784, 15794-16153, 13211-13570, 13580-13939, 16163-16522, 16532-16891, 16901-17260, 17270-17629, 17639-17998, 18008-18367, 18377-18736, 18746-19105, 19115-19474, 19484-19843, 21415-21480, 21561-21626, 21489-21552, 21635-21698 (encoding RSV F as defined in the first aspect) and at least one further artificial RNA which is identical or at least 70%, 80%, 85%, 86%, 87%, 88%, 89%, 90%, 91%, 92%, 93%, 94%, 95%, 96%, 97%, 98%, or 99% identical to a nucleic acid sequence selected from SEQ ID NOs: 9693-10052, 19853-20212, 21481, 21482, 21627, 21628, 21553, 21554, 21699, 21700 (encoding RSV M) and a further artificial RNA which is identical or at least 70%, 80%, 85%, 86%, 87%, 88%, 89%, 90%, 91%, 92%, 93%, 94%, 95%, 96%, 97%, 98%, or 99% identical to a nucleic acid sequence selected from SEQ ID NOs: 10646-11005, 20591-20950, 21485, 21486, 21631, 21632, 21557, 21558, 21703, 21704 (encoding RSV P) and a further artificial RNA which is identical or at least 70%, 80%, 85%, 86%, 87%, 88%, 89%, 90%, 91%, 92%, 93%, 94%, 95%, 96%, 97%, 98%, or 99% identical to a nucleic acid sequence selected from SEQ ID NOs: 10143-10502, 20222-20581, 21483, 21484, 21629, 21630, 21555, 21556, 21701, 21702 (encoding RSV N), or
[0513] at least one artificial RNA which is identical or at least 70%, 80%, 85%, 86%, 87%, 88%, 89%, 90%, 91%, 92%, 93%, 94%, 95%, 96%, 97%, 98%, or 99% identical to a nucleic acid sequence selected from SEQ ID NOs: 78-86, 21415-21417, 21561-21563, 474-482, 11735-11742, 21489, 21490, 21635, 21636, 12087-12094, 493-501, 21418-21420, 21564-21566, 889-897, 12104-12111, 21491, 21492, 21637, 21638, 12456-12463, 907-914, 21421-21423, 21567-21569, 1259-1266, 12473-12480, 21493-21495, 21639-21641, 12825-12832, 1276-1283, 21424-21426, 21570-21572, 1628-1635, 12842-12849, 21496-21498, 21642-21644, 13194-13201, 1645-1652, 21433-21435, 21579-21581, 1997-2004, 13949-13956, 21505-21507, 21651-21653, 14301-14308, 2014-2021, 21436-21438, 21582-21584, 2366-2373, 14318-14325, 21508-21510, 21654-21656, 14670-14677, 2383-2390, 21439-21441, 21585-21587, 2735-2742, 14687-14694, 21511-21513, 21657-21659, 15039-15046, 2752-2759, 21442-21444, 21588-21590, 3104-3111, 15056-15063, 21514-21516, 21660-21662, 15408-15415, 3121-3128, 21445-21447, 21591-21593, 3473-3480, 15425-15432, 21517-21519, 21663-21665, 15777-15784, 3490-3497, 21448-21450, 21594-21596, 3842-3849, 15794-15801, 21520-21522, 21666-21668, 16146-16153, 3859-3866, 21427-21429, 21573-21575, 4211-4218, 13211-13218, 21499-21501, 21645-21647, 13563-13570, 4228-4235, 21430-21432, 21576-21578, 4580-4587, 13580-13587, 21502-21504, 21648-21650, 13932-13939, 4597-4604, 21451-21453, 21597-21599, 4949-4956, 16163-16170, 21523-21525, 21669-21671, 16515-16522, 4966-4973, 21454-21456, 21600-21602, 5318-5325, 16532-16539, 21526-21528, 21672-21674, 16884-16891, 5335-5342, 21457-21459, 21603-21605, 5687-5694, 16901-16908, 21529-21531, 21675-21677, 17253-17260, 5704-5711, 21460-21462, 21606-21608, 6056-6063, 17270-17277, 21532-21534, 21678-21680, 17622-17629 (encoding RSV F as defined in the first aspect) and at least one further artificial RNA which is identical or at least 70%, 80%, 85%, 86%, 87%, 88%, 89%, 90%, 91%, 92%, 93%, 94%, 95%, 96%, 97%, 98%, or 99% identical to a nucleic acid sequence selected from the group consisting of SEQ ID NOs: 11192-11551, 20960-21319, 21487, 21488, 21633, 21634, 21559, 21560, 21705, 21706 (encoding RSV M2-1),

[0514] wherein, optionally, at least one or more than one, or wherein all uracil nucleotides are replaced by pseudouridine (ψ) nucleotides or N1-methylpseudouridine (m1ψ) nucleotides.

[0515] In various embodiments, different combinations of RSV F (F0, F-del, F0_DSCav1, F-del_DSCav1, F_DSCav1_mut0, F-del_DSCav1_mut0, F_DSCav1_mut1, F-del_DSCav1_mut1, F_DSCav1_mut2, F-del_DSCav1_mut2, F_DSCav1_mut3, F-del_DSCav1_mut3, F_DSCav1_mut4, F-del_DSCav1_mut4, F_DSCav1_mut5, F-del_DSCav1_mut5, F_DSCav1_mut6, F-del_DSCav1_mut6, F_DSCav1_mut7, F-del_DSCav1_mut7, F_DSCav1_mut8, F-del_DSCav1_mut8) RNA constructs and RSV T-cell antigen RNA constructs (RSV M, N, M2-1, or P) are suitably comprised in the composition (as disclosed in Table 7B; combinations 1-64). The combinations 49-64 are preferred, combination 64 is particularly preferred.

TABLE 7B
Suitable combinations of RNA constructs encoding
RSV F and RNA constructs encoding T-cell antigens

| | | SEQ ID NO: | T-cell antigen | SEQ ID NO: |
|---|---|---|---|---|
| Combination | RSV F construct | Protein | construct | Protein |
| 1 | F0 | 68 | M | 9684 |
| 2 | F-del | 483 | M | 9684 |
| 3 | F_DSCav1 | 898 | M | 9684 |
| 4 | F-del_DSCav1 | 1267 | M | 9684 |
| 5 | F_DSCav1_mut1 | 1636 | M | 9684 |
| 6 | F-del_DSCav1_mut1 | 2005 | M | 9684 |
| 7 | F_DSCav1_mut2 | 2374 | M | 9684 |
| 8 | F-del_DSCav1_mut2 | 2743 | M | 9684 |
| 9 | F_DSCav1_mut3 | 3112 | M | 9684 |
| 10 | F-del_DSCav1_mut3 | 3481 | M | 9684 |
| 11 | F_DSCav1_mut0 | 3850 | M | 9684 |
| 12 | F-del_DSCav1_mut0 | 4219 | M | 9684 |
| 13 | F_DSCav1_mut4 | 4588 | M | 9684 |
| 14 | F-del_DSCav1_mut4 | 4957 | M | 9684 |
| 15 | F_DSCav1_mut5 | 5326 | M | 9684 |
| 16 | F-del_DSCav1_mut5 | 5695 | M | 9684 |
| 17 | F0 | 68 | N | 10134 |
| 18 | F-del | 483 | N | 10134 |
| 19 | F_DSCav1 | 898 | N | 10134 |
| 20 | F-del_DSCav1 | 1267 | N | 10134 |
| 21 | F_DSCav1_mut1 | 1636 | N | 10134 |
| 22 | F-del_DSCav1_mut1 | 2005 | N | 10134 |
| 23 | F_DSCav1_mut2 | 2374 | N | 10134 |
| 24 | F-del_DSCav1_mut2 | 2743 | N | 10134 |
| 25 | F_DSCav1_mut3 | 3112 | N | 10134 |
| 26 | F-del_DSCav1_mut3 | 3481 | N | 10134 |
| 27 | F_DSCav1_mut0 | 3850 | N | 10134 |
| 28 | F-del_DSCav1_mut0 | 4219 | N | 10134 |
| 29 | F_DSCav1_mut4 | 4588 | N | 10134 |
| 30 | F-del_DSCav1_mut4 | 4957 | N | 10134 |
| 31 | F_DSCav1_mut5 | 5326 | N | 10134 |
| 32 | F-del_DSCav1_mut5 | 5695 | N | 10134 |
| 33 | F0 | 68 | P | 10637 |
| 34 | F-del | 483 | P | 10637 |
| 35 | F_DSCav1 | 898 | P | 10637 |
| 36 | F-del_DSCav1 | 1267 | P | 10637 |
| 37 | F_DSCav1_mut1 | 1636 | P | 10637 |
| 38 | F-del_DSCav1_mut1 | 2005 | P | 10637 |
| 39 | F_DSCav1_mut2 | 2374 | P | 10637 |
| 40 | F-del_DSCav1_mut2 | 2743 | P | 10637 |
| 41 | F_DSCav1_mut3 | 3112 | P | 10637 |
| 42 | F-del_DSCav1_mut3 | 3481 | P | 10637 |
| 43 | F_DSCav1_mut0 | 3850 | P | 10637 |
| 44 | F-del_DSCav1_mut0 | 4219 | P | 10637 |
| 45 | F_DSCav1_mut4 | 4588 | P | 10637 |
| 46 | F-del_DSCav1_mut4 | 4957 | P | 10637 |
| 47 | F_DSCav1_mut5 | 5326 | P | 10637 |
| 48 | F-del_DSCav1_mut5 | 5695 | P | 10637 |
| 49 | F0 | 68 | M2-1 | 11183 |
| 50 | F-del | 483 | M2-1 | 11183 |
| 51 | F_DSCav1 | 898 | M2-1 | 11183 |
| 52 | F-del_DSCav1 | 1267 | M2-1 | 11183 |
| 53 | F_DSCav1_mut1 | 1636 | M2-1 | 11183 |
| 54 | F-del_DSCav1_mut1 | 2005 | M2-1 | 11183 |
| 55 | F_DSCav1_mut2 | 2374 | M2-1 | 11183 |
| 56 | F-del_DSCav1_mut2 | 2743 | M2-1 | 11183 |
| 57 | F_DSCav1_mut3 | 3112 | M2-1 | 11183 |
| 58 | F-del_DSCav1_mut3 | 3481 | M2-1 | 11183 |
| 59 | F_DSCav1_mut0 | 3850 | M2-1 | 11183 |
| 60 | F-del_DSCav1_mut0 | 4219 | M2-1 | 11183 |
| 61 | F_DSCav1_mut4 | 4588 | M2-1 | 11183 |
| 62 | F-del_DSCav1_mut4 | 4957 | M2-1 | 11183 |
| 63 | F_DSCav1_mut5 | 5326 | M2-1 | 11183 |
| 64 | F-del_DSCav1_mut5 | 5695 | M2-1 | 11183 |

[0516] Table 7B discloses compositions of the second aspect comprising at least one RNA encoding RSV F from the strain A2 as defined in the first aspect and at least one further artificial RNA comprising at least one coding sequence encoding at least one antigenic peptide or protein derived from RSV from the strain A2 selected from matrix protein M, nucleoprotein N, M2-1 protein, phosphoprotein P. In further embodiments of the invention all disclosed compositions in Table 7B are also applicable for antigenic peptides or proteins derived from a RSV isolate Memphis-37 (strain Memphis-37).

[0517] In a particularly preferred embodiment, the composition comprises one RSV F RNA construct (F0, F-del, F0_DSCav1, F-del_DSCav1, F_DSCav1_mut0, F-del_DSCav1_mut0, F_DSCav1_mut1, F-del_DSCav1_mut1, F_DSCav1_mut2, F-del_DSCav1_mut2, F_DSCav1_mut3, F-del_DSCav1_mut3, F_DSCav1_mut4, F-del_DSCav1_mut4, F_DSCav1_mut5, F-del_DSCav1_mut5, F_DSCav1_mut6, F-del_DSCav1_mut6, F_DSCav1_mut7, F-del_DSCav1_mut7, F_DSCav1_mut8, F-del_DSCav1_mut8) and, in addition, one RSV M2-1 RNA construct, preferably F-del_DSCav1_mut5 and M2-1.

[0518] In particularly preferred embodiments, one RNA construct encoding RSV F, selected from SEQ ID NOs: 5704-5711, 21460-21462, 21606-21608, 17270-17277, 21532-21534, 21678-21680 and one RNA construct encoding M2-1, selected from SEQ ID NOs: 11192-11199, 21487, 21488, 21633, 21634, 20960-20967, 21559, 21560, 21705, 21706 are comprised in the composition of the invention.

[0519] In various embodiments, the at least one artificial RNA of the first aspect and the at least one further artificial RNA as specified herein are derived from the same RSV virus (e.g. any virus selected from List 1).

[0520] In preferred embodiments, the at least one artificial RNA of the first aspect is derived from HRSV(A2) and the at least one further artificial RNA as specified herein is derived from HRSV(A2).

[0521] In preferred embodiments, the at least one artificial RNA of the first aspect is derived from HRSV(Memphis-37) and the at least one further artificial RNA as specified herein is derived from HRSV(Memphis-37).

[0522] It has to be understood that in the context of the invention, certain combinations of coding sequences may be generated by any combination of monocistronic, bicistronic and multicistronic artificial nucleic acids and/or multi-antigen-constructs/nucleic acid to obtain a nucleic acid composition encoding multiple antigenic peptides or proteins as defined herein.

[0523] Furthermore, one or more compatible solid or liquid fillers or diluents or encapsulating compounds may be used as well, which are suitable for administration to a person. The term “compatible” as used herein means that the constituents of the composition are capable of being mixed with the at least one RNA and, optionally, the further artificial RNA of the composition, in such a manner that no interaction occurs, which would substantially reduce the biological activity or the pharmaceutical effectiveness of the composition under typical use conditions. Pharmaceutically acceptable carriers, fillers and diluents must have sufficiently high purity and sufficiently low toxicity to make them suitable for administration to a person to be treated. Compounds which may be used as pharmaceutically acceptable carriers, fillers or constituents thereof are sugars, such as, for example, lactose, glucose, trehalose and sucrose; starches, such as, for example, corn starch or potato starch; dextrose; cellulose and its derivatives, such as, for example, sodium carboxymethylcellulose, ethylcellulose, cellulose acetate; powdered tragacanth; malt; gelatin; tallow; solid glidants, such as, for example, stearic acid, magnesium stearate; calcium sulfate; vegetable oils, such as, for example, groundnut oil, cottonseed oil, sesame oil, olive oil, corn oil and oil from theobroma; polyols, such as, for example, polypropylene glycol, glycerol, sorbitol, mannitol and polyethylene glycol; alginic acid.

[0524] Further additives, which may be included in the composition are emulsifiers, such as, for example, Tween; wetting agents, such as, for example, sodium lauryl sulfate; colouring agents; taste-imparting agents, pharmaceutical carriers; tablet-forming agents; stabilizers; antioxidants; preservatives.

[0525] Complexation:

[0526] In a preferred embodiment of the second aspect, the at least one artificial RNA of the first aspect and, optionally, the further artificial RNA of the second aspect, is complexed or associated with or at least partially complexed or partially associated with one or more cationic or polycationic compound, preferably cationic or polycationic polymer, cationic or polycationic polysaccharide, cationic or polycationic lipid, cationic or polycationic protein, cationic or polycationic peptide, or any combinations thereof.

[0527] The term “cationic or polycationic compound” as used herein will be recognized and understood by the person of ordinary skill in the art, and are for example intended to refer to a charged molecule, which is positively charged at a pH value ranging from about 1 to 9, at a pH value ranging from about 3 to 8, at a pH value ranging from about 4 to 8, at a pH value ranging from about 5 to 8, more preferably at a pH value ranging from about 6 to 8, even more preferably at a pH value ranging from about 7 to 8, most preferably at a physiological pH, e.g. ranging from about 7.2 to about 7.5. Accordingly, a cationic component, e.g. a cationic peptide, cationic protein, cationic polymer, cationic polysaccharide, cationic lipid may be any positively charged compound or polymer which is positively charged under physiological conditions. A “cationic or polycationic peptide or protein” may contain at least one positively charged amino acid, or more than one positively charged amino acid, e.g. selected from Arg, His, Lys or Orn. Accordingly, “polycationic” components are also within the scope exhibiting more than one positive charge under the given conditions.

[0528] Cationic or polycationic compounds, being particularly preferred in this context may be selected from the following list of cationic or polycationic peptides or proteins of fragments thereof: protamine, nucleoline, spermine or spermidine, or other cationic peptides or proteins, such as poly-L-lysine (PLL), poly-arginine, basic polypeptides, cell penetrating peptides (CPPs), including HIV-binding peptides, HIV-1 Tat (HIV), Tat-derived peptides, Penetratin, VP22 derived or analog peptides, HSV VP22 (Herpes simplex), MAP, KALA or protein transduction domains (PTDs), PpT620, prolin-rich peptides, arginine-rich peptides, lysine-rich peptides, MPG-peptide(s), Pep-1, L-oligomers, Calcitonin peptide(s), Antennapedia-derived peptides, pAntp, ps, FGF, Lactoferrin, Transportan, Buforin-2, Bac715-24, SynB, SynB(1), pVEC, hCT-derived peptides, SAP, or histones. More preferably, the nucleic acid as defined herein, preferably the mRNA as defined herein, is complexed with one or more polycations, preferably with protamine or oligofectamine, most preferably with protamine.

[0529] In a preferred embodiment of the second aspect, the at least one artificial RNA of the first aspect and, optionally, the further artificial RNA of the second aspect, is complexed with protamine

[0530] Further preferred cationic or polycationic compounds, which can be used as transfection or complexation agent may include cationic polysaccharides, for example chitosan, polybrene etc.; cationic lipids, e.g. DOTMA, DMRIE, di-C14-amidine, DOTIM, SAINT, DC-Chol, BGTC, CTAP, DOPC, DODAP, DOPE: Dioleyl phosphatidylethanol-amine, DOSPA, DODAB, DOIC, DMEPC, DOGS, DIMRI, DOTAP, DC-6-14, CLIP1, CLIP6, CLIP9, oligofectamine; or cationic or polycationic polymers, e.g. modified polyaminoacids, such as beta-aminoacid-polymers or reversed polyamides, etc., modified polyethylenes, such as PVP etc., modified acrylates, such as pDMAEMA etc., modified amidoamines such as pAMAM etc., modified polybetaaminoester (PBAE), such as diamine end modified 1,4 butanediol diacrylate-co-5-amino-1-pentanol polymers, etc., dendrimers, such as polypropylamine dendrimers or pAMAM based dendrimers, etc., polyimine(s), such as PEI, poly(propyleneimine), etc., polyallylamine, sugar backbone based polymers, such as cyclodextrin based polymers, dextran based polymers, etc., silan backbone based polymers, such as PMOXA-PDMS copolymers, etc., blockpolymers consisting of a combination of one or more cationic blocks (e.g. selected from a cationic polymer as mentioned above) and of one or more hydrophilic or hydrophobic blocks (e.g. polyethyleneglycole); etc.

[0531] In this context it is particularly preferred that the at least one artificial RNA as defined herein and, optionally, the further artificial RNA of the second aspect, is complexed or at least partially complexed with a cationic or polycationic compound and/or a polymeric carrier, preferably cationic proteins or peptides. In this context, the disclosure of WO2010/037539 and WO2012/113513 is incorporated herewith by reference. Partially means that only a part of the artificial nucleic acid is complexed with a cationic compound and that the rest of the artificial nucleic acid is (comprised in the inventive (pharmaceutical) composition) in uncomplexed form (“free”).

[0532] In a preferred embodiment of the second aspect, the at least one artificial RNA of the first aspect and, optionally, the further artificial RNA of the second aspect, is complexed with one or more cationic or polycationic compounds, preferably protamine, and at least one free artificial RNA of the first aspect and, optionally the further RNA of the second aspect.

[0533] In this context it is particularly preferred that the at least one artificial RNA as defined herein, and, optionally, the further artificial RNA of the second aspect, is complexed, or at least partially complexed with protamine.

[0534] Preferably, the molar ratio of the nucleic acid, particularly the RNA of the protamine-complexed RNA to the free RNA may be selected from a molar ratio of about 0.001:1 to about 1:0.001, including a ratio of about 1:1. Suitably, the complexed RNA is complexed with protamine by addition of protamine-trehalose solution to the RNA sample at a RNA:protamine weight to weight ratio (w/w) of 2:1.

[0535] Further preferred cationic or polycationic proteins or peptides that may be used for complexation can be derived from formula (Arg)l;(Lys)m;(His)n;(Orn)o;(Xaa)x of the patent application WO2009/030481 or WO2011/026641, the disclosure of WO2009/030481 or WO2011/026641 relating thereto incorporated herewith by reference.

[0536] In a preferred embodiment of the second aspect, the at least one artificial RNA of the first aspect and, optionally, the further artificial RNA of the second aspect, is complexed, or at least partially complexed with at least one cationic or polycationic proteins or peptides preferably selected from SEQ ID NOs: 64-67, 21320 or any combinations thereof.

[0537] According to embodiments, the composition of the present invention comprises the RNA as defined herein, and a polymeric carrier.

[0538] The term “polymeric carrier” as used herein will be recognized and understood by the person of ordinary skill in the art, and are for example intended to refer to a compound that facilitates transport and/or complexation of another compound (cargo). A polymeric carrier is typically a carrier that is formed of a polymer. A polymeric carrier may be associated to its cargo (nucleic acid, RNA) by covalent or non-covalent interaction.

[0539] A suitable polymeric carrier may be a polymeric carrier formed by disulfide-crosslinked cationic compounds. The disulfide-crosslinked cationic compounds may be the same or different from each other. The polymeric carrier can also contain further components. The polymeric carrier used according to the present invention may comprise mixtures of cationic peptides, proteins or polymers and optionally further components as defined herein, which are crosslinked by disulfide bonds (via —SH groups).

[0540] In this context, polymeric carriers according to formula {(Arg)I;(Lys)m;(His)n;(Orn)o;(Xaa′)x(Cys)y} and formula Cys,{(Arg);(Lys)m;(His)n;(Orn)o;(Xaa)x}Cys2 of the patent application WO2012/013326 are preferred, the disclosure of WO2012/013326 relating thereto incorporated herewith by reference.

[0541] In embodiments, the polymeric carrier used to complex the RNA as defined herein may be derived from a polymeric carrier molecule according formula (L-P¹-S-[S-P²-S]ₙ-S-P¹-L) of the patent application WO2011/026641, the disclosure of WO2011/026641 relating thereto incorporated herewith by reference.

[0542] In embodiments, the polymeric carrier compound is formed by, or comprises or consists of the peptide elements CysArg12Cys (SEQ ID NO: 64) or CysArg12 (SEQ ID NO: 65) or TrpArg12Cys (SEQ ID NO: 66). In particularly preferred embodiments, the polymeric carrier compound consists of a (R₁₂C)-(R₁₂C) dimer, a (WR₁₂C)-(WR₁₂C) dimer, or a (CR₁₂)-(CR₁₂C)-(CR₁₂) trimer, wherein the individual peptide elements in the dimer (e.g. (WR₁₂C)), or the trimer (e.g. (CR₁₂)), are connected via —SH groups.

[0543] In a preferred embodiment of the second aspect, the at least one artificial RNA of the first aspect and optionally the further artificial RNA of the second aspect, is complexed or associated with a polyethylene glycol/peptide polymer comprising HO-PEG5000-S-(S-CHHHHHHRRRRHHHHHHC-S-)7-S-PEG5000-OH (SEQ ID NO: 67 as peptide monomer).

[0544] In a further preferred embodiment of the second aspect, the at least one artificial RNA of the first aspect and, optionally, the further artificial RNA of the second aspect, is complexed or associated with a polyethylene glycol/peptide polymer comprising HO-PEG5000-S-(S-CHHHHHHRRRRHHHHHHC-S-)4-S-PEG5000-OH (SEQ ID NO: 67 as peptide monomer).

[0545] In a further preferred embodiment of the second aspect, the at least one artificial RNA of the first aspect and, optionally, the further artificial RNA of the second aspect, is complexed or associated with a polyethylene glycol/peptide polymer comprising HO-PEG5000-S-(S-CGHHHHHRRRRHHHHHGC-S-)7-S-PEG5000-OH (SEQ ID NO: 21320 as peptide monomer).

[0546] In a further preferred embodiment of the second aspect, the at least one artificial RNA of the first aspect and, optionally, the further artificial RNA of the second aspect, is complexed or associated with a polyethylene glycol/peptide polymer comprising HO-PEG5000-S-(S-CGHHHHHRRRRHHHHHGC-S-)4-S-PEG5000-OH (SEQ ID NO: 21320 as peptide monomer).

[0547] In other embodiments, the composition comprises at least one artificial RNA as described herein, and, optionally, the further artificial RNA of the second aspect, wherein the at least one artificial RNA and, optionally, the further artificial RNA of the second aspect, is complexed or associated with polymeric carriers and, optionally, with at least one lipid component as described in the published PCT applications WO2017/212008A1, WO2017/212006A1, WO2017/212007A1, and WO2017/212009A1. In this context, the disclosures of WO2017/212008A1, WO2017/212006A1, WO2017/212007A1, and WO2017/212009A1 are herewith incorporated by reference.

[0548] In a particularly preferred embodiment, the polymeric carrier is a peptide polymer, preferably a polyethylene glycol/peptide polymer as defined above, and a lipid component, preferably a lipidoid component, more preferably lipidoid component.

[0549] In preferred embodiment of the second aspect, the at least one artificial RNA of the first aspect and, optionally, the further artificial RNA of the second aspect, is complexed or associated with a polymeric carrier, preferably with a polyethylene glycol/peptide polymer as defined above, and a lipidoid component, wherein the lipidoid component is a compound according to formula A

[chemical structure]

[0550] wherein
[0551] R_{A} is independently selected for each occurrence an unsubstituted, cyclic or acyclic, branched or unbranched C₁₋₂₀ aliphatic group; a substituted or unsubstituted, cyclic or acyclic, branched or unbranched C₁₋₂₀ heteroaliphatic group; a substituted or unsubstituted aryl; a substituted or unsubstituted heteroaryl;

[chemical structure]

[0552] wherein at least one R_{A} is

[chemical structure]

[0553] R₅ is independently selected for each occurrence of from an unsubstituted, cyclic or acyclic, branched or unbranched C₈₋₁₆ aliphatic; a substituted or unsubstituted aryl; or a substituted or unsubstituted heteroaryl;
[0554] each occurrence of x is an integer from 1 to 10;
[0555] each occurrence of y is an integer from 1 to 10;

[0556] or a pharmaceutically acceptable salt thereof.

[0557] In a preferred embodiment, the lipidoid component is 3-C12-OH according to formula B

[chemical structure]

[0558] In preferred embodiments, the peptide polymer comprising lipidoid 3-C12-OH as specified above is used to complex the RNA of the first aspect and, optionally, the further artificial RNA of the second aspect, to form complexes having an N/P ratio from about 0.1 to about 20, or from about 0.2 to about 15, or from about 2 to about 15, or from about 2 to about 12, wherein the N/P ratio is defined as the mole ratio of the nitrogen atoms of the basic groups of the cationic peptide or polymer to the phosphate groups of the artificial nucleic acid. In that context, the disclosure of WO2017/212009A1, in particular Claims 1 to 10 of WO2017/212009A1, and the specific disclosure relating thereto is herewith incorporated by reference.

[0559] Encapsulation/Complexation in LNPs:

[0560] In preferred embodiments of the second aspect, the artificial RNA of the first aspect and, optionally, the further artificial RNA of the second aspect, is complexed or associated with one or more lipids (e.g. cationic lipids and/or neutral lipids), thereby forming liposomes, lipid nanoparticles (LNPs), lipoplexes, and/or nanoliposomes.

[0561] For compositions comprising more than one artificial RNA construct as defined herein (e,g, F-del and M2-1), said constructs may be co-formulated in e.g. LNPs to form the respective composition.

[0562] Alternatively, said more than one artificial RNA constructs may be formulated separately, and may subsequently be combined, to form the respective composition.

[0563] In this context, the terms “complexed” or “associated” refer to the essentially stable combination of artificial RNA of the first aspect and, optionally, the further artificial RNA of the second aspect, with one or more lipids into larger complexes or assemblies without covalent binding.

[0564] The term “lipid nanoparticle”, also referred to as “LNP”, is not restricted to any particular morphology, and include any morphology generated when a cationic lipid and optionally one or more further lipids are combined, e.g. in an aqueous environment and/or in the presence of RNA. For example, a liposome, a lipid complex, a lipoplex and the like are within the scope of a lipid nanoparticle (LNP).

[0565] Accordingly, in preferred embodiments of the second aspect, the artificial RNA of the first aspect and, optionally, the further artificial RNA of the second aspect, is complexed with one or more lipids thereby forming lipid nanoparticles (LNP).

[0566] LNPs typically comprise a cationic lipid and one or more excipient selected from neutral lipids, charged lipids, steroids and polymer conjugated lipids (e.g. PEGylated lipid). The RNA may be encapsulated in the lipid portion of the LNP or an aqueous space enveloped by some or the entire lipid portion of the LNP. The RNA or a portion thereof may also be associated and complexed with the LNP. An LNP may comprise any lipid capable of forming a particle to which the nucleic acids are attached, or in which the one or more nucleic acids are encapsulated.

[0567] Preferably, the LNP comprising nucleic acids comprises one or more cationic lipids, and one or more stabilizing lipids. Stabilizing lipids include neutral lipids and PEGylated lipids.

[0568] The cationic lipid of an LNP may be cationisable, i.e. it becomes protonated as the pH is lowered below the pK of the ionizable group of the lipid, but is progressively more neutral at higher pH values. At pH values below the pK, the lipid is then able to associate with negatively charged nucleic acids. In certain embodiments, the cationic lipid comprises a zwitterionic lipid that assumes a positive charge on pH decrease.

[0569] The LNP may comprise any further cationic or cationisable lipid, i.e. any of a number of lipid species which carry a net positive charge at a selective pH, such as physiological pH.

[0570] Such lipids include, but are not limited to, N,N-dioleyl-N,N-dimethylammonium chloride (DODAC), N,N-distearyl-N,N-dimethylammonium bromide (DDAB), 1,2-dioleoyltrimethyl ammonium propane chloride (DOTAP) (also known as N-(2,3-dioleoyloxy)propyl)-N,N,N-trimethylammonium chloride and 1,2-Dioleyloxy-3-trimethylaminopropane chloride salt), N-(1-(2,3-dioleyloxy)propyl)-N,N,N-trimethylammonium chloride (DOTMA), N,N-dimethyl-2,3-dioleyloxy)propylamine (DODMA), 1,2-DiLinoleyloxy-N,N-dimethylaminopropane (DLinDMA), 1,2-Dilinolenyloxy-N,N-dimethylaminopropane (DLenDMA), 1,2-di-y-linolenyloxy-N,N-dimethylaminopropane (γ-DLenDMA), 1,2-Dilinoleylcarbamoyloxy-3-dimethylaminopropane (DLin-C-DAP), 1,2-Dilinoleyoxy-3-(dimethylamino)acetoxypropane (DLin-DAC), 1,2-Dilinoleyoxy-3-morpholinopropane (DLin-MA), 1,2-Dilinoleoyl-3-dimethylaminopropane (DLinDAP), 1,2-Dilinoleylthio-3-dimethylaminopropane (DLin-S-DMA), 1-Linoleoyl-2-linoleyloxy-3-dimethylaminopropane (DLin-2-DMAP), 1,2-Dilinoleyloxy-3-trimethylaminopropane chloride salt (DLin-TMA.CI), 1,2-Dilinoleoyl-3-trimethylaminopropane chloride salt (DLin-TAP.CI), 1,2-Dilinoleyloxy-3-(N-methylpiperazino)propane (DLin-MPZ), or 3-(N,N-Dilinoleylamino)-1,2-propanediol (DLinAP), 3-(N,N-Dioleylamino)-1,2-propanedio (DOAP), 1,2-Dilinoleyloxo-3-(2-N,N-dimethylamino)ethoxypropane (DLin-EG-DM A), 2,2-Dilinoleyl-4-dimethylaminomethyl-[1,3]-dioxolane (DLin-K-DMA) or analogs thereof, (3aR,5s,6aS)-N,N-dimethyl-2,2-di((9Z,12Z)-octadeca-9,12-dienyl)tetrahydro-3aH-cyclopenta[d][1,3]dioxol-5-amine, (6Z,9Z,28Z,31Z)-heptatriaconta-6,9,28,31-tetraen-19-yl-4-(dimethylamino)butanoate (MC3), 1,1′-(2-(4-(2-((2-(bis(2-hydroxydodecyl)amino)ethyl)(2-hydroxydodecyl)amino)ethyl)piperazin-1-yl)ethylazanediyl)didodecan-2-ol(C12-200), 2,2-dilinoleyl-4-(2-dimethylaminoethyl)-[1,3]-dioxolane(DLin-K-C2-DMA), 2,2-dilinoleyl-4-dimethylaminomethyl-[1,3]-dioxolane (DLin-K-DMA), (6Z,9Z,28Z,31Z)-heptatriaconta-6,9,28,31-tetraen-19-yl 4-(dimethylamino) butanoate (DLin-M-C3-DMA), 3-((6Z,9Z,28Z,31Z)-heptatriaconta-6,9,28,31-tetraen-19-yloxy)-N,N-dimethylpropan-1-amine (MC3 Ether), 4-((6Z,9Z,28Z,31Z)-heptatriaconta-6,9,28,31-tetraen-19-yloxy)-N,N-dimethylbutan-1-amine (MC4 Ether), LIPOFECTIN® (commercially available cationic liposomes comprising DOTMA and 1,2-dioleoyl-sn-3phosphoethanolamine (DOPE), from GIBCO/BRL, Grand Island, N.Y.); LIPOFECTAMINE® (commercially available cationic liposomes comprising N-(1-(2,3dioleyloxy)propyl)-N-(2-(sperminecarboxamido)ethyl)-N,N-dimethylammonium trifluoroacetate (DOSPA) and (DOPE), from GIBCO/BRL); and TRANSFECTAM® (commercially available cationic lipids comprising dioctadecylamidoglycyl carboxyspermine (DOGS) in ethanol from Promega Corp., Madison, Wis.) or any combination of any of the foregoing.

[0571] In some embodiments, the lipid is selected from the group consisting of 98N12-5, C12-200, and ckk-E12.

[0572] In one embodiment, the further cationic lipid is an amino lipid.

[0573] Representative amino lipids include, but are not limited to, 1,2-dilinoleyoxy-3-(dimethylamino)acetoxypropane (DLin-DAC), 1,2-dilinoleyoxy-3morpholinopropane (DLin-MA), 1,2-dilinoleoyl-3-dimethylaminopropane (DLinDAP), 1,2-dilinoleylthio-3-dimethylaminopropane (DLin-S-DMA), 1-linoleoyl-2-linoleyloxy-3dimethylaminopropane (DLin-2-DMAP), 1,2-dilinoleyloxy-3-trimethylaminopropane chloride salt (DLin-TMA.CI), 1,2-dilinoleoyl-3-trimethylaminopropane chloride salt (DLin-TAP.CI), 1,2-dilinoleyloxy-3-(N-methylpiperazino)propane (DLin-MPZ), 3-(N,Ndilinoleylamino)-1,2-propanediol (DLinAP), 3-(N,N-dioleylamino)-1,2-propanediol (DOAP), 1,2-dilinoleyloxo-3-(2-N,N-dimethylamino)ethoxypropane (DLin-EG-DMA), and 2,2-dilinoleyl-4-dimethylaminomethyl-[1,3]-dioxolane (DLin-K-DMA), 2,2-dilinoleyl-4-(2-dimethylaminoethyl)-[1,3]-dioxolane (DLin-KC2-DMA); dilinoleyl-methyl-4-dimethylaminobutyrate (DLin-MC3-DMA); MC3 (US20100324120).

[0574] In one embodiment, the artificial RNA of the first aspect and, optionally, the further artificial RNA of the second aspect, may be formulated in an aminoalcohol lipidoid. Aminoalcohol lipidoids which may be used in the present invention may be prepared by the methods described in U.S. Pat. No. 8,450,298, herein incorporated by reference in its entirety. Suitable (ionizable) lipids can also be the compounds as disclosed in Tables 1, 2 and 3 and as defined in claims 1-24 of WO2017/075531A1, hereby incorporated by reference.

[0575] In another embodiment, ionizable lipids can also be the compounds as disclosed in WO2015/074085A1 (i.e. ATX-001 to ATX-032 or the compounds as specified in claims 1-26), U.S. Appl. Nos. 61/905,724 and 15/614,499 or U.S. Pat. Nos. 9,593,077 and 9,567,296 hereby incorporated by reference in their entirety.

[0576] In that context, any lipid derived from generic formula (X1)

[chemical structure]

[0577] wherein, Ri and R2 are the same or different, each a linear or branched alkyl consisting of 1 to 9 carbons, an alkenyl or alkynyl consisting of 2 to 11 carbons, Li and L2 are the same or different, each a linear alkylene or alkenylene consisting of 5 to 18 carbons, or forming a heterocycle with N, Xi is a bond, or is —CO—O— whereby -L2-CO—O—R2 is formed, X2 is S or O, L3 is a bond or a linear or branched alkylene consisting of 1 to 6 carbons, or forming a heterocycle with N, R3 is a linear or branched alkylene consisting of 1 to 6 carbons, and R4 and R 5 are the same or different, each hydrogen or a linear or branched alkyl consisting of 1 to 6 carbons; or a pharmaceutically acceptable salt thereof may be suitably used.

[0578] In other embodiments, suitable cationic lipids can also be the compounds as disclosed in WO2017/117530A1 (i.e. lipids 13, 14, 15, 16, 17, 18, 19, 20, or the compounds as specified in the claims), hereby incorporated by reference in its entirety.

[0579] In that context, any lipid derived from generic formula (X2)

[chemical structure]

[0580] wherein

[0581] X is a linear or branched alkylene or alkenylene, monocyclic, bicyclic, or tricyclic arene or heteroarene;

[0582] Y is a bond, an ethene, or an unsubstituted or substituted aromatic or heteroaromatic ring; Z is S or O;

[0583] L is a linear or branched alkylene of 1 to 6 carbons;

[0584] R-3 and R4 are independently a linear or branched alkyl of 1 to 6 carbons;

[0585] Ri and R2 are independently a linear or branched alkyl or alkenyl of 1 to 20 carbons; r is 0 to 6; and

[0586] m, n, p, and q are independently 1 to 18;

[0587] wherein when n=q, m=p, and Ri=R2, then X and Y differ;

[0588] wherein when X=Y, n=q, m=p, then Ri and R2 differ;

[0589] wherein when X=Y, n=q, and Ri=R2, then m and p differ; and

[0590] wherein when X=Y, m=p, and Ri=R2, then n and q differ;

[0591] or a pharmaceutically acceptable salt thereof.

[0592] In preferred embodiments, a lipid may be used derived from formula (X2), wherein, X is a bond, linear or branched alkylene, alkenylene, or monocyclic, bicyclic, or tricyclic arene or heteroarene; Y is a monocyclic, bicyclic, or tricyclic arene or heteroarene; Z is S or O; L is a linear or branched alkylene of 1 to 6 carbons; R3 and R4 are independently a linear or branched alkyl of 1 to 6 carbons; Ri and R2 are independently a linear or branched alkyl or alkenyl of 1 to 20 carbons; r is 0 to 6; and m, n, p, and q are independently 1 to 18; or a pharmaceutically acceptable salt thereof may be suitably used.

[0593] In preferred embodiments, ionizable lipids may also be selected from the lipid compounds disclosed in PCT application PCT/EP2017/077517 (i.e. lipid compounds derived form formula I, II, and III of PCT/EP2017/077517, or lipid compounds as specified in Claims 1 to 12 of PCT/EP2017/077517), the disclosure of PCT/EP2017/077517 hereby incorporated by reference in its entirety. In that context, lipid compounds disclosed in Table 7 of PCT/EP2017/077517 (e.g. lipid compounds derived from formula I-1 to I-41) and lipid compounds disclosed in Table 8 of PCT/EP2017/077517 (e.g. lipid compounds derived from formula I-1 to II-36) may be suitably used in the context of the invention. Accordingly, formula I-1 to formula I-41 and formula II-1 to formula I-36 of PCT/EP2017/077517, and the specific disclosure relating thereto, are herewith incorporated by reference.

[0594] In particularly preferred embodiments of the second aspect, a suitable lipid may be a cationic lipid according to formula (III)

[chemical structure]

[0595] or a pharmaceutically acceptable salt, tautomer, prodrug or stereoisomer thereof, wherein, R1, R2, R3, L1, L2, G1, G2, and G3 are as below.

[0596] Formula (III) is further defined in that:

[0597] one of L¹ or L² is —O(C═O)—, —(C═O)O—, —C(═O)—, —O—, —S(O)—, —S—S—, —C(═O)S—, SC(═O)—, —NR^{a}C(═O)—, —C(═O)NR^{a}—, —NR^{a}C(═O)NR^{a}—, —OC(═O)NR^{a}— or —NR^{a}C(═O)O—, and the other of L1 or L² is —O(C═O)—, —(C═O)O—, —C(═O)—, —O—, —S(O)—, —S—S—, —C(═O)S—, SC(═O)—, —NR^{a}C(═O)—, —C(═O)NR^{a}—, —NR^{a}C(═O)NR^{a}—, —OC(═O)NR^{a}— or —NR^{a}C(═O)O— or a direct bond;

[0598] G¹ and G² are each independently unsubstituted C₁-C₁₂ alkylene or C₁-C₁₂ alkenylene;

[0599] G³ is C₁-C₂₄ alkylene, C₁-C₂₄ alkenylene, C₃-C₈ cycloalkylene, C₃-C₈ cycloalkenylene;

[0600] R^{a} is H or C₁-C₁₂ alkyl;

[0601] R¹ and R² are each independently C₆-C₂₄ alkyl or C₆-C₂₄ alkenyl;

[0602] R³ is H, OR⁵, CN, —C(═O)OR⁴, —OC(═O)R⁴ or —NR⁵C(═O)R⁴;

[0603] R⁴ is C₁-C₁₂ alkyl;

[0604] R⁵ is H or C₁-C₁₂ alkyl; and

[0605] x is 0, 1 or 2.

[0606] In some of the foregoing embodiments of formula (III), the lipid has one of the following structures (IIIA) or (IIIB):

[chemical structure]

[0607] wherein:

[0608] A is a 3 to 8-membered cycloalkyl or cycloalkylene ring; R⁶ is, at each occurrence, independently H, OH or C₁-C₂₄ alkyl; n is an integer ranging from 1 to 15.

[0609] In some of the foregoing embodiments of formula (III), the lipid has structure (IIIA), and in other embodiments, the lipid has structure (IIIB).

[0610] In other embodiments of formula (III), the lipid has one of the following structures (IIC) or (IIID):

[chemical structure]

[0611] wherein y and z are each independently integers ranging from 1 to 12.

[0612] In any of the foregoing embodiments of formula (III), one of L¹ or L² is —O(C═O)—. For example, in some embodiments each of L¹ and L² are —O(C═O)—. In some different embodiments of any of the foregoing, L¹ and L² are each independently —(C═O)O— or —O(C═O)—. For example, in some embodiments each of L¹ and L² is —(C═O)O—.

[0613] In preferred embodiments of the second aspect, the cationic lipid of the LNP is a compound of formula I, wherein:

[0614] L¹ and L² are each independently —O(C═O)— or (C═O)—O—;

[0615] G³ is C₁-C₂₄ alkylene or C₁-C₂₄ alkenylene; and

[0616] R³ is H or OR⁵.

[0617] In some different embodiments of formula (III), the lipid has one of the following structures (IIIE) or (IIIF):

[chemical structure]

[0618] In some of the foregoing embodiments of formula (III), the lipid has one of the following structures (IIIG), (IIIH),

[chemical structure]

[0619] In some of the foregoing embodiments of formula (III), n is an integer ranging from 2 to 12, for example from 2 to 8 or from 2 to 4. In some embodiments, n is 3, 4, 5 or 6. In some embodiments, n is 3. In some embodiments, n is 4. In some embodiments, n is 5. In some embodiments, n is 6. In some other of the foregoing embodiments of formula (III), y and z are each independently an integer ranging from 2 to 10. For example, in some embodiments, y and z are each independently an integer ranging from 4 to 9 or from 4 to 6. In some of the foregoing embodiments of formula (II), R⁶ is H. In other of the foregoing embodiments, R⁶ is C₁-C₂₄ alkyl. In other embodiments, R⁶ is OH. In some embodiments of formula (III), G3 is unsubstituted. In other embodiments, G3 is substituted. In various different embodiments, G³ is linear C₁-C₂₄ alkylene or linear C₁-C₂₄ alkenylene. In some other foregoing embodiments of formula (III), R¹ or R², or both, is C₆-C₂₄ alkenyl. For example, in some embodiments, R¹ and R² each, independently have the following structure:

[chemical structure]

[0620] wherein:

[0621] R^{7a} and R^{7b} are, at each occurrence, independently H or C₁-C₁₂ alkyl; and a is an integer from 2 to 12, wherein

[0622] R^{7a}, R^{7b} and a are each selected such that R¹ and R² each independently comprise from 6 to 20 carbon atoms. For example, in some embodiments a is an integer ranging from 5 to 9 or from 8 to 12. In some of the foregoing embodiments of formula (III), at least one occurrence of R^{7a} is H. For example, in some embodiments, R^{7a} is H at each occurrence. In other different embodiments of the foregoing, at least one occurrence of R^{7b} is C₁-C₈ alkyl. For example, in some embodiments, C₁-C₈ alkyl is methyl, ethyl, n-propyl, iso-propyl, n-butyl, iso-butyl, tert-butyl, n-hexyl or n-octyl.

[0623] In different embodiments of formula (III), R¹ or R², or both, has one of the following structures:

[chemical structure]

[0624] In preferred embodiments of the second aspect, the cationic lipid of the LNP is a compound of formula III, wherein:

[0625] L¹ and L² are each independently —O(C═O)— or (C═O)—O—; and

[0626] R¹ and R² each independently have one of the following structures:

[chemical structure]

[0627] In some of the foregoing embodiments of formula (III), R³ is OH, CN, —C(═O)OR⁴, —OC(═O)R⁴ or —NHC(═O)R⁴. In some embodiments, R⁴ is methyl or ethyl.

[0628] In preferred embodiments of the second aspect, the cationic lipid of the LNP is a compound of formula II, wherein R³ is OH.

[0629] In particularly preferred embodiment of the second aspect, the artificial RNA of the first aspect and, optionally, the further artificial RNA of the second aspect, is complexed with one or more lipids thereby forming lipid nanoparticles (LNP), wherein the LNP is selected from structures III-1 to III-36 (see Table 8).

TABLE 8
Representative lipid compounds derived from formula (III)

| No. | Structure |
|---|---|
| III-1 | [chemical structure] |
| III-2 | [chemical structure] |
| III-3 | [chemical structure] |
| III-4 | [chemical structure] |
| III-5 | [chemical structure] |
| III-6 | [chemical structure] |
| III-7 | [chemical structure] |
| III-8 | [chemical structure] |
| III-9 | [chemical structure] |
| III-10 | [chemical structure] |
| III-11 | [chemical structure] |
| III-12 | [chemical structure] |
| III-13 | [chemical structure] |
| III-14 | [chemical structure] |
| III-15 | [chemical structure] |
| III-16 | [chemical structure] |
| III-17 | [chemical structure] |
| III-18 | [chemical structure] |
| III-19 | [chemical structure] |
| III-20 | [chemical structure] |
| III-21 | [chemical structure] |
| III-22 | [chemical structure] |
| III-23 | [chemical structure] |
| III-24 | [chemical structure] |
| III-25 | [chemical structure] |
| III-26 | [chemical structure] |
| III-27 | [chemical structure] |
| III-28 | [chemical structure] |
| III-29 | [chemical structure] |
| III-30 | [chemical structure] |
| III-31 | [chemical structure] |
| III-32 | [chemical structure] |
| III-33 | [chemical structure] |
| III-34 | [chemical structure] |
| III-35 | [chemical structure] |
| III-36 | [chemical structure] |

[0630] In some embodiments, the LNPs comprise a lipid of formula (III), an artificial RNA of the first aspect, and, optionally, the further artificial RNA of the second aspect, and one or more excipient selected from neutral lipids, steroids and PEGylated lipids. In some embodiments the lipid of formula (III) is compound III-3. In some embodiments the lipid of formula (III) is compound III-7.

[0631] In preferred embodiments, the LNP comprises a cationic lipid selected from:

[chemical structure]

[0632] In particularly preferred embodiment of the second aspect, the artificial RNA of the first aspect and, optionally, the further artificial RNA of the second aspect, is complexed with one or more lipids thereby forming lipid nanoparticles (LNP), wherein the LNP comprises the following cationic lipid (lipid according to formula III-3 of Table 8):

[chemical structure]

[0633] In certain embodiments, the cationic lipid as defined herein, preferably as disclosed in Table 8, more preferably cationic lipid compound III-3, is present in the LNP in an amount from about 30 to about 95 mole percent, relative to the total lipid content of the LNP. If more than one cationic lipid is incorporated within the LNP, such percentages apply to the combined cationic lipids.

[0634] In one embodiment, the cationic lipid is present in the LNP in an amount from about 30 to about 70 mole percent. In one embodiment, the cationic lipid is present in the LNP in an amount from about 40 to about 60 mole percent, such as about 40, 41, 42, 43, 44, 45, 46, 47, 48, 49, 50, 51, 52, 53, 54, 55, 56, 57, 58, 59 or 60 mole percent, respectively. In embodiments, the cationic lipid is present in the LNP in an amount from about 47 to about 48 mole percent, such as about 47.0, 47.1, 47.2, 47.3, 47.4, 47.5, 47.6, 47.7, 47.8, 47.9, 50.0 mole percent, respectively, wherein 47.7 mole percent are particularly preferred.

[0635] In some embodiments, the cationic lipid is present in a ratio of from about 20 mol % to about 70 or 75 mol % or from about 45 to about 65 mol % or about 20, 25, 30, 35, 40, 45, 50, 55, 60, 65, or about 70 mol % of the total lipid present in the LNP. In further embodiments, the LNPs comprise from about 25% to about 75% on a molar basis of cationic lipid, e.g., from about 20 to about 70%, from about 35 to about 65%, from about 45 to about 65%, about 60%, about 57.5%, about 57.1%, about 50% or about 40% on a molar basis (based upon 100% total moles of lipid in the lipid nanoparticle). In some embodiments, the ratio of cationic lipid to nucleic acid, preferably to the artificial RNA of the first aspect, and, optionally, the further artificial RNA of the second aspect, is from about 3 to about 15, such as from about 5 to about 13 or from about 7 to about 11.

[0636] In some embodiments of the invention the LNP comprises a combination or mixture of any the lipids described above.

[0637] Other suitable (cationic) lipids are disclosed in WO2009/086558, WO2009/127060, WO2010/048536, WO2010/054406, WO2010/088537, WO2010/129709, WO2011/153493, US2011/0256175, US2012/0128760, US2012/0027803, U.S. Pat. No. 8,158,601, WO2016/118724, WO2016/118725, WO2017/070613, WO2017/070620, WO2017/099823, and WO2017/112865. In that context, the disclosures of WO2009/086558, WO2009/127060, WO2010/048536, WO2010/054406, WO2010/088537, WO2010/129709, WO2011/153493, US2011/0256175, US2012/0128760, US2012/0027803, U.S. Pat. No. 8,158,601, WO2016/118724, WO2016/118725, WO2017/070613, WO2017/070620, WO2017/099823, and WO2017/112865 specifically relating to (cationic) lipids suitable for LNPs are incorporated herewith by reference.

[0638] In some embodiments, the lipid is selected from the group consisting of 98N12-5, C12-200, and ckk-E12.

[0639] In some embodiments, amino or cationic lipids as defined herein have at least one protonatable or deprotonatable group, such that the lipid is positively charged at a pH at or below physiological pH (e.g. pH 7.4), and neutral at a second pH, preferably at or above physiological pH. It will, of course, be understood that the addition or removal of protons as a function of pH is an equilibrium process, and that the reference to a charged or a neutral lipid refers to the nature of the predominant species and does not require that all of lipids have to be present in the charged or neutral form. Lipids having more than one protonatable or deprotonatable group, or which are zwitterionic, are not excluded and may likewise suitable in the context of the present invention.

[0640] In some embodiments, the protonatable lipids have a pKa of the protonatable group in the range of about 4 to about 11, e.g., a pKa of about 5 to about 7.

[0641] LNPs can comprise two or more (different) cationic lipids. The cationic lipids may be selected to contribute different advantageous properties. For example, cationic lipids that differ in properties such as amine pKa, chemical stability, half-life in circulation, half-life in tissue, net accumulation in tissue, or toxicity can be used in the LNP. In particular, the cationic lipids can be chosen so that the properties of the mixed-LNP are more desirable than the properties of a single-LNP of individual lipids.

[0642] The amount of the permanently cationic lipid or lipidoid may be selected taking the amount of the nucleic acid cargo into account. In one embodiment, these amounts are selected such as to result in an N/P ratio of the nanoparticle(s) or of the composition in the range from about 0.1 to about 20. In this context, the N/P ratio is defined as the mole ratio of the nitrogen atoms (“N”) of the basic nitrogen-containing groups of the lipid or lipidoid to the phosphate groups (“P”) of the RNA which is used as cargo. The N/P ratio may be calculated on the basis that, for example, 1 μg RNA typically contains about 3 nmol phosphate residues, provided that the RNA exhibits a statistical distribution of bases. The “N”-value of the lipid or lipidoid may be calculated on the basis of its molecular weight and the relative content of permanently cationic and—if present—cationisable groups.

[0643] LNP in vivo characteristics and behavior can be modified by addition of a hydrophilic polymer coating, e.g. polyethylene glycol (PEG), to the LNP surface to confer steric stabilization. Furthermore, LNPs can be used for specific targeting by attaching ligands (e.g. antibodies, peptides, and carbohydrates) to its surface or to the terminal end of the attached PEG chains (e.g. via PEGylated lipids).

[0644] In some embodiments, the LNPs comprise a polymer conjugated lipid. The term “polymer conjugated lipid” refers to a molecule comprising both a lipid portion and a polymer portion. An example of a polymer conjugated lipid is a PEGylated lipid. The term “PEGylated lipid” refers to a molecule comprising both a lipid portion and a polyethylene glycol portion. PEGylated lipids are known in the art and include 1-(monomethoxy-polyethyleneglycol)-2,3-dimyristoylglycerol (PEG-s-DMG) and the like.

[0645] In certain embodiments, the LNP comprises an additional, stabilizing-lipid which is a polyethylene glycol-lipid (PEGylated lipid). Suitable polyethylene glycol-lipids include PEG-modified phosphatidylethanolamine, PEG-modified phosphatidic acid, PEG-modified ceramides (e.g. PEG-CerC14 or PEG-CerC20), PEG-modified dialkylamines, PEG-modified diacylglycerols, PEG-modified dialkylglycerols. Representative polyethylene glycol-lipids include PEG-c-DOMG, PEG-c-DMA, and PEG-s-DMG. In one embodiment, the polyethylene glycol-lipid is N-[(methoxy poly(ethylene glycol)2000)carbamyl]-1,2-dimyristyloxlpropyl-3-amine (PEG-c-DMA). In a preferred embodiment, the polyethylene glycol-lipid is PEG-2000-DMG. In one embodiment, the polyethylene glycol-lipid is PEG-c-DOMG). In other embodiments, the LNPs comprise a PEGylated diacylglycerol (PEG-DAG) such as 1-(monomethoxy-polyethyleneglycol)-2,3-dimyristoylglycerol (PEG-DMG), a PEGylated phosphatidylethanoloamine (PEG-PE), a PEG succinate diacylglycerol (PEG-S-DAG) such as 4-O-(2′,3′-di(tetradecanoyloxy)propyl-1-O-(w-methoxy(polyethoxy)ethyl)butanedioate (PEG-S-DMG), a PEGylated ceramide (PEG-cer), or a PEG dialkoxypropylcarbamate such as w-methoxy(polyethoxy)ethyl-N-(2,3di(tetradecanoxy)propyl)carbamate or 2,3-di(tetradecanoxy)propyl-N-(w-methoxy(polyethoxy)ethyl)carbamate.

[0646] In preferred embodiments of the second aspect, the artificial RNA of the first aspect and, optionally, the further artificial RNA of the second aspect, is complexed with one or more lipids thereby forming lipid nanoparticles (LNP), wherein the LNP additionally comprises a PEGylated lipid with the formula (IV):

[chemical structure]

[0647] or a pharmaceutically acceptable salt, tautomer or stereoisomer thereof, wherein R⁸ and R⁹ are each independently a straight or branched, saturated or unsaturated alkyl chain containing from 10 to 30 carbon atoms, wherein the alkyl chain is optionally interrupted by one or more ester bonds; and w has mean value ranging from 30 to 60.

[0648] In some of the foregoing embodiments of the PEGylated lipid according to formula (IV), R⁸ and R⁹ are not both n-octadecyl when w is 42. In some other embodiments, R⁸ and R⁹ are each independently a straight or branched, saturated or unsaturated alkyl chain containing from 10 to 18 carbon atoms. In some embodiments, R⁸ and R⁹ are each independently a straight or branched, saturated or unsaturated alkyl chain containing from 12 to 16 carbon atoms. In some embodiments, R⁸ and R⁹ are each independently a straight or branched, saturated or unsaturated alkyl chain containing 12 carbon atoms. In some embodiments, R⁸ and R⁹ are each independently a straight or branched, saturated or unsaturated alkyl chain containing 14 carbon atoms. In other embodiments, R⁸ and R⁹ are each independently a straight or branched, saturated or unsaturated alkyl chain containing 16 carbon atoms. In still more embodiments, R⁸ and R⁹ are each independently a straight or branched, saturated or unsaturated alkyl chain containing 18 carbon atoms. In still other embodiments, R⁸ is a straight or branched, saturated or unsaturated alkyl chain containing 12 carbon atoms and R⁹ is a straight or branched, saturated or unsaturated alkyl chain containing 14 carbon atoms.

[0649] In various embodiments, w spans a range that is selected such that the PEG portion of the PEGylated lipid according to formula (IV) has an average molecular weight of about 400 to about 6000 g/mol. In some embodiments, the average w is about 50.

[0650] In preferred embodiments of the second aspect, R⁸ and R⁹ of the PEGylated lipid according to formula (IV) are saturated alkyl chains.

[0651] In a particularly preferred embodiment of the second aspect, the artificial RNA of the first aspect and, optionally, the further artificial RNA of the second aspect, is complexed with one or more lipids thereby forming lipid nanoparticles (LNP), wherein the LNP additionally comprises a PEGylated lipid, wherein the PEG lipid is of formula (IVa)

[chemical structure]

[0652] wherein n has a mean value ranging from 30 to 60, such as about 28 to about 32, about 30 to about 34, 32 to about 36, about 34 to about 38, 36 to about 40, about 38 to about 42, 40 to about 44, about 42 to about 46, 44 to about 48, about 46 to about 50, 48 to about 52, about 50 to about 54, 52 to about 56, about 54 to about 58, 56 to about 60, about 58 to about 62. In preferred embodiments, n is about 45, 46, 47, 48, 49, 50, 51, 52, 53, 54. In a most preferred embodiment n has a mean value of 49.

[0653] In other embodiments, the PEGylated lipid has one of the following structures:

[chemical structure]

[0654] wherein n is an integer selected such that the average molecular weight of the PEGylated lipid is about 2500 g/mol, most preferably n is about 49.

[0655] Further examples of PEG-lipids suitable in that context are provided in US2015/0376115A1 and WO2015/199952, each of which is incorporated by reference in its entirety.

[0656] In some embodiments, LNPs include less than about 3, 2, or 1 mole percent of PEG or PEG-modified lipid, based on the total moles of lipid in the LNP. In further embodiments, LNPs comprise from about 0.1% to about 20% of the PEG-modified lipid on a molar basis, e.g., about 0.5 to about 10%, about 0.5 to about 5%. about 10%. about 5%, about 3.5%, about 3%, about 2.5%, about 2%, about 1.5%, about 1%, about 0.5%, or about 0.3% on a molar basis (based on 100% total moles of lipids in the LNP). In preferred embodiments, LNPs comprise from about 1.0% to about 2.0% of the PEG-modified lipid on a molar basis, e.g., about 1.2 to about 1.9%, about 1.2 to about 1.8%, about 1.3 to about 1.8%, about 1.4 to about 1.8%, about 1.5 to about 1.8%, about 1.6 to about 1.8%, in particular about 1.4%, about 1.5%, about 1.6%, about 1.7%, about 1.8%, about 1.9%, most preferably 1.7% (based on 100% total moles of lipids in the LNP). In various embodiments, the molar ratio of the cationic lipid to the PEGylated lipid ranges from about 100:1 to about 25:1.

[0657] In preferred embodiments, the LNP additionally comprises one or more additional lipids which stabilize the formation of particles during their formation (e.g. neutral lipid and/or one or more steroid or steroid analogue).

[0658] In preferred embodiments of the second aspect, the artificial RNA of the first aspect and, optionally, the further artificial RNA of the second aspect, is complexed with one or more lipids thereby forming lipid nanoparticles (LNP), wherein the LNP additionally comprises one or more neutral lipid and/or one or more steroid or steroid analogue.

[0659] Suitable stabilizing lipids include neutral lipids and anionic lipids. The term “neutral lipid” refers to any one of a number of lipid species that exist in either an uncharged or neutral zwitterionic form at physiological pH. Representative neutral lipids include diacylphosphatidylcholines, diacylphosphatidylethanolamines, ceramides, sphingomyelins, dihydro sphingomyelins, cephalins, and cerebrosides.

[0660] In embodiments of the second aspect, the LNP additionally comprises one or more neutral lipids, wherein the neutral lipid is selected from the group comprising distearoylphosphatidylcholine (DSPC), dioleoylphosphatidylcholine (DOPC), dipalmitoylphosphatidylcholine (DPPC), dioleoylphosphatidylglycerol (DOPG), dipalmitoylphosphatidylglycerol (DPPG), dioleoyl-phosphatidylethanolamine (DOPE), palmitoyloleoylphosphatidylcholine (POPC), palmitoyloleoyl-phosphatidylethanolamine (POPE) and dioleoyl-phosphatidylethanolamine 4-(N-maleimidomethyl)-cyclohexane-1carboxylate (DOPE-mal), dipalmitoyl phosphatidyl ethanolamine (DPPE), dimyristoylphosphoethanolamine (DMPE), distearoyl-phosphatidylethanolamine (DSPE), 16-O-monomethyl PE, 16-O-dimethyl PE, 18-1-trans PE, 1-stearioyl-2-oleoylphosphatidyethanol amine (SOPE), and 1,2-dielaidoyl-sn-glycero-3-phophoethanolamine (transDOPE).

[0661] In some embodiments, the LNPs comprise a neutral lipid selected from DSPC, DPPC, DMPC, DOPC, POPC, DOPE and SM. In various embodiments, the molar ratio of the cationic lipid to the neutral lipid ranges from about 2:1 to about 8:1.

[0662] In preferred embodiments of the second aspect, the neutral lipid is 1,2-distearoyl-sn-glycero-3-phosphocholine (DSPC). The molar ratio of the cationic lipid to DSPC may be in the range from about 2:1 to 8:1.

[0663] In preferred embodiments of the second aspect, the steroid is cholesterol. The molar ratio of the cationic lipid to cholesterol may be in the range from about 2:1 to 1:1.

[0664] The sterol can be about 10 mol % to about 60 mol % or about 25 mol % to about 40 mol % of the lipid particle. In one embodiment, the sterol is about 10, 15, 20, 25, 30, 35, 40, 45, 50, 55, or about 60 mol % of the total lipid present in the lipid particle. In another embodiment, the LNPs include from about 5% to about 50% on a molar basis of the sterol, e.g., about 15% to about 45%, about 20% to about 40%, about 48%, about 40%, about 38.5%, about 35%, about 34.4%, about 31.5% or about 31% on a molar basis (based upon 100% total moles of lipid in the lipid nanoparticle).

[0665] Preferably, lipid nanoparticles (LNPs) comprise: (a) at least one artificial RNA of the first aspect, and, optionally, the further artificial RNA of the second aspect, (b) a cationic lipid, (c) an aggregation reducing agent (such as polyethylene glycol (PEG) lipid or PEG-modified lipid), (d) optionally a non-cationic lipid (such as a neutral lipid), and (e) optionally, a sterol.

[0666] In other preferred embodiments, lipid nanoparticles (LNPs) comprise: (a) at least one artificial RNA encoding F of the first aspect or a derivative or fragment thereof and at least one artificial RNA encoding N, M, P, or M2-1 of the second aspect or a derivative or fragment thereof, (b) a cationic lipid, (c) an aggregation reducing agent (such as polyethylene glycol (PEG) lipid or PEG-modified lipid), (d) optionally a non-cationic lipid (such as a neutral lipid), and (e) optionally, a sterol.

[0667] In some embodiments, the LNPs comprise a lipid of formula (III), an artificial RNA as defined herein, a neutral lipid, a steroid and a PEGylated lipid. In preferred embodiments, the lipid of formula (III) is lipid compound III-3, the neutral lipid is DSPC, the steroid is cholesterol, and the PEGylated lipid is the compound of formula (IVa).

[0668] In a preferred embodiment of the second aspect, the LNP consists essentially of (i) at least one cationic lipid; (ii) a neutral lipid; (iii) a sterol, e.g., cholesterol; and (iv) a PEG-lipid, e.g. PEG-DMG or PEG-cDMA, in a molar ratio of about 20-60% cationic lipid: 5-25% neutral lipid: 25-55% sterol; 0.5-15% PEG-lipid.

[0669] In particularly preferred embodiments of the second aspect, the artificial RNA of the first aspect and, optionally, the further artificial RNA of the second aspect, is complexed with one or more lipids thereby forming lipid nanoparticles (LNP), wherein the LNP essentially consists of

(i) at least one cationic lipid as defined herein, preferably a lipid of formula (III), more preferably lipid III-3;
(ii) a neutral lipid as defined herein, preferably 1,2-distearoyl-sn-glycero-3-phosphocholine (DSPC);
(iii) a steroid or steroid analogue as defined herein, preferably cholesterol; and
(iv) a PEG-lipid as defined herein, e.g. PEG-DMG or PEG-cDMA, preferably a PEGylated lipid of formula (IVa),
wherein (i) to (iv) are in a molar ratio of about 20-60% cationic lipid: 5-25% neutral lipid: 25-55% sterol; 0.5-15% PEG-lipid.

[0670] In one preferred embodiment, the lipid nanoparticle comprises: a cationic lipid with formula (III) and/or PEG lipid with formula (IV), optionally a neutral lipid, preferably 1,2-distearoyl-sn-glycero-3-phosphocholine (DSPC) and optionally a steroid, preferably cholesterol, wherein the molar ratio of the cationic lipid to DSPC is optionally in the range from about 2:1 to 8:1, wherein the molar ratio of the cationic lipid to cholesterol is optionally in the range from about 2:1 to 1:1.

[0671] In a particular preferred embodiment, the composition of the second aspect comprising the artificial RNA of the first aspect and, optionally, the further artificial RNA of the second aspect, comprises lipid nanoparticles (LNPs), which have a molar ratio of approximately 50:10:38.5:1.5, preferably 47.5:10:40.8:1.7 or more preferably 47.4:10:40.9:1.7 (i.e. proportion (mol %) of cationic lipid (preferably lipid III-3), DSPC, cholesterol and PEG-lipid ((preferably PEG-lipid of formula (IVa) with n=49); solubilized in ethanol).

[0672] In a particular preferred embodiment, the composition of the second aspect comprises lipid nanoparticles (LNPs), which have a molar ratio of approximately 50:10:38.5:1.5, preferably 47.5:10:40.8:1.7 or more preferably 47.4:10:40.9:1.7 (i.e. proportion (mol %) of cationic lipid (preferably lipid III-3), DSPC, cholesterol and PEG-lipid ((preferably PEG-lipid of Formula (IVa) with n=49); solubilized in ethanol), wherein the lipid nanoparticles comprise at least one RNA encoding F (F0, F-del, F0_DSCav1, F-del_DSCav1, F_DSCav1_mut0, F-del_DSCav1_mut0, F_DSCav1_mut1, F-del_DSCav1_mut1, F_DSCav1_mut2, F-del_DSCav1_mut2, F_DSCav1_mut3, F-del_DSCav1_mut3, F_DSCav1_mut4, F-del_DSCav1_mut4, F_DSCav1_mut5, F-del_DSCav1_mut5, F_DSCav1_mut6, F-del_DSCav1_mut6, F_DSCav1_mut7, F-del_DSCav1_mut7, F_DSCav1_mut8, or F-del_DSCav1_mut8), and, additionally lipid nanoparticles (LNPs), which have a molar ratio of approximately 50:10:38.5:1.5, preferably 47.5:10:40.8:1.7 or more preferably 47.4:10:40.9:1.7 (i.e. proportion (mol %) of cationic lipid (preferably lipid III-3), DSPC, cholesterol and PEG-lipid ((preferably PEG-lipid of Formula (IVa) with n=49); solubilized in ethanol), wherein the lipid nanoparticles comprise at least one RNA encoding M, N, M2-1, or P.

[0673] In a particular preferred embodiment, the composition of the second aspect comprises lipid nanoparticles (LNPs), which have a molar ratio of approximately 50:10:38.5:1.5, preferably 47.5:10:40.8:1.7 or more preferably 47.4:10:40.9:1.7 (i.e. proportion (mol %) of cationic lipid (preferably lipid III-3), DSPC, cholesterol and PEG-lipid ((preferably PEG-lipid of Formula (IVa) with n=49); solubilized in ethanol), wherein the lipid nanoparticles comprise at least one RNA encoding F (F0, F-del, F0_DSCav1, F-del_DSCav1, F_DSCav1_mut0, F-del_DSCav1_mut0, F_DSCav1_mut1, F-del_DSCav1_mut1, F_DSCav1_mut2, F-del_DSCav1_mut2, F_DSCav1_mut3, F-del_DSCav1_mut3, F_DSCav1_mut4, F-del_DSCav1_mut4, F_DSCav1_mut5, F-del_DSCav1_mut5, F_DSCav1_mut6, F-del_DSCav1_mut6, F_DSCav1_mut7, F-del_DSCav1_mut7, F_DSCav1_mut8, or F-del_DSCav1_mut8), and at least one RNA encoding M, N, M2-1, or P.

[0674] The total amount of RNA in the lipid nanoparticles may vary and is defined depending on the e.g. RNA to total lipid w/w ratio. In one embodiment of the invention the artificial RNA to total lipid ratio is less than 0.06 w/w, preferably between 0.03 w/w and 0.04 w/w.

[0675] In various embodiments, the LNP as defined herein have a mean diameter of from about 50 nm to about 200 nm, from about 60 nm to about 200 nm, from about 70 nm to about 200 nm, from about 80 nm to about 200 nm, from about 90 nm to about 200 nm, from about 90 nm to about 190 nm, from about 90 nm to about 180 nm, from about 90 nm to about 170 nm, from about 90 nm to about 160 nm, from about 90 nm to about 150 nm, from about 90 nm to about 140 nm, from about 90 nm to about 130 nm, from about 90 nm to about 120 nm, from about 90 nm to about 100 nm, from about 70 nm to about 90 nm, from about 80 nm to about 90 nm, from about 70 nm to about 80 nm, or about 30 nm, 35 nm, 40 nm, 45 nm, 50 nm, 55 nm, 60 nm, 65 nm, 70 nm, 75 nm, 80 nm, 85 nm, 90 nm, 95 nm, 100 nm, 105 nm, 110 nm, 115 nm, 120 nm, 125 nm, 130 nm, 135 nm, 140 nm, 145 nm, 150 nm, 160 nm, 170 nm, 180 nm, 190 nm, or 200 nm and are substantially non-toxic. As used herein, the mean diameter may be represented by the z-average as determined by dynamic light scattering as commonly known in the art.

[0676] In another preferred embodiment of the invention the lipid nanoparticles have a hydrodynamic diameter in the range from about 50 nm to about 300 nm, or from about 60 nm to about 250 nm, from about 60 nm to about 150 nm, or from about 60 nm to about 120 nm, respectively.

[0677] According to further embodiments, the composition of the second aspect may comprise at least one adjuvant. Suitably, the adjuvant is preferably added to enhance the immunostimulatory properties of the composition.

[0678] The term “adjuvant” as used herein will be recognized and understood by the person of ordinary skill in the art, and is for example intended to refer to a pharmacological and/or immunological agent that may modify, e.g. enhance, the effect of other agents (herein: the effect of the artificial nucleic acid of the invention) or that may be suitable to support administration and delivery of the composition. The term “adjuvant” refers to a broad spectrum of substances. Typically, these substances are able to increase the immunogenicity of antigens. For example, adjuvants may be recognized by the innate immune systems and, e.g., may elicit an innate immune response (that is, a non-specific immune response). “Adjuvants” typically do not elicit an adaptive immune response. In the context of the invention, adjuvants may enhance the effect of the antigenic peptide or protein provided by the artificial nucleic acid as defined herein or the polyprotein as defined herein.

[0679] In that context, the at least one adjuvant may be selected from any adjuvant known to a skilled person and suitable for the present case, i.e. supporting the induction of an immune response in a subject, e.g. in a human subject.

[0680] Accordingly, the composition of the second aspect may comprise at least one adjuvant, wherein the at least one adjuvant may be suitably selected from any adjuvant provided in of published PCT application WO2016/203025.

[0681] Adjuvants disclosed in any of the claims 2 to 17 of WO2016/203025, preferably adjuvants disclosed in claim 17 of WO2016/203025 are particularly suitable, the specific content relating thereto herewith incorporated by reference.

[0682] The composition of the second aspect may comprise, besides the components specified herein, at least one further component which may be selected from the group consisting of further antigens (e.g. in the form of a peptide or protein) or further antigen-encoding nucleic acids; a further immunotherapeutic agent; one or more auxiliary substances (cytokines, such as monokines, lymphokines, interleukins or chemokines); or any further compound, which is known to be immune stimulating due to its binding affinity (as ligands) to human Toll-like receptors; and/or an adjuvant nucleic acid, preferably an immunostimulatory RNA (isRNA), e.g. CpG-RNA etc.

[0683] Polypeptide and Composition Comprising the Polypeptide

[0684] In a third aspect, the present invention provides a polypeptide, preferably an antigenic polypeptide, wherein the polypeptide comprises an amino acid sequence or a fragment thereof encoded by the artificial RNA of the first aspect.

[0685] In embodiments, the polypeptide has an amino acid sequence which is identical or at least 70%, 80%, 85%, 86%, 87%, 88%, 89%, 90%, 91%, 92%, 93%, 94%, 95%, 96%, 97%, 98%, or 99% identical to SEQ ID NO: 68, 483, 898, 1267, 1636, 2005, 2374, 2743, 3112, 3481, 3850, 4219, 4588, 4957, 5326, 5695, 6064, 6433, 6802, 7171, 7540, 7909, 11726, 12095, 12464, 12833, 13940, 14309, 14678, 15047, 15416, 15785, 13202, 13571, 16154, 16523, 16892, 17261, 17630, 17999, 18368, 18737, 19106, 19475 or a variant of any of these polypeptides.

[0686] In preferred embodiments, the polypeptide has an amino acid sequence which is identical or at least 70%, 80%, 85%, 86%, 87%, 88%, 89%, 90%, 91%, 92%, 93%, 94%, 95%, 96%, 97%, 98%, or 99% identical to SEQ ID NOs: 1267, 2005, 2743, 3481, 4219, 4957, 5695, 6433, 7171, 7909, 12833, 14309, 15047, 15785, 13571, 16523, 17261, 17999, 18737, 19475 or a variant of any of these polypeptides.

[0687] In a fourth aspect, the invention relates to an immunogenic composition, comprising the polypeptide of the third aspect. In preferred embodiments, the composition of the fourth aspect may additionally comprise at least one pharmaceutically acceptable carrier as defined herein. In preferred embodiments, the composition of the fourth aspect may additionally comprise at least one artificial RNA of the first aspect and, optionally, at least one further artificial RNA of the second aspect, or an RNA composition of the second aspect.

[0688] Notably, embodiments relating to the composition of the second aspect or the vaccine of the fifth aspect may likewise be read on and be understood as suitable embodiments of the composition of the fourth aspect.

[0689] Vaccine:

[0690] In a fifth aspect, the present invention provides a vaccine wherein the vaccine comprises the RNA of the first aspect, and, optionally, the composition of the second aspect, the polypeptide of the third aspect, or the composition of the fourth aspect.

[0691] Notably, embodiments relating to the composition of the second aspect or the composition of the fourth aspect may likewise be read on and be understood as suitable embodiments of the vaccine of the fifth aspect. Also, embodiments relating to the vaccine of the fifth aspect may likewise be read on and be understood as suitable embodiments of the composition of the second aspect (comprising the RNA of the first aspect and, optionally, the further artificial RNA of the second aspect) or the composition of the fourth aspect (comprising the polypeptide of the third aspect).

[0692] The term “vaccine” will be recognized and understood by the person of ordinary skill in the art, and is for example intended to be a prophylactic or therapeutic material providing at least one epitope or antigen, preferably an immunogen. In the context of the invention the antigen or antigenic function is provided by the inventive RNA of the first aspect (said RNA comprising a coding sequence encoding a antigenic peptide or protein derived from RSV F protein), the composition of the second aspect (comprising the RNA of the first aspect and, optionally, the further artificial RNA of the second aspect), the polypeptide of the third aspect, or the composition of the fourth aspect (comprising said polypeptide).

[0693] In preferred embodiments of the fifth aspect, the vaccine comprises the RNA of the first aspect, the composition of the second aspect (comprising the RNA of the first aspect and, optionally, the further artificial RNA of the second aspect), the polypeptide of the third aspect, or the composition of the fourth aspect wherein said RNA, said composition of the second aspect, said polypeptide, or said composition of the fourth aspect (comprising said polypeptide) elicits an adaptive immune response.

[0694] In particularly preferred embodiments, the vaccine comprises the RNA of the first aspect or the composition of the second aspect wherein said RNA or said composition elicits an adaptive immune response, preferably an adaptive immune response against RSV.

[0695] In particularly preferred embodiments, the vaccine comprises the RNA of the first aspect or the composition of the second aspect wherein said RNA or said composition induces a T cell immune response, According to a preferred embodiment of the fifth aspect, the vaccine as defined herein may further comprise a pharmaceutically acceptable carrier and optionally at least one adjuvant as specified in the context of the second aspect.

[0696] Suitable adjuvants in that context may be selected from adjuvants disclosed in claim 17 of WO2016/203025.

[0697] In a preferred embodiment, the vaccine is a monovalent vaccine.

[0698] In embodiments the vaccine is a polyvalent vaccine comprising a plurality or at least more than one of the artificial RNAs as defined in the context of the first aspect, and, optionally, at least more than one of the further artificial RNAs as defined in the context of the second aspect. Embodiments relating to a polyvalent composition as disclosed in the context of the second aspect may likewise be read on and be understood as suitable embodiments of the polyvalent vaccine of the fifth aspect.

[0699] The vaccine of the fifth aspect typically comprises a safe and effective amount of the RNA of the first aspect and, optionally, the further RNA of the second aspect. As used herein, “safe and effective amount” means an amount of the RNA that is sufficient to significantly induce a positive modification of a disease or disorder related to an infection with a RSV. At the same time, a “safe and effective amount” is small enough to avoid serious side-effects. In relation to the vaccine or composition of the present invention, the expression “safe and effective amount” preferably means an amount of the RNA that is suitable for stimulating the adaptive immune system in such a manner that no excessive or damaging immune reactions are achieved but, preferably, also no such immune reactions below a measurable level.

[0700] A “safe and effective amount” of the RNA of the composition or vaccine as defined above will furthermore vary in connection with the particular condition to be treated and also with the age and physical condition of the patient to be treated, the severity of the condition, the duration of the treatment, the nature of the accompanying therapy, of the particular pharmaceutically acceptable carrier used, and similar factors, within the knowledge and experience of the accompanying medical doctor. Moreover, the “safe and effective amount” of the RNA, the composition, the vaccine may depend from application route (intradermal, intramuscular), application device (jet injection, needle injection, microneedle patch) and/or complexation (protamine complexation or LNP encapsulation). Moreover, the “safe and effective amount” of the artificial RNA, the composition, the vaccine may depend from the condition of the treated subject (infant, pregnant women, immunocompromised human subject etc.). Accordingly, the suitable “safe and effective amount” has to be adapted accordingly and will be chosen and defined by the skilled person.

[0701] The vaccine can be used according to the invention for human medical purposes and also for veterinary medical purposes (mammals, vertebrates, avian species), as a pharmaceutical composition, or as a vaccine.

[0702] In a preferred embodiment, the RNA, the composition (comprising said RNA and, optionally, a further RNA), the polypeptide, the composition (comprising said polypeptide), or the vaccine is provided in lyophilized form (using e.g. lyophilisation methods as described in WO2016/165831, WO2011/069586, WO2016/184575 or WO2016/184576). Preferably, the lyophilized RNA, the lyophilized composition, the lyophilized polypeptide, the lyophilized composition comprising the polypeptide, or the lyophilized vaccine is reconstituted in a suitable buffer, advantageously based on an aqueous carrier, prior to administration, e.g. Ringer-Lactate solution or a phosphate buffer solution.

[0703] Accordingly, the pharmaceutically acceptable carrier as used herein preferably includes the liquid or non-liquid basis of the inventive vaccine. If the inventive vaccine is provided in liquid form, the carrier will be water, typically pyrogen-free water; isotonic saline or buffered (aqueous) solutions, e.g. phosphate, citrate etc. buffered solutions. Preferably, Ringer-Lactate solution is used as a liquid basis for the vaccine or the composition according to the invention as described in WO2006/122828, the disclosure relating to suitable buffered solutions incorporated herewith by reference.

[0704] The choice of a pharmaceutically acceptable carrier as defined herein is determined, in principle, by the manner, in which the pharmaceutical composition(s) or vaccine according to the invention is administered. The vaccine can be administered, for example, systemically or locally. Routes for systemic administration in general include, for example, transdermal, oral, parenteral routes, including subcutaneous, intravenous, intramuscular, intra-arterial, intradermal and intraperitoneal injections and/or intranasal administration routes. Routes for local administration in general include, for example, topical administration routes but also intradermal, transdermal, subcutaneous, or intramuscular injections or intralesional, intracranial, intrapulmonal, intracardial, intraarticular and sublingual injections. More preferably, composition or vaccines according to the present invention may be administered by an intradermal, subcutaneous, or intramuscular route, preferably by injection, which may be needle-free and/or needle injection. Compositions/vaccines are therefore preferably formulated in liquid or solid form. The suitable amount of the vaccine or composition according to the invention to be administered can be determined by routine experiments, e.g. by using animal models. Such models include, without implying any limitation, rabbit, sheep, mouse, rat, dog and non-human primate models. Preferred unit dose forms for injection include sterile solutions of water, physiological saline or mixtures thereof. The pH of such solutions should be adjusted to about 7.4. Suitable carriers for injection include hydrogels, devices for controlled or delayed release, polylactic acid and collagen matrices. Suitable pharmaceutically acceptable carriers for topical application include those which are suitable for use in lotions, creams, gels and the like. If the inventive compositionor vaccine is to be administered perorally, tablets, capsules and the like are the preferred unit dose form. The pharmaceutically acceptable carriers for the preparation of unit dose forms which can be used for oral administration are well known in the prior art. The choice thereof will depend on secondary considerations such as taste, costs and storability, which are not critical for the purposes of the present invention, and can be made without difficulty by a person skilled in the art.

[0705] The inventive vaccine or composition as defined herein can additionally contain one or more auxiliary substances as defined above in order to further increase the immunogenicity. A synergistic action of the nucleic acid contained in the inventive composition and of an auxiliary substance, which may be optionally be co-formulated (or separately formulated) with the inventive vaccine or composition as described above, is preferably achieved thereby. Such immunogenicity increasing agents or compounds may be provided separately (not co-formulated with the inventive vaccine or composition) and administered individually.

[0706] Further additives which may be included in the inventive vaccine or composition are emulsifiers, such as for example, Tween; wetting agents, such as, for example, sodium lauryl sulfate; colouring agents; taste-imparting agents, pharmaceutical carriers; tablet-forming agents; stabilizers; antioxidants; preservatives.

[0707] Kit or Kit of Parts, Application, Medical Uses, Method of Treatment:

[0708] In a sixth aspect, the present invention provides a kit or kit of parts, wherein the kit or kit of parts comprises the RNA of the first aspect, the composition of the second aspect (comprising said RNA), the polypeptide of the third aspect, the composition of the fourth aspect (comprising said polypeptide), and/or the vaccine of the fifth aspect, optionally comprising a liquid vehicle for solubilising, and optionally technical instructions providing information on administration and dosage of the components.

[0709] In a preferred embodiment, the kit of the sixth aspect comprises at least the following components
[0710] a) at least one RNA of the first aspect, preferably encoding at least one antigenic peptide or protein derived from a RSV fusion (F) protein (RNA sequences preferably selected from Table 5 or 6), wherein said artificial RNA is preferably complexed with one or more lipids thereby forming lipid nanoparticles (LNP); and
[0711] b) at least one, two, or three further artificial RNA encoding an antigenic peptide or protein derived from RSV selected from M, N, M2-1, or P (RNA sequences preferably selected from Table 7A), wherein said further RNA is preferably complexed with one or more lipids thereby forming lipid nanoparticles (LNP), wherein components a) and b) are provided as separate entities or as a single entity.

[0712] In a preferred embodiment, the kit of the sixth aspect comprises at least the following components
[0713] a) at least one RNA of the first aspect, preferably encoding at least one antigenic peptide or protein derived from a RSV fusion (F) protein (RNA sequences preferably selected from Table 5 or 6), wherein said artificial RNA is preferably complexed with one or more lipids thereby forming lipid nanoparticles (LNP); and
[0714] b) at least one further artificial RNA encoding an antigenic peptide or protein derived from RSV selected from M (RNA sequences preferably selected from Table 7A, Column A), wherein said further RNA is preferably complexed with one or more lipids thereby forming lipid nanoparticles (LNP); and
[0715] c) at least one further artificial RNA encoding an antigenic peptide or protein derived from RSV selected from P (RNA sequences preferably selected from Table 7A, Column C), wherein said further RNA is preferably complexed with one or more lipids thereby forming lipid nanoparticles (LNP),

[0716] wherein components a), b) and c) are provided as separate entities or as a single entity.

[0717] In a preferred embodiment, the kit of the sixth aspect comprises at least the following components
[0718] a) at least one RNA of the first aspect, preferably encoding at least one antigenic peptide or protein derived from a RSV fusion (F) protein (RNA sequences preferably selected from Table 5 or 6), wherein said artificial RNA is preferably complexed with one or more lipids thereby forming lipid nanoparticles (LNP); and
[0719] b) at least one further artificial RNA encoding an antigenic peptide or protein derived from RSV selected from M (RNA sequences preferably selected from Table 7A, Column A), wherein said further RNA is preferably complexed with one or more lipids thereby forming lipid nanoparticles (LNP); and
[0720] c) at least one further artificial RNA encoding an antigenic peptide or protein derived from RSV selected from P (RNA sequences preferably selected from Table 7A, Column C), wherein said further RNA is preferably complexed with one or more lipids thereby forming lipid nanoparticles (LNP); and
[0721] d) at least one further artificial RNA encoding an antigenic peptide or protein derived from RSV selected from P (RNA sequences preferably selected from Table 7A, Column B), wherein said further RNA is preferably complexed with one or more lipids thereby forming lipid nanoparticles (LNP),

[0722] wherein components a), b), c) and d) are provided as separate entities or as a single entity.

[0723] The kit may further comprise additional components as described in the context of the composition of the second aspect, the polypeptide of the third aspect, the composition of the fourth aspect, and/or the vaccine of the fifth aspect.

[0724] The technical instructions of said kit may contain information about administration and dosage and patient groups. Such kits, preferably kits of parts, may be applied e.g. for any of the applications or uses mentioned herein, preferably for the use of the RNA of the first aspect, the composition of the second aspect, the polypeptide of the third aspect, the composition of the fourth aspect, or the vaccine of the fifth aspect, for the treatment or prophylaxis of an infection or diseases caused by RSV or disorders related thereto. Preferably, the RNA of the first aspect, the composition of the second aspect, the polypeptide of the third aspect, the composition of the fourth aspect, or the vaccine of the fifth aspect is provided in a separate part of the kit, wherein the RNA of the first aspect, the composition of the second aspect, the polypeptide of the third aspect, the composition of the fourth aspect, or the vaccine of the fifth aspect is preferably lyophilised. The kit may further contain as a part a vehicle (e.g. buffer solution) for solubilising the RNA of the first aspect, the composition of the second aspect, the polypeptide of the third aspect, the composition fourth aspect, or the vaccine of the fifth aspect.

[0725] In preferred embodiments, the kit or kit of parts as defined herein comprises Ringer lactate solution.

[0726] Any of the above kits may be used in a treatment or prophylaxis as defined herein. More preferably, any of the above kits may be used as a vaccine, preferably a vaccine against infections caused by RSV as defined herein.

[0727] Medical Use:

[0728] In a further aspect, the present invention relates to the first medical use of the RNA of the first aspect, the composition of the second aspect, the polypeptide of the third aspect, the composition of the fourth aspect, the vaccine of the fifth aspect, or the kit or kit of parts of the sixth aspect.

[0729] Accordingly, the RNA of the first aspect, the composition of the second aspect, the polypeptide of the third aspect, the composition of the fourth aspect, the vaccine of the fifth aspect, or the kit or kit of parts of the sixth aspect is for use as a medicament.

[0730] The present invention furthermore provides several applications and uses of the RNA of the first aspect, the composition of the second aspect, the polypeptide of the third aspect, the composition of the fourth aspect, the vaccine of the fifth aspect, or the kit or kit of parts of the sixth aspect.

[0731] In particular, said RNA, composition (comprising said RNA), polypeptide, composition (comprising said polypeptide), vaccine, or the kit or kit of parts may be used for human medical purposes and also for veterinary medical purposes, preferably for human medical purposes.

[0732] In particular, said RNA, composition (comprising said RNA), polypeptide, composition (comprising said polypeptide), vaccine, or the kit or kit of parts may is for use as a medicament for human medical purposes, wherein said RNA, composition (comprising said RNA), polypeptide, composition (comprising said polypeptide), vaccine, or the kit or kit of parts may be particularly suitable for young infants, newborns, immunocompromised recipients, as well as pregnant and breast-feeding women and elderly people.

[0733] In yet another aspect, the present invention relates to the second medical use of the RNA of the first aspect, the composition of the second aspect, the polypeptide of the third aspect, the composition of the fourth aspect, the vaccine of the fifth aspect, or the kit or kit of parts of the sixth aspect.

[0734] Accordingly, the RNA of the first aspect, the composition of the second aspect, the polypeptide of the third aspect, the composition of the fourth aspect, the vaccine of the fifth aspect, or the kit or kit of parts of the sixth aspect is for use in the treatment or prophylaxis of an infection with a pathogen (e.g. a virus), in particular with Respiratory syncytial virus (RSV), or a disorder related to such an infection.

[0735] In particular, the RNA of the first aspect, the composition of the second aspect, the polypeptide of the third aspect, the composition of the fourth aspect, the vaccine of the fifth aspect, or the kit or kit of parts of the sixth aspect may be used in the treatment or prophylaxis of an infection with a virus, in particular with RSV, or a disorder related to such an infection for human and also for veterinary medical purposes, preferably for human medical purposes.

[0736] In particular, said RNA, composition (comprising said RNA), polypeptide, composition (comprising said polypeptide), vaccine, or the kit or kit of parts may be particularly suitable for young infants, newborns, immunocompromised recipients, as well as pregnant and breast-feeding women and elderly people for use in the treatment or prophylaxis of an infection with RSV.

[0737] As used herein, “a disorder related to a RSV infection” may preferably comprise a typical symptom or a complication of an RSV infection.

[0738] Particularly, the artificial RNA of the first aspect, the composition of the second aspect, the polypeptide of the third aspect, the composition of the fourth aspect, the vaccine of the fifth aspect, or the kit or kit of parts of the sixth aspect may be used in a method of prophylactic (pre-exposure prophylaxis or post-exposure prophylaxis) and/or therapeutic treatment of infections caused by RSV.

[0739] The composition or the vaccine as defined herein may preferably be administered locally. In particular, composition or vaccines may be administered by an intradermal, subcutaneous, intranasal, or intramuscular route. Inventive compositions or vaccines of the invention are therefore preferably formulated in liquid (or sometimes in solid) form. In embodiments, the inventive vaccine may be administered by conventional needle injection or needle-free jet injection. Preferred in that context is the RNA, the composition, the vaccine is administered by intramuscular needle injection.

[0740] The term “jet injection”, as used herein, refers to a needle-free injection method, wherein a fluid (vaccine, composition of the invention) containing e.g. at least one RNA of the first aspect is forced through an orifice, thus generating an ultra-fine liquid stream of high pressure that is capable of penetrating mammalian skin and, depending on the injection settings, subcutaneous tissue or muscle tissue. In principle, the liquid stream perforates the skin, through which the liquid stream is pushed into the target tissue. Preferably, jet injection is used for intradermal, subcutaneous or intramuscular injection of the RNA, the compositions, the vaccines disclosed herein.

[0741] In embodiments, the RNA as comprised in a composition or vaccine as defined herein is provided in an amount of about 100 ng to about 500 μg, in an amount of about 1 μg to about 200 μg, in an amount of about 1 μg to about 100 μg, in an amount of about 5 μg to about 100 μg, preferably in an amount of about 10 μg to about 50 μg, specifically, in an amount of about 5 μg, 10 μg, 15 μg, 20 μg, 25 μg, 30 μg, 35 μg, 40 μg, 45 μg, 50 μg, 55 μg, 60 μg, 65 μg, 70 μg, 75 μg, 80 μg, 85 μg, 90 μg, 95 μg or 100 μg.

[0742] Depending from application route (intradermal, intramuscular, intranasal), application device (jet injection, needle injection, microneedle patch) and/or complexation (preferably LNP encapsulation) the suitable amount has to be adapted accordingly and will be chosen and defined by the skilled person.

[0743] The immunization protocol for the treatment or prophylaxis of an infection as defined herein, i.e. the immunization of a subject against a RSV, typically comprises a series of single doses or dosages of the composition or the vaccine. A single dosage, as used herein, refers to the initial/first dose, a second dose or any further doses, respectively, which are preferably administered in order to “boost” the immune reaction.

[0744] In one embodiment, the immunization protocol for the treatment or prophylaxis of an infection as defined herein, i.e. the immunization of a subject against a RSV, comprises one single doses of the composition or the vaccine.

[0745] In preferred embodiments, the immunization protocol for the prophylaxis of an infection with RSV comprises at least one single dose of the composition or the vaccine as defined herein, wherein said at least one single dose is administered to a pregnant women for maternal immunization, thereby achieving immunization of the unborn child and/or wherein said at least one single dose is administered to a breast-feeding women for thereby achieving passive immunization of the breast-fed child.

[0746] The treatment or prophylaxis as defined above may comprise the administration of a further active pharmaceutical ingredient. In the case of the inventive vaccine or composition, which is based on the artificial RNA of the first aspect, a polypeptide, preferably of the third aspect may be co-administered as a further active pharmaceutical ingredient.

[0747] For example, at least one RSV protein or peptide as described herein, or a fragment or variant thereof, may be co-administered in order to induce or enhance an immune response. Further, two distinct artificial RNAs of the first aspect and, optionally further RNAs of the second aspect may be administered at different time points, preferably in a prime-boost scenario, e.g. using a composition comprising at least one RSV polypeptide as prime vaccination and a composition/vaccine comprising at least one artificial RNA of the first aspect as boost vaccination.

[0748] Suitably, the treatment or prophylaxis as defined above comprises the administration of a further active pharmaceutical ingredient, wherein the further active pharmaceutical ingredient may be an immunotherapeutic agent that can be selected from immunoglobulins, preferably IgGs, monoclonal or polyclonal antibodies, polyclonal serum or sera, etc., most preferably immunoglobulins directed against a RSV protein or peptide as defined herein. Preferably, such a further immunotherapeutic agent may be provided as a peptide/protein or may be encoded by a nucleic acid, preferably by a DNA or an RNA, more preferably an mRNA. Such an immunotherapeutic agent allows providing passive vaccination additional to active vaccination triggered by the inventive artificial RNA or by the inventive polypeptide.

[0749] Method of Treatment and Use, Diagnostic Method and Use:

[0750] In another aspect, the present invention relates to a method of treating or preventing a disorder.

[0751] In preferred embodiments, the present invention relates to a method of treating or preventing a disorder, wherein the method comprises applying or administering to a subject in need thereof the RNA of the first aspect, the composition of the second aspect, the polypeptide of the third aspect, the composition of the fourth aspect, the vaccine of the fifth aspect, or the kit or kit of parts of the sixth aspect.

[0752] In preferred embodiments, the disorder is an infection with Respiratory syncytial virus (RSV), or a disorder related to such an infection.

[0753] In preferred embodiments, the present invention relates to a method of treating or preventing a disorder, wherein the method comprises applying or administering to a subject in need thereof the RNA of the first aspect, the composition of the second aspect, the polypeptide of the third aspect, the composition of the fourth aspect, the vaccine of the fifth aspect, or the kit or kit of parts of the sixth aspect, wherein the subject in need is preferably a mammalian subject. In particularly preferred embodiments, the mammalian subject is a human subject, particularly an infant, a newborn, a pregnant women, a breast-feeding woman, an elderly, or an immunocompromised human subject.

[0754] In particular, such a method may preferably comprise the steps of:
[0755] a) providing the RNA of the first aspect, the composition of the second aspect, the polypeptide of the third aspect, the composition of the fourth aspect, the vaccine of the fifth aspect, or the kit or kit of parts of the sixth aspect;
[0756] b) applying or administering said RNA of the first aspect, composition of the second aspect, polypeptide of the third aspect, composition of the fourth aspect, vaccine of the fifth aspect, or kit or kit of parts of the sixth aspect to a tissue or an organism;
[0757] c) optionally, administering immunoglobulin (IgGs) against a RSV;
[0758] d) optionally, administering a further substance (adjuvant, auxiliary substance, further antigen).

[0759] According to a further aspect, the present invention also provides a method for expression of at least one polypeptide comprising at least one peptide or protein derived from a RSV, or a fragment or variant thereof, wherein the method preferably comprises the following steps:
[0760] a) providing the RNA of the first aspect or the composition of the second aspect; and
[0761] b) applying or administering said RNA or composition to an expression system (cells), a tissue, an organism.

[0762] The method may be applied for laboratory, for research, for diagnostic, for commercial production of peptides or proteins and/or for therapeutic purposes. The method may furthermore be carried out in the context of the treatment of a specific disease, particularly in the treatment of infectious diseases, particularly RSV infections.

[0763] Likewise, according to another aspect, the present invention also provides the use of the artificial RNA of the first aspect, the composition of the second aspect, the polypeptide of the third aspect, the composition of the fourth aspect, the vaccine of the fifth aspect, or the kit or kit of parts of the sixth aspect preferably for diagnostic or therapeutic purposes, e.g. for expression of an encoded RSV antigenic peptide or protein, e.g. by applying or administering said RNA, composition comprising said RNA, vaccine comprising said RNA, e.g. to a cell-free expression system, a cell (e.g. an expression host cell or a somatic cell), a tissue or an organism. In specific embodiments, applying or administering said RNA, composition comprising said RNA, vaccine comprising said RNA to a tissue or an organism is followed by e.g. a step of obtaining induced RSV F antibodies e.g. RSV F specific (monoclonal) antibodies.

[0764] The use may be applied for a (diagnostic) laboratory, for research, for diagnostics, for commercial production of peptides, proteins, or RSV antibodies and/or for therapeutic purposes. The use may be carried out in vitro, in vivo or ex vivo. The use may furthermore be carried out in the context of the treatment of a specific disease, particularly in the treatment of an RSV infection or a related disorder.

[0765] In a particularly preferred embodiment, the invention provides the RNA of the first aspect, the composition of the second aspect, the polypeptide of the third aspect, the composition of the fourth aspect, the vaccine of the fifth aspect, or the kit or kit of parts of the sixth aspect for use as a medicament, for use in treatment or prophylaxis, preferably treatment or prophylaxis of an RSV infection or a related disorder, or for use as a vaccine.

### BRIEF DESCRIPTION OF LISTS AND TABLES

[0766] List 1: Suitable RSV virus strains

[0767] List 2: NCBI Protein Accession numbers of suitable RSV fusion (F) proteins

[0768] Table 1: Preferred RSV F protein antigen designs

[0769] Table 2: Human codon usage table with frequencies indicated for each amino acid

[0770] Table 3A: Preferred coding sequences encoding RSV F (columns A-J), derived from HRSV(A2)

[0771] Table 3B: Preferred coding sequences encoding RSV F (columns A-J), derived from HRSV(Memphis-37)

[0772] Table 4A: Preferred coding sequences encoding RSV F (columns K-V), derived from HRSV(A2)

[0773] Table 4B: Preferred coding sequences encoding RSV F (columns K-V), derived from HRSV(Memphis-37)

[0774] Table 5A: Preferred mRNA constructs encoding RSV F (columns A-J), derived from HRSV(A2)

[0775] Table 5B: Preferred mRNA constructs encoding RSV F (columns A-J), derived from HRSV(Memphis-37)

[0776] Table 6A: Preferred mRNA constructs encoding RSV F (column K-V), derived from HRSV(A2)

[0777] Table 6B: Preferred mRNA constructs encoding RSV F (column K-V), derived from HRSV(Memphis-37)

[0778] Table 7A: Preferred further coding sequences and mRNA constructs of the composition or vaccine

[0779] Table 7B: Suitable combinations of RNA constructs

[0780] Table 8: Representative lipid compounds derived from formula (III)

[0781] Table 9: mRNA constructs used in the present examples (see Examples section)

[0782] Table 10: Animal groups and vaccination schedule of Example 2 (see Examples section)

[0783] Table 11: Animal groups and vaccination schedule of Example 3 (see Examples section)

[0784] Table 12: mRNA constructs with different UTR combinations of Example 4 (see Examples section)

[0785] Table 13: Animal groups and vaccination schedule of Example 5 (see Examples section)

[0786] Table 14: Animal groups and vaccination schedule of Example 6 (see Examples section)

[0787] Table 15: Animal groups and vaccination schedule of Example 7 (see Examples section)

[0788] Table 15: Animal groups and vaccination schedule of Example 7 (see Examples section)

[0789] Table 16: Overview of mRNA constructs used in Example 8 (see Examples section)

[0790] Table 17: Animal groups and vaccination schedule of Example 9 (see Examples section)

[0791] Table 18: Animal groups and vaccination schedule of Example 10 (see Examples section)

[0792] Table 19: Overview of mRNA constructs used in Example 11 (see Examples section)

[0793] Table 20: Animal groups and vaccination schedule of Example 12 (see Examples section)

### BRIEF DESCRIPTION OF THE DRAWINGS

[0794] FIG. 1 shows that LNP-formulated mRNA encoding RSV F-protein (F-del_DSCav1) induces high virus neutralization titers (VNTs) in serum of cotton rats after i.m. and i.d. vaccinations. Vaccination with protamine-formulated mRNA induces only weak responses. Vaccination schedule see Table 10. Further details are provided in Example 2.

[0795] FIG. 2 shows that LNP-formulated mRNA encoding RSV F-protein (F-del_DSCav1) reduces RSV infection of the lung in cotton rats after i.m. and i.d. vaccination. Vaccination schedule see Table 10. Further details are provided in Example 2.

[0796] FIG. 3 shows the results of a lung histopathology analysis from the RSV cotton rat challenge study described in Example 2. Animals vaccinated with LNP-formulated mRNA do not show increased lung histopathology/enhanced inflammation after viral challenge in contrast to the vaccination with formalin-inactivated RSV virus vaccine. Vaccination schedule see Table 10. Further details are provided in Example 2.

[0797] FIG. 4 shows that LNP-formulated mRNA encoding RSV F-protein (F0, F-del, and F-del_DSCav1) induces high (virus neutralization titers) VNTs in the serum of cotton rats after two i.m. vaccinations. VNTs determined performed on day 48. Vaccination schedule see Table 11. Further details are provided in Example 3.

[0798] FIG. 5 shows that LNP-formulated mRNA encoding RSV F-protein (F0, F-del, and F-del_DSCav1) induces specific humoral immune responses in cotton rats against the RSV-F protein. The experiment was performed as described in Example 3 and antibody total IgG titers were determined by ELISA. RSV-F (formulated in LNP) and RSV-F-del (formulated in LNP) vaccines induce higher titers of RSV-F specific IgGs already after prime vaccination (day 28) than live virus. FIG. 5a: Antibody titers determined on day 49; FIGS. 5b and 5c: time-dependent IgG titers in serum with 10 μg mRNA (FIG. 5b) or 100 μg mRNA (FIG. 5c) encoding RSV F-protein (F, F-del, and F-del_DSCav1). Vaccination schedule see Table 11. Further details are provided in Example 3.

[0799] FIG. 6 shows that LNP-formulated mRNA encoding RSV F-protein (F0, F-del, and F-del_DSCav1) reduces RSV infection of the lung in cotton rats after i.m. vaccination. The experiment was performed as described in Example 3. All animal groups vaccinated with mRNA vaccines showed virus titers below the level of detection demonstrating protection of vaccinated cotton rats in terms of viral lung titers. In comparison to the mRNA vaccines the vaccine based on formalin-inactivated virus was not able to prevent virus titers in the lung. Vaccination schedule see Table 11. Further details are provided in Example 3.

[0800] FIG. 7 shows that LNP-formulated mRNA encoding RSV F-protein (F0, F-del, and F-del_DSCav1) reduces RSV titers in the nose of cotton rats after i.m. vaccination. The experiment was performed as described in Example 3. All animal groups vaccinated with mRNA vaccines show strongly reduced viral titers in the nasal tissue in viral challenge infection experiments. In comparison to the mRNA vaccines the vaccine based on formalin-inactivated virus was not able to reduce nasal virus titers. Vaccination schedule see Table 11. Further details are provided in Example 3.

[0801] FIG. 8 shows the results of a lung histopathology analysis from the RSV cotton rat challenge study described in Example 3. Animals vaccinated with LNP-formulated mRNA do not show increased lung histopathology/enhanced inflammation after viral challenge in contrast to the vaccination with formalin-inactivated RSV virus vaccine. Vaccination schedule see Table 11. Further details are provided in Example 3.

[0802] FIG. 9 shows that UTR combinations according to the invention increase the expression of RSV F-Protein in vitro. HEK 293T cells were transfected with different Lipofectamine-formulated mRNA constructs, which all contain the same coding sequence encoding pre-fusion stabilized truncated RSV-F (F-del_DSCav1) but use different combinations of 5′ and 3′-UTRs (see Table 12). RSV-F expression was analyzed by flow cytometry. Values show % of the detected RSV-F signal. Values normalized to 100% according to the expression of the reference mRNA construct (UTR combination RPL32/ALB7). Water for injection (WFI) serves as a control. N=2. Further details are provided in Example 4.

[0803] FIG. 10 shows that the used mRNA constructs encoding RSV F-protein (FIG. 10a: F0, F-del, F0_DSCav1, F-del_DSCav1, F_DSCav1_mut1, F-del_DSCav1_mut1, F_DSCav1_mut2, F-del_DSCav1_mut2, F_DSCav1_mut3, F-del_DSCav1_mut3, FIG. 10b: F0, F-del, F0_DSCav1, F-del_DSCav1, F_DSCav1_mut0, F-del_DSCav1_mut0, F_DSCav1_mut4, F-del_DSCav1_mut4, F_DSCav1_mut5, F-del_DSCav1_mut5) led to a detectable intracellular RSV F protein expression as well as to a detectable protein expression at the cell surface. Further details are provided in Table 16 and Example 8.

[0804] FIG. 11 shows that all tested LNP-formulated mRNA constructs encoding different RSV F proteins (F0, F0_DSCav1, F_DSCav1_mut3, F_DSCav1_mut1, F_DSCav1_mut2, F-del, F-del_DSCav1, F-del_DSCav1_mut3, F-del_DSCav1_mut1, F-del_DSCav1_mut2) induce humoral immune responses in cotton rats against the RSV-F protein. Antibody total IgG titers were determined by ELISA. Vaccination schedule see Table 17. Further details are provided in Example 9.

[0805] FIG. 12 shows that all LNP-formulated RSV-F (F0, F0_DSCav1, F_DSCav1_mut3, F_DSCav1_mut1, F_DSCav1_mut2, F-del, F-del_DSCav1, F-del_DSCav1_mut3, F-del_DSCav1_mut1, F-del_DSCav1_mut2) mRNA vaccines induced the formation of RSV specific functional antibodies in cotton rats as shown by high virus neutralizing antibody titers. Vaccination schedule see Table 17. Further details are provided in Example 9.

[0806] FIG. 13 shows the lung histopathology analysis from the RSV cotton rat challenge study. None of the mRNA vaccinated groups displayed enhanced lung pathology as it is the case for the group that was vaccinated using the formalin-inactivated RSV vaccine Vaccination schedule see Table 17. Further details are provided in Example 9.

[0807] FIG. 14 shows the results of the analysis of lung viral titers (FIG. 14a) and of nose viral titers (FIG. 14b) in cotton rats challenged with RSV virus. Vaccination schedule see Table 17. Further details are provided in Example 9.

[0808] FIG. 15 shows that all tested LNP-formulated mRNA constructs encoding different RSV F proteins (F-del, F-del_DSCav1_mut2, F-del_DSCav1_mut0, F-del_DSCav1_mut5, F-del_DSCav1_mut4) induce humoral immune responses in cotton rats against the RSV-F protein. Antibody total IgG titers were determined by ELISA. Vaccination schedule see Table 18. Further details are provided in Example 10.

[0809] FIG. 16 shows that all LNP-formulated RSV-F (F-del, F-del_DSCav1_mut2, F-del_DSCav1_mut0, F-del_DSCav1_mut5, F-del_DSCav1_mut4) mRNA vaccines induced the formation of RSV specific functional antibodies in cotton rats as shown by high virus neutralizing antibody titers. The LNP-formulated constructs for pre-fusion stabilization induce higher or comparable responses than F-del. Vaccination schedule see Table 18. Further details are provided in Example 10.

[0810] FIG. 17 shows the lung histopathology analysis from the RSV cotton rat challenge study. None of the mRNA vaccinated groups displayed enhanced lung pathology as it is the case for the group that was vaccinated using the formalin-inactivated RSV vaccine Vaccination schedule see Table 18. Further details are provided in Example 10.

[0811] FIG. 18 shows the results of the analysis of lung viral titers (FIG. 18a) and of nose viral titers (FIG. 18b) in cotton rats challenged with RSV virus. Vaccination schedule see Table 18. Further details are provided in Example 10.

[0812] FIG. 19 shows that the used mRNA constructs coding for RSV matrix protein M, phosphoprotein P, nucleoprotein N and matrix protein M2-1 protein led to a detectable protein expression using a rabbit reticulocyte lysate system. Further details are provided in Table 19 and Example 11.

[0813] FIG. 20 shows the results of the immunogenicity study in mice (ELISA). The humoral immune responses can be seen in FIG. 20a: anti-RSV F IgG and in FIG. 20b: anti-RSV F IgG2a. All groups induced humoral immune responses. In general, the IgG2a titers are 10 times higher than the IgG1 titers, indicating a predominant Th1 response. Vaccination schedule see Table 20. Further details are provided in Example 12.

[0814] FIG. 21 shows that specific antigen IgGs were detected in sera of immunized mice indicating that the applied mRNA constructs are suitable to induce specific humoral immune responses. Vaccination schedule see Table 20. Further details are provided in Example 12.

[0815] FIG. 22 shows that all LNP-formulated mRNA vaccines (F, M+F, P+F, N+F, M2-1+F) induced the formation of RSV specific functional antibodies in mice as shown by high virus neutralizing antibody titers. Vaccination schedule see Table 20. Further details are provided in Example 12.

[0816] FIG. 23 shows that all vaccines containing RSV F, RSV M2-1, or both surprisingly induced a tissue resident memory T cell (TRM) response in the lung upon intramuscular immunization (FIG. 23a). The splenocyte analysis revealed that an immunization with RSV F and especially RSV M2-1 lead to an increase of antigen-specific CD8+ and CD4+ T cells secreting IFN-γ and TNF indicating the induction of a systemic T cell response in addition to a site-specific response (FIG. 23b and FIG. 23c).

### EXAMPLES

[0817] In the following, particular examples illustrating various embodiments and aspects of the invention are presented. However, the present invention shall not to be limited in scope by the specific embodiments described herein. The following preparations and examples are given to enable those skilled in the art to more clearly understand and to practice the present invention. The present invention, however, is not limited in scope by the exemplified embodiments, which are intended as illustrations of single aspects of the invention only, and methods which are functionally equivalent are within the scope of the invention. Indeed, various modifications of the invention in addition to those described herein will become readily apparent to those skilled in the art from the foregoing description, accompanying figures and the examples below. All such modifications fall within the scope of the appended claims.

### Example 1: Preparation of DNA and mRNA Constructs and Compositions for In Vitro and In Vivo Experiments

[0818] The present Example provides methods of obtaining the artificial RNA of the invention as well as methods of generating a composition or a vaccine of the invention.

[0819] 1.1. Preparation of DNA and mRNA constructs:

[0820] For the present examples, DNA sequences encoding different RSV F proteins (e.g. F0, F-del, F-del_DSCav1, F-del_DSCav1_mut5, etc.) were prepared and used for subsequent RNA in vitro transcription reactions. Said DNA sequences were prepared by modifying the wild type encoding DNA sequences by introducing a G/C optimized coding sequence (e.g., “cds opt1”) for stabilization. Sequences were introduced into a pUC19 derived vector to comprise stabilizing 3′-UTR sequences derived from a 3′-UTR of a gene selected from PSMB3, ALB7, alpha-globin, CASP1, COX6B1, GNAS, NDUFA1 and RPS9 and 5′-UTR sequences derived from a 5′-UTR of a gene selected from HSD17B4, RPL32, ASAH1, ATP5A1, MP68, NDUFA4, NOSIP, RPL31, SLC7A3, TUBB4B and UBQLN2, additionally comprising, a stretch of adenosines (e.g. 64A or A100), and a histone-stem-loop (hSL) structure, and optionally a stretch of 30 cytosines (e.g. C30) as listed in Table 9.

[0821] The obtained plasmid DNA constructs were transformed and propagated in bacteria using common protocols known in the art. Eventually, the plasmid DNA constructs were extracted, purified, and used for subsequent RNA in vitro transcription (see section 1.2.).

[0822] Alternatively, DNA plasmids prepared according to paragraph 1 are used as DNA template for PCR-based amplification. Eventually, the generated PCR products are purified and used for subsequent RNA in vitro transcription (see section 1.3.).

[0823] 1.2. RNA In Vitro Transcription from Plasmid DNA Templates:

[0824] DNA plasmids prepared according to paragraph 1.1 were enzymatically linearized using EcoRI or SapI and used for DNA dependent RNA in vitro transcription using T7 RNA polymerase in the presence of a nucleotide mixture (ATP/GTP/CTP/UTP) and cap analog (e.g., m7GpppG, m7G(5′)ppp(5′)(2′OMeA)pG, or m7G(5′)ppp(5′)(2′OMeG)pG)) under suitable buffer conditions. The obtained mRNA constructs were purified using RP-HPLC (PureMessenger®, CureVac AG, Tubingen, Germany; WO2008/077592) and used for in vitro and in vivo experiments. RNA for clinical development (see Example 6) is produced under current good manufacturing practice e.g. according to WO2016/180430, implementing various quality control steps on DNA and RNA level. The generated RNA sequences/constructs are provided in Table 9 with the encoded F protein and the respective UTR elements indicated therein. In addition to the information provided in Table 9, further information relating to specific mRNA construct SEQ-ID NOs may be derived from the information provided under <223> identifier provided in the ST.25 sequence listing.

[0825] Alternatively, EcoRI or SapI linearized DNA is used for DNA dependent RNA in vitro transcription using an RNA polymerase in the presence of a modified nucleotide mixture (ATP, GTP, CTP, N(1)-methylpseudouridine (m14) or pseudouridine (Ψ)) and cap analog (m7GpppG, m7G(5′)ppp(5′)(2′OMeA)pG, or m7G(5′)ppp(5′)(2′OMeG)pG) under suitable buffer conditions. The obtained m1Ψ or Ψ-modified mRNAs are purified using RP-HPLC (PureMessenger®, CureVac, Tobingen, Germany; WO2008/077592) and used for further experiments.

[0826] Some mRNA constructs are in vitro transcribed in the absence of a cap analog. The cap-structure (cap1) is added enzymatically using Capping enzymes as commonly known in the art. In short, in vitro transcribed mRNA is capped using an m7G capping kit with 2′-O-methyltransferase to obtain cap1-capped mRNA. Cap1-capped mRNA is purified using RP-HPLC (PureMessenger®, CureVac, Tubingen, Germany; WO2008/077592) and used for further experiments.

[0827] 1.3. RNA In Vitro Transcription from PCR Amplified DNA Templates:

[0828] Purified PCR amplified DNA templates prepared according to paragraph 1.1 are transcribed in vitro using DNA dependent T7 RNA polymerase in the presence of a nucleotide mixture (ATP/GTP/CTP/UTP) and cap analog (m7GpppG) under suitable buffer conditions. Alternatively, PCR amplified DNA is transcribed in vitro using DNA dependent T7 RNA polymerase in the presence of a modified nucleotide mixture (ATP, GTP, CTP, N(1)-methylpseudouridine (m14)) and cap analog (m7GpppG) under suitable buffer conditions. Some mRNA constructs are in vitro transcribed in the absence of a cap analog and the cap-structure (cap1) is added enzymatically using capping enzymes as commonly known in the art e.g. using an m7G capping kit with 2′-O-methyltransferase. The obtained mRNAs are purified e.g. using RP-HPLC (PureMessenger®, CureVac AG, Tübingen, Germany; WO2008/077592) and used for in vitro and in vivo experiments.

TABLE 9
mRNA constructs used in the present examples

| RNA | | 5′-UTR/3′-UTR; | 3′-terminal | SEQ ID NO: | SEQ ID NO: |
|---|---|---|---|---|---|
| ID | Antigen Name | UTR Design | Elements (3′-end) | RNA | Protein |
| R6939/ | F0 | —/muag; i-3 | A64-N5-C30-histoneSL-N5 | 475 | 68 |
| R7003 | | | | | |
| R3737/ | F0 | RPL32/ALB7; i-2 | A64-N5-C30-histoneSL-N5 | 466 | 68 |
| R3938 | | | | | |
| R6940 | F-del | —/muag; i-3 | A64-N5-C30-histoneSL-N5 | 890 | 483 |
| R3738/ | F-del | RPL32/ALB7; i-2 | A64-N5-C30-histoneSL-N5 | 881 | 483 |
| R3939 | | | | | |
| R6808 | F0_DSCav1 | —/muag; i-3 | A64-N5-C30-histoneSL-N5 | 1259 | 898 |
| R5453 | F-del_DSCav1 | —/muag; i-3 | A64-N5-C30-histoneSL-N5 | 1628 | 1267 |
| R6122 | F-del_DSCav1 | RPL32/ALB7; i-2 | A64-N5-C30-histoneSL-N5 | 1620 | 1267 |
| R4745/ | F-del_DSCav1 | HSD17B4/ALB7; i-4 | A64-N5-C30-histoneSL-N5 | 8278 | 1267 |
| R5717 | | | | | |
| R6771 | F_DSCav1_mut1 | —/muag; i-3 | A64-N5-C30-histoneSL-N5 | 1997 | 1636 |
| R6774 | F-del_DSCav1_mut1 | —/muag; i-3 | A64-N5-C30-histoneSL-N5 | 2366 | 2005 |
| R6772 | F_DSCav1_mut2 | —/muag; i-3 | A64-N5-C30-histoneSL-N5 | 2735 | 2374 |
| R6773 | F-del_DSCav1_mut2 | —/muag; i-3 | A64-N5-C30-histoneSL-N5 | 3104 | 2743 |
| R6770 | F_DSCav1_mut3 | —/muag; i-3 | A64-N5-C30-histoneSL-N5 | 3473 | 3112 |
| R6775 | F-del_DSCav1_mut3 | —/muag; i-3 | A64-N5-C30-histoneSL-N5 | 3842 | 3481 |
| | F-del_DSCav1 | HSD17B4/PSMB3; a-1 | A64-N5-C30-histoneSL-N5 | 1276 | 1267 |
| | F-del_DSCav1 | Ndufa4/PSMB3; a-2 | A64-N5-C30-histoneSL-N5 | 1284 | 1267 |
| | F-del_DSCav1 | Slc7a3/PSMB3; a-3 | A64-N5-C30-histoneSL-N5 | 1292 | 1267 |
| | F-del_DSCav1 | Nosip/PSMB3; a-4 | A64-N5-C30-histoneSL-N5 | 1300 | 1267 |
| | F-del_DSCav1 | Mp68/PSMB3; a-5 | A64-N5-C30-histoneSL-N5 | 1308 | 1267 |
| | F-del_DSCav1 | Ubqln2/RPS9; b-1 | A64-N5-C30-histoneSL-N5 | 1316 | 1267 |
| | F-del_DSCav1 | ASAH1/RPS9; b-2 | A64-N5-C30-histoneSL-N5 | 1324 | 1267 |
| | F-del_DSCav1 | HSD17B4/RPS9; b-3 | A64-N5-C30-histoneSL-N5 | 1332 | 1267 |
| | F-del_DSCav1 | HSD17B4/CASP1; b-4 | A64-N5-C30-histoneSL-N5 | 1340 | 1267 |
| | F-del_DSCav1 | Nosip/COX6B1; b-5 | A64-N5-C30-histoneSL-N5 | 1348 | 1267 |
| | F-del_DSCav1 | Ndufa4/RPS9; c-1 | A64-N5-C30-histoneSL-N5 | 1356 | 1267 |
| | F-del_DSCav1 | Nosip/Ndufa1; c-2 | A64-N5-C30-histoneSL-N5 | 1364 | 1267 |
| | F-del_DSCav1 | Ndufa4/COX6B1; c-3 | A64-N5-C30-histoneSL-N5 | 1372 | 1267 |
| | F-del_DSCav1 | Ndufa4/Ndufa1; c-4 | A64-N5-C30-histoneSL-N5 | 1380 | 1267 |
| | F-del_DSCav1 | ATP5A1/PSMB3; c-5 | A64-N5-C30-histoneSL-N5 | 1388 | 1267 |
| | F-del_DSCav1 | Rpl31/PSMB3; d-1 | A64-N5-C30-histoneSL-N5 | 1396 | 1267 |
| | F-del_DSCav1 | ATP5A1/CASP1; d-2 | A64-N5-C30-histoneSL-N5 | 1404 | 1267 |
| | F-del_DSCav1 | Slc7a3/Gnas; d-3 | A64-N5-C30-histoneSL-N5 | 1412 | 1267 |
| | F-del_DSCav1 | HSD17B4/Ndufa1; d-4 | A64-N5-C30-histoneSL-N5 | 1420 | 1267 |
| | F-del_DSCav1 | Slc7a3/Ndufa1; d-5 | A64-N5-C30-histoneSL-N5 | 1428 | 1267 |
| | F-del_DSCav1 | TUBB4B/RPS9; e-1 | A64-N5-C30-histoneSL-N5 | 1436 | 1267 |
| | F-del_DSCav1 | Rpl31/RPS9; e-2 | A64-N5-C30-histoneSL-N5 | 1444 | 1267 |
| | F-del_DSCav1 | Mp68/RPS9; e-3 | A64-N5-C30-histoneSL-N5 | 1452 | 1267 |
| | F-del_DSCav1 | Nosip/RPS9; e-4 | A64-N5-C30-histoneSL-N5 | 1460 | 1267 |
| | F-del_DSCav1 | ATP5A1/RPS9; e-5 | A64-N5-C30-histoneSL-N5 | 1468 | 1267 |
| | F-del_DSCav1 | ATP5A1/COX6B1; e-6 | A64-N5-C30-histoneSL-N5 | 1476 | 1267 |
| | F-del_DSCav1 | ATP5A1/Gnas; f-1 | A64-N5-C30-histoneSL-N5 | 1484 | 1267 |
| | F-del_DSCav1 | ATP5A1/Ndufa1; f-2 | A64-N5-C30-histoneSL-N5 | 1492 | 1267 |
| | F-del_DSCav1 | HSD17B4/COX6B1; f-3 | A64-N5-C30-histoneSL-N5 | 1500 | 1267 |
| | F-del_DSCav1 | HSD17B4/Gnas; f-4 | A64-N5-C30-histoneSL-N5 | 1508 | 1267 |
| | F-del_DSCav1 | Mp68/COX6B1; f-5 | A64-N5-C30-histoneSL-N5 | 1516 | 1267 |
| | F-del_DSCav1 | Mp68/Ndufa1; g-1 | A64-N5-C30-histoneSL-N5 | 1524 | 1267 |
| | F-del_DSCav1 | Ndufa4/CASP1; g-2 | A64-N5-C30-histoneSL-N5 | 1532 | 1267 |
| | F-del_DSCav1 | Ndufa4/Gnas; g-3 | A64-N5-C30-histoneSL-N5 | 1540 | 1267 |
| | F-del_DSCav1 | Nosip/CASP1; g-4 | A64-N5-C30-histoneSL-N5 | 1548 | 1267 |
| | F-del_DSCav1 | Rpl31/CASP1; g-5 | A64-N5-C30-histoneSL-N5 | 1556 | 1267 |
| | F-del_DSCav1 | Rpl31/COX6B1; h-1 | A64-N5-C30-histoneSL-N5 | 1564 | 1267 |
| | F-del_DSCav1 | Rpl31/Gnas; h-2 | A64-N5-C30-histoneSL-N5 | 1572 | 1267 |
| | F-del_DSCav1 | Rpl31/Ndufa1; h-3 | A64-N5-C30-histoneSL-N5 | 1580 | 1267 |
| | F-del_DSCav1 | Slc7a3/CASP1; h-4 | A64-N5-C30-histoneSL-N5 | 1588 | 1267 |
| | F-del_DSCav1 | Slc7a3/COX6B1; h-5 | A64-N5-C30-histoneSL-N5 | 1596 | 1267 |
| | F-del_DSCav1 | Slc7a3/RPS9; i-1 | A64-N5-C30-histoneSL-N5 | 1604 | 1267 |
| | F-del_DSCav1 | RPL32(32L4)/ALB7; i-2 | A64-N5-C30-histoneSL-N5 | 1612 | 1267 |
| R7454 | F_DSCav1_mut0 | —/muag; i-3 | A64-N5-C30-histoneSL-N5 | 4211 | 3850 |
| R7455 | F-del_DSCav1_mut0 | —/muag; i-3 | A64-N5-C30-histoneSL-N5 | 4580 | 4219 |
| R7458 | F_DSCav1_mut4 | —/muag; i-3 | A64-N5-C30-histoneSL-N5 | 4949 | 4588 |
| R7459 | F-del_DSCav1_mut4 | —/muag; i-3 | A64-N5-C30-histoneSL-N5 | 5318 | 4957 |
| R7456 | F_DSCav1_mut5 | —/muag; i-3 | A64-N5-C30-histoneSL-N5 | 5687 | 5326 |
| R7457 | F-del_DSCav1_mut5 | —/muag; i-3 | A64-N5-C30-histoneSL-N5 | 6056 | 5695 |
| | F_DSCav1_mut6 | —/muag; i-3 | A64-N5-C30-histoneSL-N5 | 6425 | 6064 |
| | F-del_DSCav1_mut6 | —/muag; i-3 | A64-N5-C30-histoneSL-N5 | 6794 | 6433 |
| | F_DSCav1_mut7 | —/muag; i-3 | A64-N5-C30-histoneSL-N5 | 7163 | 6802 |
| | F-del_DSCav1_mut7 | —/muag; i-3 | A64-N5-C30-histoneSL-N5 | 7532 | 7171 |
| | F_DSCav1_mut8 | —/muag; i-3 | A64-N5-C30-histoneSL-N5 | 7901 | 7540 |
| | F-del_DSCav1_mut8 | —/muag; i-3 | A64-N5-C30-histoneSL-N5 | 8270 | 7909 |
| R7595 | M | —/muag; i-3 | A64-N5-C30-histoneSL-N5 | 10046 | 9684 |
| R7597 | N | —/muag; i-3 | A64-N5-C30-histoneSL-N5 | 10496 | 10134 |
| R7598 | M2-1 | —/muag; i-3 | A64-N5-C30-histoneSL-N5 | 11545 | 11183 |
| R7596 | P | —/muag; i-3 | A64-N5-C30-histoneSL-N5 | 10999 | 10637 |

[0829] 1.4. Preparation of an LNP Formulated mRNA Composition:

[0830] Lipid nanoparticles (LNP), cationic lipids, and polymer conjugated lipids (PEG-lipid) were prepared and tested essentially according to the general procedures described in WO2015/199952, WO2017/004143 and WO2017/075531, the full disclosures of which are incorporated herein by reference. LNP formulated mRNA was prepared using an ionizable amino lipid (cationic lipid), phospholipid, cholesterol and a PEGylated lipid. Briefly, cationic lipid compound of formula III-3, DSPC, cholesterol, and PEG-lipid of formula Va were solubilized in ethanol at a molar ratio (%) of approximately 50:10:38.5:1.5 or 47.4:10:40.9:1.7. LNPs comprising cationic lipid compound of formula III-3 and PEG-lipid compound of formula IVa were prepared at a ratio of mRNA to total Lipid of 0.03-0.04 w/w. The mRNA was diluted to 0.05 mg/mL to 0.2 mg/mL in 10 mM to 50 mM citrate buffer, pH4. Syringe pumps were used to mix the ethanolic lipid solution with the mRNA aqueous solution at a ratio of about 1:5 to 1:3 (vol/vol) with total flow rates above 15 ml/min. The ethanol was then removed and the external buffer replaced with a PBS buffer comprising Sucrose by dialysis. Finally, the lipid nanoparticles were filtered through a 0.2 um pore sterile filter and the LNP-formulated mRNA composition was adjusted to about 1 mg/ml total mRNA. Lipid nanoparticle particle diameter size was 60-90 nm as determined by quasi-elastic light scattering using a Malvern Zetasizer Nano (Malvern, UK). For other cationic lipid compounds mentioned in the present specification, the formulation process is essentially similar. The obtained LNP-formulated mRNA composition (1 mg/ml total mRNA) was diluted to the desired target concentration using Saline before in vivo application.

[0831] 1.5. Preparation of a Protamine Complexed mRNA Composition:

[0832] mRNA constructs were complexed with protamine prior to use in in vivo immunization experiments. The mRNA formulation consisted of a mixture of 50% free mRNA and 50% mRNA complexed with protamine at a weight ratio of 2:1. First, mRNA was complexed with protamine by addition of protamine-Ringer's lactate solution to mRNA. After incubation for 10 minutes, when the complexes were stably generated, free mRNA was added, and the final concentration was adjusted with Ringer's lactate solution.

### Example 2: Vaccination of Cotton Rats with LNP-Formulated mRNA Encoding RSV-F and RSV Cotton Rat Challenge Study

[0833] The present Example shows that LNP-formulated mRNA encoding RSV-F induces strong and functional immune responses in cotton rats.

[0834] For the development of RSV vaccines the cotton rat is an accepted animal model, especially for the challenge infection. Cotton rats that have received formalin-inactivated RSV virus vaccine preparations respond to RSV infection with enhanced lung pathology. This allows the evaluation of the safety of a vaccination in terms of enhanced disease phenomenon.

[0835] To optimize the RSV-specific immune response, mRNA vaccines encoding the pre-fusion stabilized RSV F protein F-del_DSCav were prepared according to Example 1, formulated either with LNPs (see Example 1.4.) or with protamine (see Example 1.5.) and were applied on days 0 and 28 intramuscularly (i.m.) or intradermally (i.d) with different doses of RNA as shown in Table 10. Control animals received a single vaccination at day 0 with 105 pfu live RSV/A2 virus intranasally or two vaccinations at days 0 and 28 with formalin-inactivated RSV virus (FI-RSV) intramuscularly. Additional control animals received buffer only. For the present example, a UTR combination HSD17B4/ALB7 was used, herein referred to as “i-4”.

TABLE 10
Animal groups and vaccination schedule of Example 2

| Group | Cotton rats | Treatment | mRNA | dose | | Route | Volume | |
|---|---|---|---|---|---|---|---|---|
| 1 | 5 | mRNA/LNP | R4745 | 10 | μg | i.m. | 1 × 100 | uL |
| 2 | 5 | mRNA/LNP | R4745 | 2 | μg | i.m. | 1 × 100 | uL |
| 3 | 5 | mRNA/LNP | R4745 | 10 | μg | i.d. | 2 × 50 | uL |
| 4 | 5 | mRNA/LNP | R4745 | 2 | μg | i.d. | 2 × 50 | uL |
| 5 | 5 | mRNA/protamine | R5717 | 80 | μg | i.m. | 1 × 100 | uL |
| 6 | 5 | mRNA/protamine | R5717 | 80 | μg | i.d. | 2 × 50 | uL |
| 7 | 5 | Live RSV/A2 virus | | 105 | pfu | i.n. | 1 × 100 | uL |

| | | | | | | |
|---|---|---|---|---|---|---|
| 8 | 5 | FI-RSV | 1:100 | i.m. | 1 × 100 | uL |
| 9 | 5 | Buffer | — | i.m | 1 × 100 | uL |
| 10 | 5 | Untreated/uninfected | — | — | | |

[0836] Determination of Virus Neutralization Titers:

[0837] Serum was collected at day 49 and RSV virus neutralization titers (VNTs) were measured using a plaque reduction neutralization test (PRNT). Diluted serum samples were incubated with RSV/A2 for 1 hour at room temperature and inoculated in duplicates onto confluent HEp-2 monolayers in 24 well plates. After one hour incubation at 37° C. in a 5% CO2 incubator, the wells were overlayed with 0.75% Methylcellulose medium. After 4 days of incubation, the overlays were removed and the cells were fixed and stained. The corresponding reciprocal neutralizing antibody titers were determined at the 60% reduction end-point of the virus control.

[0838] Cotton Rat Challenge Study:

[0839] The vaccinated animals were challenged intranasally at day 63 with 105 pfu live RSV/A2 virus in 100 uL. One control group remained untreated and uninfected (group 10). All animals were sacrificed at day 68 and nasal tissue and lung were harvested.

[0840] RSV Titers in the Lungs of Challenged Cotton Rats:

[0841] Lungs of animals were collected at day 68 (i.e. 5 days after intranasal challenge with 105 pfu live RSV/A2 virus) and RSV/A2 titers were quantified in one lobe by plaque assay. Lung homogenates were clarified by centrifugation and diluted in EMEM. Confluent HEp-2 monolayers were infected in duplicates with diluted homogenates in 24 well plates. After one hour incubation at 37° C. in a 5% CO incubator, the wells were overlayed with 0.75% methylcellulose medium. After 4 days of incubation, the overlays were removed and the cells were fixed and stained with 0.1% crystal violet for one hour and then rinsed and air dried. Plaques were counted and virus titers were expressed as plaque forming units per gram of tissue. Viral titers were calculated as geometric mean±standard error for all animals in a group at a given time.

[0842] Lung Histopathology of Challenged Cotton Rats:

[0843] Lungs of animals were collected at day 68 (i.e. 5 days after intranasal challenge with 105 pfu live RSV/A2 virus) and one lobe was analyzed by histopathology. Lungs were dissected and inflated with 10% neutral buffered formalin to their normal volume, and then immersed in the same fixative solution. Following fixation, the lungs were embedded in paraffin, sectioned and stained with hematoxylin and eosin (H&E). Four parameters of pulmonary inflammation were evaluated: peribronchiolitis (inflammatory cell infiltration around the bronchioles), perivasculitis (inflammatory cell infiltration around the small blood vessels), interstitial pneumonia (inflammatory cell infiltration and thickening of alveolar walls), and alveolitis (cells within the alveolar spaces). Slides were scored blindly on a 0-4 severity scale. The scores were subsequently converted to a 0-100% histopathology scale.

[0844] Results:

[0845] As can be seen from FIG. 1, the LNP formulated RSV-F (F-del_DSCav1) mRNA vaccines induce the formation of RSV specific functional antibodies in cotton rats as shown by high virus neutralizing antibody titers (groups 1-4). Vaccination with protamine-formulated mRNA induces only weak responses.

[0846] As can be seen from FIG. 2, the LNP-formulated RSV-F (F-del_DSCav1) mRNA vaccines reduce lung viral titers in cotton rats challenged with RSV virus and therefore limit RSV infection of the lung (groups 1-4). All the animal groups vaccinated with mRNA formulated in LNPs vaccines showed virus titers below the level of detection of the performed virus titration demonstrating protection of vaccinated cotton rats in terms of viral lung titers. By contrast, the protamine-formulated mRNA vaccines (administrated i.m.) and the Formalin-inactivated virus vaccine reduced only minimally the lung virus titer compared to the buffer control group.

[0847] As can be seen from FIG. 3, the lung histopathology analysis from the RSV cotton rat challenge study reveals different pathology scores for the various animal groups. From the histopathology it can be concluded that none of the mRNA vaccinated groups displayed enhanced lung pathology as it is the case for the group that was vaccinated using the formalin-inactivated RSV vaccine. The average pathology scores for peribronchiolitis, perivasculitis, insterstitial pneumonia and alveolitis are much lower for all groups vaccinated with mRNA (groups 1-6) compared to the group with formalin-inactivated RSV (group 8).

### Example 3: Vaccination of Cotton Rats with LNP-Formulated mRNA Encoding RSV-F and RSV Cotton Rat Challenge Study

[0848] The present Example shows that LNP-formulated mRNA encoding different RSV-F antigens induce strong and functional immune responses in cotton rats for mRNA constructs having UTR combination RPL32/ALB7 (i-2).

[0849] This experiment compared mRNA-LNPs encoding three different RSV-F variants: full-length RSV F0, truncated RSV F-del, and pre-fusion stabilized truncated F-del_DSCav1. The mRNA-LNP vaccines were prepared according to Example 1. Cotton rats received two intramuscular vaccinations with mRNA-LNP vaccines on days 0 and 28. Each dose comprised 10 μg or 100 μg mRNA-LNPs. Control animals received a single vaccination at day 0 with 105 pfu live RSV/A2 virus intranasally or two vaccinations at days 0 and 28 with formalin-inactivated RSV virus (FI RSV) intramuscularly. Additional control animals received buffer only (see Table 11).

TABLE 11
Animal groups and vaccination schedule of Example 3

| | | RNA | | | |
|---|---|---|---|---|---|
| Group | Test item | ID | Dose | | Route |
| 1 | mRNA encoding F0 | R3737 | 10 | μg | i.m. |
| | LNP-formulated | | | | |
| 2 | mRNA encoding F0 | R3737 | 100 | μg | i.m. |
| | LNP-formulated | | | | |
| 3 | mRNA encoding F-del | R3738 | 10 | μg | i.m. |
| | LNP-formulated | | | | |
| 4 | mRNA encoding F-del | R3738 | 100 | μg | i.m. |
| | LNP-formulated | | | | |
| 5 | mRNA encoding F-delDSCav1 | R6122 | 10 | μg | i.m. |
| | LNP-formulated | | | | |
| 6 | mRNA encoding F-delDSCav1 | R6122 | 100 | μg | i.m. |
| | LNP-formulated | | | | |
| 7 | Live RSV/A2 virus | | 105 | pfu | i.n. |

| | | | |
|---|---|---|---|
| 8 | FI RSV | 1:100 | i.m. |
| 9 | Buffer | — | i.m. |
| 10 | untreated/uninfected | — | — |

[0850] Determination of Anti-RSV F Protein Antibodies by ELISA:

[0851] Blood samples were collected on days 28, 49, and 63 for the determination of anti-RSV F antibody titers. ELISA plates are coated with recombinant human RSV fusion glycoprotein (Extracellular domain of human RSV Fusion glycoprotein (529) fused with a polyhistidine tag at the C-terminus, expressed in Baculovirus-Insect Cells, provided as lyophilized powder). Coated plates are incubated using given serum dilutions. Binding of specific antibodies to the F protein is detected using biotinylated isotype specific anti-mouse antibodies in combination with streptavidin-HRP (horse radish peroxidase) with ABTS substrate.

[0852] Determination of Virus Neutralization Titers:

[0853] Serum was collected at day 49 and RSV virus neutralization titers (VNTs) were measured using a plaque reduction neutralization test (PRNT). Diluted serum samples were incubated with RSV/A2 for 1 hour at room temperature and inoculated in duplicates onto confluent HEp-2 monolayers in 24 well plates. After one hour incubation at 37° C. in a 5% CO2 incubator, the wells were overlayed with 0.75% Methylcellulose medium. After 4 days of incubation, the overlays were removed and the cells were fixed and stained. The corresponding reciprocal neutralizing antibody titers were determined at the 60% reduction end-point of the virus control.

[0854] Cotton Rat Challenge Study:

[0855] The vaccinated animals were challenged intranasally at day 63 with 10⁵ pfu live RSV/A2 virus in 100 uL. One control group remained untreated and uninfected. All animals were sacrificed at day 68 and nasal tissue and lung were harvested.

[0856] RSV Titers in the Lungs of Challenged Cotton Rats:

[0857] Lungs of animals were collected at day 68 (i.e. 5 days after intranasal challenge with 10⁵ pfu live RSV/A2 virus) and RSV/A2 titers were quantified in one lobe by plaque assay as described above.

[0858] RSV Titers in Nasal Tissue of Challenged Cotton Rats

[0859] Nasal tissue of animals was collected at day 68 (i.e. 5 days after intranasal challenge with 105 pfu live RSV/A2 virus). The nose homogenates were clarified as the lung homogenates by centrifugation and diluted in EMEM. Confluent HEp-2 monolayers were infected in duplicates with diluted homogenates in 24 well plates. After one hour incubation at 37° C. in a 5% CO incubator, the wells were overlayed with 0.75% methylcellulose medium. After 4 days of incubation, the overlays were removed and the cells were fixed and stained with 0.1% crystal violet for one hour and then rinsed and air dried. Plaques were counted and virus titers were expressed as plaque forming units per gram of tissue. Viral titers were calculated as geometric mean±standard error for all animals in a group at a given time.

[0860] Lung Histopathology of Challenged Cotton Rats:

[0861] Lungs of animals were collected at day 68 (i.e. 5 days after intranasal challenge with 105 pfu live RSV/A2 virus) and one lobe was analyzed by histopathology as described before.

[0862] Results:

[0863] As can be seen from FIG. 4, all LNP-formulated RSV-F (F0, F-del, F-del_DSCav1) mRNA vaccines induced the formation of RSV specific functional antibodies in cotton rats as shown by high virus neutralizing antibody titers.

[0864] FIGS. 5a, 5b and 5c show that LNP-formulated mRNA encoding the RSV F-protein (F0, F-del, and F-del_DSCav1) induces humoral immune responses in cotton rats against the RSV-F protein. Antibody total IgG titers were determined by ELISA. FIG. 5a: Antibody titers determined on day 49; FIGS. 5b and 5c: time-dependent igG titers in serum with 10 μg mRNA (FIG. 5b) or 100 μg mRNA (FIG. 5c) encoding the RSV F-protein (F0, F-del, and F-del_DSCav1). With both doses, 10 μg and 100 μg, F0 and F-del vaccines induce higher titers of RSV-F specific IgGs already after prime vaccination (day 28) compared with the vaccination with the live virus. After boost vaccination all tested LNP-formulated RSV-F (F0, F-del, F-del_DSCav1) mRNA vaccines induces humoral immune responses measured with ELISA which are more prominent then the answers of the control vaccinations.

[0865] As can be seen from FIG. 6, LNP-formulated RSV-F (F0, F-del, F-del_DSCav1) mRNA vaccines reduced lung viral titers in cotton rats challenged with RSV virus and therefore limit RSV infection of the lung. All the animal groups vaccinated with mRNA formulated in LNPs vaccines showed virus titers below the level of detection of the performed virus titration. The results demonstrate protection of vaccinated cotton rats in terms of viral lung titers. By contrast, the formalin-inactivated virus vaccine (FI RSV) reduced only minimally the lung virus titer compared to the buffer control group.

[0866] As can be seen from FIG. 7, the LNP-formulated RSV-F (F0, F-del, F-del_DSCav1) mRNA vaccines strongly reduced viral titers in nasal tissue of cotton rats challenged with RSV virus and therefore reduce RSV infection of the nose. In comparison to the mRNA vaccines the vaccine based on formalin-inactivated virus (F RSV) were not able to reduce the nasal virus titers.

[0867] As can be seen from FIG. 8, the lung histopathology analysis from the RSV cotton rat challenge study reveals different pathology scores for the various animal groups. From the histopathology it can be concluded that none of the mRNA vaccinated groups displayed enhanced lung pathology as it is the case for the group that was vaccinated using the formalin-inactivated RSV vaccine. The average pathology scores for peribronchiolitis, perivasculitis, insterstitial pneumonia and alveolitis are much lower for all groups vaccinated with mRNA compared to the group with formalin-inactivated RSV.

[0868] To further improve the efficiency of the mRNA-based vaccine, several alternative RSV-F mRNA constructs were designed harboring different UTR combinations to potentially increase translation efficiency of the mRNA. Those mRNA constructs were tested as can be seen in the following Example.

### Example 4: In Vitro Expression Screen of RSV-F mRNA Constructs

[0869] The present Example shows that the UTR combinations according to the invention strongly improve the expression performance of said mRNA constructs compared to a reference mRNA construct (harboring RPL32/ALB7 UTRs) used e.g. in Example 3 (UTR combination RPL32/ALB7 (i-2)).

[0870] To further improve the expression performance of RSV-F mRNA, a screening experiment was conducted to identify advantageous UTR combinations according to the invention. To determine the protein expression performance of RSV-F mRNA constructs comprising different UTR combinations, HEK 293T cells were transfected with different Lipofectamine-formulated mRNA constructs, which all contain the same coding sequence encoding pre-fusion stabilized truncated F-del_DSCav1 but use different 5′- and 3′-UTRs (see Table 12). RSV-F expression was analyzed 24 h after transfection by flow cytometry.

TABLE 12
Overview of mRNA constructs with different
UTR combinations used in Example 4

| | | SEQ ID NO: | SEQ ID NO: |
|---|---|---|---|
| Antigen | UTR Design | RNA | Protein |
| F-del_DSCav1 | HSD17B4/PSMB3; a-1 | 1276 | 1267 |
| F-del_DSCav1 | Ndufa4/PSMB3; a-2 | 1284 | 1267 |
| F-del_DSCav1 | Slc7a3/PSMB3; a-3 | 1292 | 1267 |
| F-del_DSCav1 | Nosip/PSMB3; a-4 | 1300 | 1267 |
| F-del_DSCav1 | Mp68/PSMB3; a-5 | 1308 | 1267 |
| F-del_DSCav1 | Ubqln2/RPS9; b-1 | 1316 | 1267 |
| F-del_DSCav1 | ASAH1/RPS9; b-2 | 1324 | 1267 |
| F-del_DSCav1 | HSD17B4/RPS9; b-3 | 1332 | 1267 |
| F-del_DSCav1 | HSD17B4/CASP1; b-4 | 1340 | 1267 |
| F-del_DSCav1 | Nosip/COX6B1; b-5 | 1348 | 1267 |
| F-del_DSCav1 | Ndufa4/RPS9; c-1 | 1356 | 1267 |
| F-del_DSCav1 | Nosip/Ndufa1; c-2 | 1364 | 1267 |
| F-del_DSCav1 | Ndufa4/COX6B1; c-3 | 1372 | 1267 |
| F-del_DSCav1 | Ndufa4/Ndufa1; c-4 | 1380 | 1267 |
| F-del_DSCav1 | ATP5A1/PSMB3; c-5 | 1388 | 1267 |
| F-del_DSCav1 | Rpl31/PSMB3; d-1 | 1396 | 1267 |
| F-del_DSCav1 | ATP5A1/CASP1; d-2 | 1404 | 1267 |
| F-del_DSCav1 | Slc7a3/Gnas; d-3 | 1412 | 1267 |
| F-del_DSCav1 | HSD17B4/Ndufa1; d-4 | 1420 | 1267 |
| F-del_DSCav1 | Slc7a3/Ndufa1; d-5 | 1428 | 1267 |
| F-del_DSCav1 | TUBB4B/RPS9; e-1 | 1436 | 1267 |
| F-del_DSCav1 | Rpl31/RPS9; e-2 | 1444 | 1267 |
| F-del_DSCav1 | Mp68/RPS9; e-3 | 1452 | 1267 |
| F-del_DSCav1 | Nosip/RPS9; e-4 | 1460 | 1267 |
| F-del_DSCav1 | ATP5A1/RPS9; e-5 | 1468 | 1267 |
| F-del_DSCav1 | ATP5A1/COX6B1; e-6 | 1476 | 1267 |
| F-del_DSCav1 | ATP5A1/Gnas; f-1 | 1484 | 1267 |
| F-del_DSCav1 | ATP5A1/Ndufa1; f-2 | 1492 | 1267 |
| F-del_DSCav1 | HSD17B4/COX6B1; f-3 | 1500 | 1267 |
| F-del_DSCav1 | HSD17B4/Gnas; f-4 | 1508 | 1267 |
| F-del_DSCav1 | Mp68/COX6B1; f-5 | 1516 | 1267 |
| F-del_DSCav1 | Mp68/Ndufa1; g-1 | 1524 | 1267 |
| F-del_DSCav1 | Ndufa4/CASP1; g-2 | 1532 | 1267 |
| F-del_DSCav1 | Ndufa4/Gnas; g-3 | 1540 | 1267 |
| F-del_DSCav1 | Nosip/CASP1; g-4 | 1548 | 1267 |
| F-del_DSCav1 | Rpl31/CASP1; g-5 | 1556 | 1267 |
| F-del_DSCav1 | Rpl31/COX6B1; h-1 | 1564 | 1267 |
| F-del_DSCav1 | Rpl31/Gnas; h-2 | 1572 | 1267 |
| F-del_DSCav1 | Rpl31/Ndufa1; h-3 | 1580 | 1267 |
| F-del_DSCav1 | Slc7a3/CASP1; h-4 | 1588 | 1267 |
| F-del_DSCav1 | Slc7a3/COX6B1; h-5 | 1596 | 1267 |
| F-del_DSCav1 | Slc7a3/RPS9; i-1 | 1604 | 1267 |
| F-del_DSCav1 | RPL32(32L4)/ALB7; i-2 | 1612 | 1267 |

[0871] Detailed Description of the Transfection and Flow Cytometry Analysis:

[0872] 293T cells were seeded at a density of 200000 cells/well (200000 cells/2 ml) in a 6-well plate. Each RNA was complexed with Lipofectamine2000 at a ratio of 1/1.5 (w/v) for 20 minutes in Opti-MEM. Lipocomplexed mRNAs were then added to cells for transfection with 2 μg of RNA per well in a total volume of 500 uL. 4 h post start of transfection the transfection solution was exchanged for 2000 uL/well of complete medium. Cells were further maintained at 37° C., 5% CO2 before performing FACS analysis.

[0873] 24 hours after transfection, expression of antigen of interest was quantified by FACS analysis using standard procedures. Briefly, cells were detached (40 mM Tris HCl pH 7.5 150 mM NaCl, 1 mM EDTA in H20; 5 min at RT), washed with PBS, and stained on the surface with a mouse antibody against the RSV-F (Millipore, Cat: MAB8262) and a fluorescently labeled goat anti-mouse IgG antibody (Sigma, Cat: F5262). Cells were resuspended in 100 uL PFEA buffer (PBS+2% FCS+2 mM EDTA+0.01% NaN3) and analyzed using a BD FACS Canto II. Live/Dead staining was performed with Aqua fluorescent reactive dye (Invitrogen).

[0874] The results were compared to the expression from a reference construct of Example 3 containing the RPL32/ALB7 UTR-combination (SEQ ID NO: 1612) which was set to a level of 100%. The results of the analysis are shown in FIG. 9.

[0875] Results

[0876] As can be seen from FIG. 9, the expression performances of the mRNA constructs comprising UTR combinations according to the invention were strongly increased compared to the construct comprising the reference UTR combination (RPL32/ALB7; i-2).

### Example 5: Vaccination of Cotton Rats with LNP-Formulated mRNA Encoding RSV-F and Cotton Rat Challenge Study

[0877] Based on the results of the UTR screen of Example 4, mRNA constructs having UTR combinations for optimizing mRNA expression are used in vaccination experiments.

[0878] In this experiment mRNA vaccines encoding RSV-F (F, F-del, or F-del_DSCav1) with different UTR combinations according to the invention are compared. The mRNA-LNP vaccines are prepared according to Example 1. Cotton rats receive two intramuscular vaccinations with mRNA-LNP vaccines on days 0 and 28. Each dose comprises 2 μg or 10 μg mRNA-LNPs. Control animals receive a single vaccination at day 0 with 105 pfu live RSV/A2 virus intranasally or formalin-inactivated RSV virus intramuscularly. Additional control animals receive buffer only (see Table 13).

TABLE 13
Animal groups and vaccination schedule of Example 5

| | | | SEQ ID NO: | | | |
|---|---|---|---|---|---|---|
| Group | Test Item | 5′-UTR/3′-UTR; | RNA | Dose | | Route |
| 1 | F0, F-del or F-del_DSCav1 | Nosip/RPS9; e-4 | 286, 701 or 1460 | 10 | μg | i.m. |
| 2 | F0, F-del or F-del_DSCav1 | Nosip/RPS9; e-4 | 286, 701 or 1460 | 2 | μg | i.m. |
| 3 | F0, F-del or F-del_DSCav1 | Ndufa4/CASP1; g-2 | 367, 782 or 1532 | 10 | μg | i.m. |
| 4 | F0, F-del or F-del_DSCav1 | Ndufa4/CASP1; g-2 | 367, 782 or 1532 | 2 | μg | i.m. |
| 5 | F0, F-del or F-del_DSCav1 | Ndufa4/RPS9; c-1 | 169, 584 or 1356 | 10 | μg | i.m. |
| 6 | F0, F-del or F-del_DSCav1 | Ndufa4/RPS9; c-1 | 169, 584 or 1356 | 2 | μg | i.m. |
| 7 | F0, F-del or F-del_DSCav1 | Ndufa4/PSMB3; a-2 | 88, 503 or 1284 | 10 | μg | i.m. |
| 8 | F0, F-del or F-del_DSCav1 | Ndufa4/PSMB3; a-2 | 88, 503 or 1284 | 2 | μg | i.m. |
| 9 | F0, F-del or F-del_DSCav1 | HSD17B4/PSMB3; a-1 | 79, 494 or 1276 | 10 | μg | i.m. |
| 10 | F0, F-del or F-del_DSCav1 | HSD17B4/PSMB3; a-1 | 79, 494 or 1276 | 2 | μg | i.m. |
| 11 | F0, F-del or F-del_DSCav1 | —/muag; i-3 | 475, 890 or 1628 | 10 | μg | i.m. |
| | | | (R6939, R6940 or | | | |
| | | | R5453) | | | |
| 12 | F0, F-del or F-del_DSCav1 | —/muag; i-3 | 475, 890 or 1628 | 2 | μg | i.m. |
| | | | (R6939, R6940 or | | | |
| | | | R5453) | | | |

| | | | |
|---|---|---|---|
| 13 | Live RSV/A2 virus | 5.0Log IM | i.n. |
| 14 | UV-Inact. RSV/A2 | 5.0Log IM | i.m. |
| 15 | FI-RSV | 1:100 | i.m. |
| 16 | Buffer | | i.m. |
| 17 | untreated/uninfected | | |

[0879] Determination of Anti-RSV Immune Responses Using ELISA or PRNT

[0880] The induction of anti-RSV immune responses are determined as described before.

[0881] Cotton Rat Challenge Study

[0882] The vaccinated animals are challenged intranasally at day 63 with 10exp5 pfu live RSV/A2 virus in 100 uL. One control group remains untreated and uninfected. All animals are sacrificed at day 68 and nasal tissue and lung tissue are harvested.

[0883] RSV Titers in the Lungs of Challenged Cotton Rats

[0884] Lungs of animals are collected at day 68 (i.e. 5 days after intranasal challenge with 10exp5 pfu live RSV/A2 virus) and RSV/A2 titers are quantified in one lobe by plaque assay as described above. In addition, RSV viral genome copy numbers (by measuring copy numbers of the RSV NS-1 gene) and cytokine mRNA levels were determined by quantitative reverse transcription polymerase chain reaction (qRT-PCR).

[0885] RSV Titers in Nasal Tissue of Challenged Cotton Rats

[0886] Nasal tissue of animals are collected at day 68 (i.e. 5 days after intranasal challenge with 105 pfu live RSV/A2 virus). The viral titers are quantified as described above. In addition, RSV viral genome copy numbers (by measuring copy numbers of the RSV NS-1 gene) and cytokine mRNA levels were determined by quantitative reverse transcription polymerase chain reaction (qRT-PCR).

[0887] Lung Histopathology of Challenged Cotton Rats

[0888] Lungs of animals are collected at day 68 (i.e. 5 days after intranasal challenge with 105 pfu live RSV/A2 virus) and one lobe is analyzed by histopathology as described before.

### Example 6: Vaccination of Cotton Rats with LNP-Formulated mRNA Encoding RSV-F and Cotton Rat Challenge Study

[0889] In this experiment mRNA vaccines encoding RSV-F (F_DSCav1_mut1, F_DSCav1_mut2, F_DSCav1_mut3, F-del_DSCav1_mut1, F-del_DSCav1_mut2, F-del_DSCav1_mut3 (and/or additionally with F_DSCav1_mut0, _mut4, _mut5, _mut6, _mut7, _mut8 and/or F-del_DSCav1_mut0, _mut4, _mut5, _mut6, _mut7, _mut8) are compared. The mRNA-LNP vaccines are prepared according to Example 1. Cotton rats receive two intramuscular vaccinations with mRNA-LNP vaccines on days 0 and 28. Each dose comprises 2 μg or 10 μg mRNA-LNPs. Control animals receive a single vaccination at day 0 with 105 pfu live RSV/A2 virus intranasally or formalin-inactivated RSV virus intramuscularly. Additional control animals receive buffer only (see Table 14).

TABLE 14
Animal groups of Example 6

| | | RNA | SEQ ID NO: | SEQ ID NO: | |
|---|---|---|---|---|---|
| Group | Test Item | ID | RNA | Protein | Route |
| 1 | F_DSCav1_mut1 | R6771 | 1997 | 1636 | i.m. |
| 2 | F-del_DSCav1_mut1 | R6774 | 2366 | 2005 | i.m. |
| 3 | F_DSCav1_mut2 | R6772 | 2735 | 2374 | i.m. |
| 4 | F-del_DSCav1_mut2 | R6773 | 3104 | 2743 | i.m. |
| 5 | F_DSCav1_mut3 | R6770 | 3473 | 3112 | i.m. |
| 6 | F-del_DSCav1_mut3 | R6775 | 3842 | 3481 | i.m. |
| 7 | Live RSV/A2 virus | | | | i.n. |
| 8 | UV-Inact. RSV/A2 | | | | i.m. |
| 9 | FI-RSV | | | | i.m. |
| 10 | Buffer | | | | i.m. |
| 11 | Untreated/uninfected | | | | |

[0890] Determination of Anti-RSV Immune Responses Using ELISA or PRNT

[0891] The induction of anti-RSV immune responses are determined as described before.

[0892] Cotton Rat Challenge Study

[0893] The vaccinated animals are challenged intranasally at day 63 with 10exp5 pfu live RSV/A2 virus in 100 uL. One control group remains untreated and uninfected. All animals are sacrificed at day 68 and nasal tissue and lung tissue are harvested.

[0894] RSV Titers in the Lungs of Challenged Cotton Rats

[0895] Lungs of animals are collected at day 68 (i.e. 5 days after intranasal challenge with 10exp5 pfu live RSV/A2 virus) and RSV/A2 titers are quantified in one lobe by plaque assay as described above. In addition, RSV viral genome copy numbers (by measuring copy numbers of the RSV NS-1 gene) and cytokine mRNA levels were determined by quantitative reverse transcription polymerase chain reaction (qRT-PCR).

[0896] RSV Titers in Nasal Tissue of Challenged Cotton Rats

[0897] Nasal tissue of animals are collected at day 68 (i.e. 5 days after intranasal challenge with 105 pfu live RSV/A2 virus). The viral titers are quantified as described above. In addition, RSV viral genome copy numbers (by measuring copy numbers of the RSV NS-1 gene) and cytokine mRNA levels were determined by quantitative reverse transcription polymerase chain reaction (qRT-PCR).

[0898] Lung Histopathology of Challenged Cotton Rats Lungs of animals are collected at day 68 (i.e. 5 days after intranasal challenge with 10⁵ pfu live RSV/A2 virus) and one lobe is analyzed by histopathology as described before.

### Example 7: Vaccination of Cotton Rats with SNP-Formulated mRNA Encoding RSV-F and a Further RSV Antigen and Cotton Rat Challenge Study

[0899] To broaden and optimize the RSV-specific immune response, especially to increase T-cell dependent immune responses, mRNA vaccines encoding different RSV proteins (RSV F (F0, F, F-del, F_DSCav1 F-del_DSCav1, or F_DSCav1 mut0-mut8 or F-del_DSCav1 mut0-mut8) are prepared according to Example 1. In order to assess the effect of single or combined vaccines, these vaccines are administered either alone or in combination as shown in Table 9. Cotton rats receive two intramuscular (i.m.) vaccinations with mRNA-LNP vaccines on days 0 and 28 with 2 μg or 10 μg mRNA for each antigen. Additional groups are immunized intramuscularly (i.m.) with formalin-inactivated RSV and/or live RSV/A2 to compare their immunogenicity to mRNA vaccines. Additional control animals receive buffer only (see Table 15). The RSV-specific immune responses are determined by Elisa or Intracellular cytokine staining (ICS).

TABLE 15
Animal groups of Example 7

| | | SEQ ID NO: | |
|---|---|---|---|
| Group | Test Item | RNA | Route |
| 1 | F | 475, 890, 1259, 1628, 1997, 2366, 2735, 3104, 3473, 3842, 4211, | i.m. |
| | | 4580, 4949, 5318, 5687, 6056, 6425, 6794, 7163, 7532, 7901, or | |
| | | 8270 | |
| 2 | M | 10046 | i.m. |
| 3 | N | 10496 | i.m. |
| 4 | M2-1 | 11545 | i.m. |
| 5 | P | 10999 | i.m. |
| 6 | F + M | F (SEQ ID NOs: 475, 890, 1259, 1628, 1997, 2366, 2735, 3104, | i.m. |
| | | 3473, 3842, 4211, 4580, 4949, 5318, 5687, 6056, 6425, 6794, | |
| | | 7163, 7532, 7901, or 8270) + | |
| | | M (SEQ ID NO: 10046) | |
| 7 | F + N | F (SEQ ID NOs: 475, 890, 1259, 1628, 1997, 2366, 2735, 3104, | i.m. |
| | | 3473, 3842, 4211, 4580, 4949, 5318, 5687, 6056, 6425, 6794, | |
| | | 7163, 7532, 7901, or 8270) + | |
| | | N (SEQ ID NO: 10496) | |
| 8 | F + M2-1 | F (SEQ ID NOs: 475, 890, 1259, 1628, 1997, 2366, 2735, 3104, | i.m. |
| | | 3473, 3842, 4211,4580, 4949, 5318, 5687, 6056, 6425, 6794, | |
| | | 7163, 7532, 7901, or 8270) + | |
| | | M2-1 (SEQ ID NO: 11545) | |
| 9 | F + P | F (SEQ ID NOs: 475, 890, 1259, 1628, 1997, 2366, 2735, 3104, | i.m. |
| | | 3473, 3842, 4211, 4580, 4949, 5318, 5687, 6056, 6425, 6794, | |
| | | 7163, 7532, 7901, or 8270) + | |
| | | P (SEQ ID NO: 10999) | |
| 10 | F + M + P | F (SEQ ID NOs: 475, 890, 1259, 1628, 1997, 2366, 2735, 3104, | i.m. |
| | | 3473, 3842, 4211, 4580, 4949, 5318, 5687, 6056, 6425, 6794, | |
| | | 7163, 7532, 7901, or 8270) + | |
| | | P (SEQ ID NO: 10999) + M (SEQ ID NO: 10046). | |
| 11 | F + M + N + P | F (SEQ ID NOs: 475, 890, 1259, 1628, 1997, 2366, 2735, 3104, | i.m. |
| | | 3473, 3842, 4211, 4580, 4949, 5318, 5687, 6056, 6425, 6794, | |
| | | 7163, 7532, 7901, or 8270) + P (SEQ ID NO: 10999) + | |
| | | M (SEQ ID NO: 10046) + N (SEQ ID NO: 10496) | |
| 12 | Live RSV/A2 virus | | i.n. |
| 13 | UV-Inact. RSV/A2 | | i.m. |
| 14 | FI-RSV | | i.m. |
| 15 | Buffer | | i.m. |
| 16 | Untreated/uninfected | | |

[0900] For vaccination experiments of Example 7, polyvalent mRNA compositions/vaccines are produced (e.g. groups 6-10) according to procedures as disclosed in the PCT application WO2017/109134 using at least two different sequence optimized DNA templates (each of which generated as described in Example 1). In short, a DNA construct mixture (each of which comprising a different coding sequences and a T7 promotor) is used as a template for simultaneous RNA in vitro transcription to generate a mixture of mRNA constructs. Subsequently, the obtained RNA mixture is used for co-purification using RP-HPLC. Following that, the obtained purified RNA mixture is formulated in LNPs (as described in section 1.4.) to generate a polyvalent LNP-formulated RNA composition/vaccine.

[0901] Determination of Anti-RSV Immune Responses Using ELISA PRNT:

[0902] The induction of anti-RSV immune responses are determined as described before, with suitable recombinant proteins or peptides for its detection.

[0903] Intracellular Cytokine Staining (ICS):

[0904] Splenocytes from vaccinated and control mice are isolated according to a standard protocol. Briefly, isolated spleens are grinded through a cell strainer and washed in PBS/1% FBS followed by red blood cell lysis. After an extensive washing step with PBS/1% FBS splenocytes are seeded into 96-well plates (2×106 cells/well). The next day cells are stimulated with a suitable RSV peptide or an irrelevant control peptide and 2.5 μg/ml of an anti-CD28 antibody (BD Biosciences) for 6 hours at 37° C. in the presence of the mixture of GolgiPlug™/GolgiStop™ (Protein transport inhibitors containing Brefeldin A and Monensin, respectively; BD Biosciences). After stimulation cells are washed and stained for intracellular cytokines using the Cytofix/Cytoperm reagent (BD Biosciences) according to the manufacturer's instructions. The following antibodies are used for staining: CD8-PECy7 (1:200), CD3-FITC (1:200), IL2-PerCP-Cy5.5 (1:100), TNFα-PE (1:100), IFNγ-APC (1:100) (eBioscience), CD4-BD Horizon V450 (1:200) (BD Biosciences) and incubated with Fcy-block diluted 1:100. Aqua Dye is used to distinguish live/dead cells (Invitrogen). Cells are collected using a Canto I flow cytometer (Beckton Dickinson). Flow cytometry data are analysed using FlowJo software (Tree Star, Inc.).

[0905] Cotton Rat Challenge Study:

[0906] The vaccinated animals are challenged intranasally at day 63 with 10exp5 pfu live RSV/A2 virus in 100 uL. One control group remains untreated and uninfected. All animals are sacrificed at day 68 and nasal tissue and lung tissue are harvested.

[0907] Cotton Rat Challenge Study:

[0908] The vaccinated animals are challenged intranasally at day 63 with 10exp5 pfu live RSV/A2 virus in 100 uL. One control group remains untreated and uninfected. All animals are sacrificed at day 68 and nasal tissue and lung tissue are harvested. Serum is collected at day 49 and RSV virus neutralization titers (VNTs) are measured using a plaque reduction neutralization test (PRNT) as described in Example 2.

[0909] RSV Titers in the Lungs of Challenged Cotton Rats:

[0910] Lungs of animals are collected at day 68 (i.e. 5 days after intranasal challenge with 10exp5 pfu live RSV/A2 virus) and RSV/A2 titers are quantified in one lobe by plaque assay as described above. In addition, RSV viral genome copy numbers (by measuring copy numbers of the RSV NS-1 gene) and cytokine mRNA levels were determined by quantitative reverse transcription polymerase chain reaction (qRT-PCR).

[0911] RSV Titers in Nasal Tissue of Challenged Cotton Rats:

[0912] Nasal tissue of animals are collected at day 68 (i.e. 5 days after intranasal challenge with 105 pfu live RSV/A2 virus). The viral titers are quantified as described above. In addition, RSV viral genome copy numbers (by measuring copy numbers of the RSV NS-1 gene) and cytokine mRNA levels were determined by quantitative reverse transcription polymerase chain reaction (qRT-PCR).

[0913] Lung Histopathology of Challenged Cotton Rats:

[0914] Lungs of animals are collected at day 68 (i.e. 5 days after intranasal challenge with 105 pfu live RSV/A2 virus) and one lobe is analyzed by histopathology as described before.

### Example 8: Expression of Different RSV F Proteins in HeLa Cells and Analysis by FACS

[0915] To determine in vitro protein expression of the mRNA constructs, HeLa cells were transiently transfected with mRNA encoding RSV F antigens and stained for RSV Fusing a suitable anti-F protein antibodies (raised in mouse), counterstained with a FITC-coupled secondary anti-mouse antibody (F5262 from Sigma). HeLa cells were seeded in a 6-well plate at a density of 400,000 cells/well in cell culture medium (RPMI, 10% FCS, 1% L-Glutamine, 1% Pen/Strep), 24 h prior to transfection. HeLa cells were transfected with 2 μg unformulated mRNA using Lipofectamine 2000 (Invitrogen). The mRNA constructs prepared according to Example 1 and listed in Table 16 were used in the experiment (see also Table 9), including a negative control (water for injection). 24 hours post transfection, HeLa cells were stained with suitable anti RSV-F antibodies (raised in mouse; 1:500) and anti-mouse FITC labelled secondary antibody (1:500) and subsequently analyzed by flow cytometry (FACS) on a BD FACS Canto II using the FACS Diva software. Quantitative analysis of the fluorescent FITC signal was performed using the FlowJo software package (Tree Star, Inc.). Cells were stained intracellularly or alternatively on the cell surface. The results are shown in FIGS. 10a and 10b, representing two different independent experiments.

TABLE 16
Overview of mRNA constructs used in Example 8

| RNA | | | SEQ ID NO: | SEQ ID NO: | see |
|---|---|---|---|---|---|
| ID | Antigen | UTR Design | RNA | Protein | Figure |
| R6939 | F0 | —/muag; i-3 | 475 | 68 | 10a, 10b |
| R6808 | F0_DSCav1 | —/muag; i-3 | 1259 | 898 | 10a, 10b |
| R6770 | F_DSCav1_mut3 | —/muag; i-3 | 3473 | 3112 | 10a |
| R6771 | F_DSCav1_mut1 | —/muag; i-3 | 1997 | 1636 | 10a |
| R6772 | F_DSCav1_mut2 | —/muag; i-3 | 2735 | 2374 | 10a |
| R6940 | F-del | —/muag; i-3 | 890 | 483 | 10a, 10b |
| R5453 | F-del_DSCav1 | —/muag; i-3 | 1628 | 1267 | 10a, 10b |
| R6775 | F-del_DSCav1_mut3 | —/muag; i-3 | 3842 | 3481 | 10a |
| R6774 | F-del_DSCav1_mut1 | —/muag; i-3 | 2366 | 2005 | 10a |
| R6773 | F-del_DSCav1_mut2 | —/muag; i-3 | 3104 | 2743 | 10a |
| R7454 | F_DSCav1_mut0 | —/muag; i-3 | 4211 | 3850 | 10b |
| R7456 | F_DSCav1_mut5 | —/muag; i-3 | 5687 | 5326 | 10b |
| R7458 | F_DSCav1_mut4 | —/muag; i-3 | 4949 | 4588 | 10b |
| R7455 | F-del_DSCav1_mut0 | —/muag; i-3 | 4580 | 4219 | 10b |
| R7457 | F-del_DSCav1_mut5 | —/muag; i-3 | 6056 | 5695 | 10b |
| R7459 | F-del_DSCav1_mut4 | —/muag; i-3 | 5318 | 4957 | 10b |

[0916] Results:

[0917] The results show that the used mRNA constructs led to a detectable intracellular RSV F protein expression as well as to a detectable protein expression at the cell surface. The RSV F constructs with deleted C-terminus (F-del) (e.g. R6940, R5453, R6775, R6774, R6773, R7455, R7457, R7459) show an increased cell surface protein expression in comparison to F full length constructs. The construct encoding F-del_DSCav1_mut0 (R7455) exhibits the highest expression.

[0918] The results exemplify that the inventive mRNA encoding F proteins (F0, F-del, F0_DSCav1, F-del_DSCav1, F_DSCav1_mut0, F-del_DSCav1_mut0, F_DSCav1_mut1, F-del_DSCav1_mut1, F_DSCav1_mut2, F-del_DSCav1_mut2, F_DSCav1_mut3, F-del_DSCav1_mut3, F_DSCav1_mut4, F-del_DSCav1_mut4, F_DSCav1_mut5, F-del_DSCav1_mut5) is translated in cells and are present at the cell surface, which is a prerequisite for an mRNA-based RSV vaccine.

### Example 9: Vaccination of Cotton Rats with LNP-Formulated mRNA Encoding RSV-F and RSV Cotton Rat Challenge Study

[0919] The present Example shows that LNP-formulated mRNA according to the invention encoding different pre-fusion stabilized RSV-F antigens induce strong, functional and protective immune responses in cotton rats.

[0920] This experiment compared mRNA-LNPs encoding different pre-fusion stabilized RSV-F variants (mut 1, mut2, mut3) with either full-length F or with the truncated F (F-del). The mRNA-LNP vaccines were prepared according to Example 1. Cotton rats received two intramuscular vaccinations with mRNA-LNP vaccines on days 0 and 28. Each dose comprised 100 μg mRNA-LNPs. Control animals received a single vaccination at day 0 with 105 pfu live RSV/A2 virus or UV inactivated RSV/A2 virus or two vaccinations at days 0 and 28 with formalin-inactivated RSV virus (F1 RSV) intramuscularly. Additional control animals received buffer only (see Table 17).

TABLE 17
Animal groups and vaccination schedule of Example 9

| | | RNA | SEQ ID NO: | SEQ ID NO: | | |
|---|---|---|---|---|---|---|
| Group | Test item | ID | RNA | Protein | Dose | Route |
| 1 | mRNA encoding F0 | R6939 | 475 | 68 | 100 μg | i.m. |
| | LNP-formulated | | | | | |
| 2 | mRNA encoding | R6808 | 1259 | 898 | 100 μg | i.m. |
| | F0_DSCav1 | | | | | |
| | LNP-formulated | | | | | |
| 3 | mRNA encoding | R6770 | 3473 | 3112 | 100 μg | i.m. |
| | F_DSCav1_mut3 | | | | | |
| | LNP-formulated | | | | | |
| 4 | mRNA encoding | R6771 | 1997 | 1636 | 100 μg | i.m. |
| | F_DSCav1_mut1 | | | | | |
| | LNP-formulated | | | | | |
| 5 | mRNA encoding | R6772 | 2735 | 2374 | 100 μg | i.m. |
| | F_DSCav1_mut2 | | | | | |
| | LNP-formulated | | | | | |
| 6 | mRNA encoding F-del | R6940 | 890 | 483 | 100 μg | i.m. |
| | LNP-formulated | | | | | |
| 7 | mRNA encoding | R5453 | 1628 | 1267 | 100 μg | i.m. |
| | F-del_DSCav1 | | | | | |
| | LNP-formulated | | | | | |
| 8 | mRNA encoding | R6775 | 3842 | 3481 | 100 μg | i.m. |
| | F-del_DSCav1_mut3 | | | | | |
| | LNP-formulated | | | | | |
| 9 | mRNA encoding | R6774 | 2366 | 2005 | 100 μg | i.m. |
| | F-del_DSCav1_mut1 | | | | | |
| | LNP-formulated | | | | | |
| 10 | mRNA encoding | R6773 | 3104 | 2743 | 100 μg | i.m. |
| | F-del_DSCav1_mut2 | | | | | |
| | LNP-formulated | | | | | |
| 11 | Live RSV/A2 virus | | | | 10⁵ | i.m. |
| 12 | UV-inact. RSV/A2 | | | | 10⁵ | i.m. |
| 13 | FI RSV | | | | 1:100 | i.m. |
| 14 | Buffer | | | | | i.m. |
| 15 | untreated/uninfected | | | | | i.m. |

[0921] Determination of Anti-RSV F Protein Antibodies by ELISA:

[0922] Blood samples were collected on days 0, 28, 49, and 63 for the determination of anti-RSV F antibody titers. ELISA plates were coated with purified F protein extracted from RSV/A2-infected HEp-2 cells or methanol/Acetone fixed RSV/B infected HEp-2 cells. Coated plates were incubated using given serum dilutions. Binding of specific antibodies to the F protein was detected using isotype specific anti-cotton rat antibodies in combination with streptavidin-HRP (horse radish peroxidase) with TMB substrate.

[0923] Determination of Virus Neutralization Titers:

[0924] Serum was collected on days 0, 28, 49, and 63 and RSV virus neutralization titers (VNTs) were measured using a plaque reduction neutralization test (PRNT). Diluted serum samples were incubated with RSV/A2 or RSV/B (25-50 PFU) for 1 hour at room temperature and inoculated in duplicates onto confluent HEp-2 monolayers in 24 well plates. After one hour incubation at 37° C. in a 5% CO2 incubator, the wells were overlayed with 0.75% Methylcellulose medium. After 4 days of incubation, the overlays were removed and the cells were fixed and stained. The corresponding reciprocal neutralizing antibody titers were determined at the 60% reduction end point of the virus control.

[0925] Cotton Rat Challenge Study:

[0926] The vaccinated animals were challenged intranasally at day 63 with 10⁵ pfu live RSV/A2 virus in 100 uL. One control group remained untreated and uninfected. All animals were sacrificed at day 68 and nasal tissue and lung were harvested.

[0927] RSV Titers in Nasal Tissue of Challenged Cotton Rats

[0928] Lungs and nasal tissue of animals were collected at day 68 (i.e. 5 days after intranasal challenge with 10⁵ pfu live RSV/A2 virus). The nose homogenates were clarified as the lung homogenates by centrifugation and diluted in EMEM. Confluent HEp-2 monolayers were infected in duplicates with diluted homogenates in 24 well plates. After one hour incubation at 37° C. in a 5% CO incubator, the wells were overlayed with 0.75% methylcellulose medium. After 4 days of incubation, the overlays were removed and the cells were fixed and stained with 0.1% crystal violet for one hour and then rinsed and air dried. Plaques were counted and virus titers were expressed as plaque forming units per gram of tissue.

[0929] Pulmonary Histopathology

[0930] Lungs were dissected and inflated with 10% neutral buffered formalin to their normal volume, and then immersed in the same fixative solution. Following fixation, the lungs were embedded in paraffin, sectioned and stained with hematoxylin and eosin (H&E). Four parameters of pulmonary inflammation were evaluated: peribronchiolitis (inflammatory cell infiltration around the bronchioles), perivasculitis (inflammatory cell infiltration around the small blood vessels), interstitial pneumonia (inflammatory cell infiltration and thickening of alveolar walls), and alveolitis (cells within the alveolar spaces). Slides are scored blind on a 0-4 severity scale. The scores are subsequently converted to a 0-100% histopathology scale.

[0931] Results:

[0932] FIG. 11 shows that all tested LNP-formulated mRNA constructs encoding different RSV F proteins (F0, F0_DSCav1, F_DSCav1_mut3, F_DSCav1_mut1, F_DSCav1_mut2, F-del, F-del_DSCav1, F-del_DSCav1_mut3, F-del_DSCav1_mut1, F-del_DSCav1_mut2) according the invention induce humoral immune responses in cotton rats against the RSV-F protein. Antibody total IgG titers were determined by ELISA.

[0933] The mRNA constructs encoding the truncated F (F-del) (F-del, F-del_DSCav1, F-del_DSCav1_mut3, F-del_DSCav1_mut1, F-del_DSCav1_mut2) induced higher and faster responses than the constructs with the full length F sequence on d28, no significant difference is detectable at later time points. Stabilized constructs (F0_DSCav1, F_DSCav1_mut3, F_DSCav1_mut1, F_DSCav1_mut2, F-del_DSCav1, F-del_DSCav1_mut3, F-del_DSCav1_mut1, F-del_DSCav1_mut2) initially yield lower ELISA titers than wildtype constructs (F0 and F-del). Levels are not significantly different at later time points.

[0934] With a dose of 100 μg, the constructs encoding the stabilized and truncated F protein (F-del_DSCav1_mut3, F-del_DSCav1_mut1, F-del_DSCav1_mut2) induce higher titers of RSV-F specific IgGs already after prime vaccination (day 28) compared with the vaccination with the live virus. After boost vaccination all tested LNP-formulated RSV-F mRNA vaccines induces humoral immune responses measured with ELISA which are more prominent then the answers of the control vaccinations.

[0935] As can be seen from FIG. 12, all LNP-formulated RSV-F (F0, F0_DSCav1, F_DSCav1_mut3, F_DSCav1_mut1, F_DSCav1_mut2, F-del, F-del_DSCav1, F-del_DSCav1_mut3, F-del_DSCav1_mut1, F-del_DSCav1_mut2) mRNA vaccines induced the formation of RSV specific functional antibodies in cotton rats as shown by high virus neutralizing antibody titers. The LNP-formulated RSV-F truncated constructs (F-del, F-del_DSCav1, F-del_DSCav1_mut3, F-del_DSCav1_mut1, F-del_DSCav1_mut2) induced higher and faster responses than F full length constructs. The constructs for pre-fusion stabilization according to the invention (F_DSCav1_mut3, F_DSCav1_mut1, F_DSCav1_mut2, F-del_DSCav1_mut3, F-del_DSCav1_mut1, F-del_DSCav1_mut2) induce higher responses than F0, F0_DSCav1, F-del, F-del_DSCav1.

[0936] As can be seen from FIG. 13, the lung histopathology analysis from the RSV cotton rat challenge study reveals different pathology scores for the various animal groups. From the histopathology it can be concluded that none of the mRNA vaccinated groups displayed enhanced lung pathology as it is the case for the group that was vaccinated using the formalin-inactivated RSV vaccine. The average pathology scores for peribronchiolitis are lower for all groups vaccinated with mRNA compared to the group with formalin-inactivated RSV. The LNP-formulated RSV-F truncated constructs (F-del, F-del_DSCav1, F-del_DSCav1_mut3, F-del_DSCav1_mut1, F-del_DSCav1_mut2) showed in general lower pathology scores than F full length constructs. The constructs for pre-fusion stabilization according to the invention (F_DSCav1_mut3, F_DSCav1_mut1, F_DSCav1_mut2, F-del_DSCav1_mut3, F-del_DSCav1_mut1, F-del_DSCav1_mut2) yielded better responses (lower pathology scores) than F0, F0_DSCav1, F-del, F-del_DSCav1.

[0937] As can be seen from FIG. 14a, all in this experiment tested LNP-formulated RSV-F mRNA vaccines reduced lung viral titers in cotton rats challenged with RSV virus and therefore limit RSV infection of the lung. All the animal groups vaccinated with mRNA formulated in LNPs vaccines showed virus titers below the level of detection of the performed virus titration. The results demonstrate protection of vaccinated cotton rats in terms of viral lung titers. By contrast, the formalin-inactivated virus vaccine (FI RSV) and the UV-inactivated RSV/A2 virus control reduced only minimally the lung virus titer compared to the buffer control group.

[0938] As can be seen from FIG. 14b, the LNP-formulated RSV-F mRNA vaccines strongly reduced viral titers in nasal tissue of cotton rats challenged with RSV virus and therefore reduce RSV infection of the nose. In comparison to the mRNA vaccines the vaccine based on formalin-inactivated virus (FI RSV) and the UV-inactivated RSV/A2 virus control were not able to reduce the nasal virus titers. A complete protection of the nose was only achieved by the pre-fusion stabilization according to the invention (F_DSCav1_mut3, F_DSCav1_mut1, F_DSCav1_mut2, F-del_DSCav1_mut3, F-del_DSCav1_mut1, F-del_DSCav1_mut2).

[0939] To conclude, the results show that LNP-formulated RNA constructs encoding RSV-F truncated proteins (F-del, F-del_DSCav1, F-del_DSCav1_mut3, F-del_DSCav1_mut1, F-del_DSCav1_mut2) are in general more immunogenic than RNA constructs encoding for full length F proteins. Constructs featuring Ds-Cav1 mutations alone (F0_DSCav1 and F-del_DSCav1) are suboptimal as an mRNA based vaccine in comparison with the constructs encoding the further stabilized F proteins according the invention (F_DSCav1_mut3, F_DSCav1_mut1, F_DSCav1_mut2, F-del_DSCav1_mut3, F-del_DSCav1_mut1, F-del_DSCav1_mut2).

[0940] To further improve the efficiency of the mRNA-based vaccine, several alternative RSV-F mRNA constructs were designed harboring further mutations stabilizing the pre-fusion conformation in combination with the beneficial truncated F-del protein. Those mRNA constructs were tested as can be seen in the following Example.

### Example 10: Vaccination of Cotton Rats with LNP-Formulated mRNA Encoding RSV-F and RSV Cotton Rat Challenge Study

[0941] The present Example shows that LNP-formulated mRNA according to the invention encoding different pre-fusion stabilized RSV-F antigens induce strong, functional and protective immune responses in cotton rats.

[0942] The mRNA-LNP vaccines were prepared according to Example 1. Cotton rats received either one or two intramuscular vaccinations with mRNA-LNP vaccines on day 0 or on days 0 and 28. Each dose comprised 100 μg mRNA-LNPs. Control animals received a single vaccination at day 28 with 10⁵ pfu live RSV/A2 virus or formalin-inactivated RSV virus (FI RSV) intramuscularly. Additional control animals received buffer only (see Table 18).

TABLE 18
Animal groups and vaccination schedule of Example 10

| | | RNA | SEQ ID NO: | SEQ ID NO: | | | |
|---|---|---|---|---|---|---|---|
| Group | Test item | ID | RNA | Protein | Dose | Immunization | Route |
| 1 | (1) mRNA encoding F-del | R6940 | 890 | 483 | 100 μg | day 0, day 28 | i.m. |
| | LNP-formulated | | | | | | |
| 2 | (2) mRNA encoding | R6773 | 3104 | 2743 | 100 μg | day 0, day 28 | i.m. |
| | F-del_DSCav1_mut2 | | | | | | |
| | LNP-formulated | | | | | | |
| 3 | (3) mRNA encoding | R7455 | 4580 | 4219 | 100 μg | day 0, day 28 | i.m. |
| | F-del_DSCav1_mut0 | | | | | | |
| | LNP-formulated | | | | | | |
| 4 | (4) mRNA encoding | R7457 | 6056 | 5695 | 100 μg | day 0, day 28 | i.m. |
| | F-del_DSCav1_mut5 | | | | | | |
| | LNP-formulated | | | | | | |
| 5 | (5) mRNA encoding | R7459 | 5318 | 4957 | 100 μg | day 0, day 28 | i.m. |
| | F-del_DSCav1_mut4 | | | | | | |
| | LNP-formulated | | | | | | |
| 6 | (1) mRNA encoding F-del | R6940 | 890 | 483 | 100 μg | day 28 | i.m. |
| | LNP-formulated | | | | | | |
| 7 | (2) mRNA encoding | R6773 | 3104 | 2743 | 100 μg | day 28 | i.m. |
| | F-del_DSCav1_mut2 | | | | | | |
| | LNP-formulated | | | | | | |
| 8 | (3) mRNA encoding | R7455 | 4580 | 4219 | 100 μg | day 28 | i.m. |
| | F-del_DSCav1_mut0 | | | | | | |
| | LNP-formulated | | | | | | |
| 9 | (4) mRNA encoding | R7457 | 6056 | 5695 | 100 μg | day 28 | i.m. |
| | F-del_DSCav1_mut5 | | | | | | |
| | LNP-formulated | | | | | | |
| 10 | (5) mRNA encoding | R7459 | 5318 | 4957 | 100 μg | day 28 | i.m. |
| | F-del_DSCav1_mut4 | | | | | | |
| | LNP-formulated | | | | | | |
| 11 | Live RSV/A2 virus | | | | 10⁵ | day 28 | i.m. |
| 12 | FI RSV | | | | 1:100 | day 28 | i.m. |
| 13 | Buffer | | | | | day 0, day 28 | i.m. |
| 14 | untreated/uninfected | | | | | | i.m. |

[0943] Determination of Anti-RSV F Protein Antibodies by ELISA and Virus Neutralization Titers

[0944] Blood samples were collected on days 0, 28, 49, and 63 for the determination of anti-RSV F antibody titers and RSV virus neutralization titers (VNTs) measured using the plaque reduction neutralization test (PRNT) as described before (see Example 9).

[0945] Cotton Rat Challenge Study:

[0946] The vaccinated animals were challenged intranasally at day 63 with 10⁵ pfu live RSV/A2 virus in 100 uL. One control group remained untreated and uninfected. All animals were sacrificed at day 68 and nasal tissue and lung were harvested. The RSV titers in nasal tissue of challenged cotton rats and the pulmonary histopathology are analyzed as described before (see Example 9).

[0947] Results:

[0948] FIG. 15 shows that all tested LNP-formulated mRNA constructs encoding different RSV F proteins (F-del, F-del_DSCav1_mut2, F-del_DSCav1_mut0, F-del_DSCav1_mut5, F-del_DSCav1_mut4) according the invention induce humoral immune responses in cotton rats against the RSV-F protein. Antibody total IgG titers were determined by ELISA. RNA constructs encoding stabilized F proteins (F-del_DSCav1_mut2, F-del_DSCav1_mut0, F-del_DSCav1_mut5, F-del_DSCav1_mut4) initially yield lower ELISA titers than the construct encoding the truncated wildtype F protein, F-del. This trend is also detectable at later time points by using higher serum dilutions for the ELISA (data not shown). The IgG response can be significantly boosted by a second immunization.

[0949] As can be seen from FIG. 16, all LNP-formulated RSV-F (F-del, F-del_DSCav1_mut2, F-del_DSCav1_mut0, F-del_DSCav1_mut5, F-del_DSCav1_mut4) mRNA vaccines induced the formation of RSV specific functional antibodies in cotton rats as shown by high virus neutralizing antibody titers. The LNP-formulated constructs for pre-fusion stabilization according to the invention (F-del_DSCav1_mut2, F-del_DSCav1_mut0, F-del_DSCav1_mut5, F-del_DSCav1_mut4) induce higher or comparable responses than F-del. The RNA construct R7457 coding for the pre-fusion stabilized protein F-del_DSCav1_mut5 induces the highest VNTs (comparable to the best results induced by best pre-fusion stabilized construct in the previous experiment (Example 9, R6773).

[0950] The lung histopathology analysis shows that none of the mRNA vaccinated groups displayed enhanced lung pathology as it is the case for the group that was vaccinated using the formalin-inactivated RSV vaccine (see FIG. 17a (for Peribronciolitis and Perivasculitis) and FIG. 17b (for Interstitial Pneumonia and Alveolitis)). The constructs for pre-fusion stabilization according to the invention (F-del_DSCav1_mut2, F-del_DSCav1_mut0, F-del_DSCav1_mut5, F-del_DSCav1_mut4) yielded better responses (lower pathology scores) than F-del. Animals received two vaccinations showed a lower pathology score in comparison to animals only received one vaccination.

[0951] As can be seen from FIG. 18a, all in this experiment tested LNP-formulated RSV-F mRNA vaccines reduced lung viral titers in cotton rats challenged with RSV virus and therefore limit RSV infection of the lung. This is true even for groups receiving only one vaccination. The results demonstrate protection of vaccinated cotton rats in terms of viral lung titers. By contrast, the formalin-inactivated virus vaccine (FI RSV) reduced only minimally the lung virus titer compared to the buffer control group.

[0952] As can be seen from FIG. 18b, the LNP-formulated RSV-F mRNA vaccines strongly reduced viral titers in nasal tissue of cotton rats challenged with RSV virus and therefore reduce RSV infection of the nose. In comparison to the mRNA vaccines the vaccine based on formalin-inactivated virus (FI RSV) was not able to reduce the nasal virus titers. A complete protection of the nose was only achieved for some groups received two vaccinations (e.g. for R7457 (F-del_DSCav_mut4) and R7459 (F-del_DSCav_mut5)).

[0953] To conclude, the results show that LNP-formulated RNA constructs encoding pre-fusion stabilized RSV-F truncated proteins (F-del_DSCav1_mut2, F-del_DSCav1_mut0, F-del_DSCav1_mut5, F-del_DSCav1_mut4) raised in general higher functional titers and achieved a more pronounced protection against infection in comparison with the RNA construct coding for the wildtype truncated F protein F_del. The best results were reached by RNA constructs encoding F-del_DSCav1_mut2 or F-del_DSCav1_mut5 (R6773, R7457).

### Example 11: Expression of Different RSV T-Cell Antigens Using a Rabbit Reticulocyte Lysate System

[0954] To determine in vitro protein expression of the mRNA constructs according to the second aspect of the invention (mRNA constructs coding for RSV matrix protein M, phosphoprotein P, nucleoprotein N and matrix protein M2-1 protein), unformulated RNAs (prepared according to Example 1) were mixed with components of Promega Rabbit Reticulocyte Lysate System according to manufacture protocol. The lysate contains the cellular components necessary for protein synthesis (tRNA, ribosomes, amino acids, initiation, elongation and termination factors). As positive control Luciferase RNA from Lysate System Kit was used. The translation result was analyzed by SDS-Page and Western Blot analysis (IRDye 800CW streptavidin antibody (1:2000)). Table 19 summarizes the tested RNA constructs.

TABLE 19
Overview of mRNA constructs used in Example 11

| RNA | | | SEQ ID NO: | SEQ ID NO: | Predicted |
|---|---|---|---|---|---|
| ID | Antigen | UTR Design | RNA | Protein | kDa |
| R7595 | M | —/muag; i-3 | 10046 | 9684 | |
| R7596 | P | —/muag; i-3 | 10999 | 10637 | 27.1 |
| R7597 | N | —/muag; i-3 | 10496 | 10134 | 43.4 |
| R7598 | M2-1 | —/muag; i-3 | 11545 | 11183 | 22.1 |
| | Luc | | | | 61 |

[0955] Results:

[0956] The results (see FIG. 19) show that the used mRNA constructs led to a detectable protein expression, which is a prerequisite for an mRNA-based RSV vaccine (size shifts of RSV P and M2-1 on the gel may be due to phosphorylation as described e.g. in Richard et al., 2018 or in Hardy and Wertz, 2000 PMIDs: 29489893 and 10846068).

### Example 12: Vaccination of Mice with LNP-Formulated mRNA Encoding Different RSV T-Cell Antigens Alone and in the Combination with RSV F (F-Del)

[0957] The present Example analyses LNP-formulated mRNA encoding different RSV T-cell antigens according to the second aspect of the invention (RSV M, P, N, and M2-1) alone or in combination with LNP formulated mRNA encoding the truncated RSV F (F-del). The mRNA-LNP vaccines were prepared according to Example 1. Balb/c mice received two intramuscular vaccinations with mRNA-LNP vaccines on days 0 and 28. Each dose comprised 5 μg, 2.5 μg or 2.5 μg+2.5 μg mRNA-LNPs (for groups receiving mRNAs encoding different antigens the LNPs were separately formulated and mixed before administration). Control animals received buffer only (see Table 20).). Humoral, as well as cellular immune responses and neutralizing antibodies were analyzed by ELISA, FACS, PRNT and ICS.

TABLE 20
Animal groups and vaccination schedule of Example 12

| | | RNA | SEQ ID NO: | SEQ ID NO: | | | |
|---|---|---|---|---|---|---|---|
| Group | Test item | ID | RNA | Protein | Dose | | Route |
| 1 | NaCl buffer | — | — | — | | | i.m. |
| 2 | M: mRNA encoding RSV M | R7595 | 10046 | 9684 | 5 | μg | i.m. |
| | LNP-formulated | | | | | | |
| 3 | P: mRNA encoding RSV P | R7596 | 10999 | 10637 | 5 | μg | i.m. |
| | LNP-formulated | | | | | | |
| 4 | N: mRNA encoding RSV N | R7597 | 10496 | 10134 | 5 | μg | i.m. |
| | LNP-formulated | | | | | | |
| 5 | M2-1: mRNA encoding M2-1 | R7598 | 11545 | 11183 | 5 | μg | i.m. |
| | LNP-formulated | | | | | | |
| 6 | F: mRNA encoding F-del | R6940 | 890 | 483 | 2.5 | μg | i.m. |
| | LNP-formulated | | | | | | |

| | | | | | | |
|---|---|---|---|---|---|---|
| 7 | F + M: mRNA encoding F-del + | R7595 + | 890 + | 483 + | 2.5 μg + | i.m. |
| | mRNA encoding RSV M | R6940 | 10046 | 9684 | 2.5 μg | |
| | LNP-formulated | | | | | |
| 8 | F + P: mRNA encoding F-del + | R7596 + | 890 + | 483 + | 2.5 μg + | i.m. |
| | mRNA encoding RSV P | R6940 | 10999 | 10637 | 2.5 μg | |
| | LNP-formulated | | | | | |
| 9 | F + N: mRNA encoding F-del + | R7597 + | 890 + | 483 + | 2.5 μg + | i.m. |
| | mRNA encoding RSV N | R6940 | 10496 | 10134 | 2.5 μg | |
| | LNP-formulated | | | | | |
| 10 | F + M2-1: mRNA encoding F-del + | R7598 + | 890 + | 483 + | 2.5 μg + | i.m. |
| | mRNA encoding RSV M2-1 | R6940 | 11545 | 11183 | 2.5 μg | |
| | LNP-formulated | | | | | |

[0958] Determination of Anti-RSV F Protein Antibodies by ELISA:

[0959] Blood samples were collected on days 0, 14, 28, and 49 for the determination of anti-RSV F antibody titers. ELISA plates were coated with recombinant human RSV fusion glycoprotein (hRSV F Protein (A2; His-tag; Sino Biological; Cat: 11049-V08B)). Coated plates were incubated using given serum dilutions. Binding of specific antibodies to the F protein was detected using isotype specific anti-mouse rat antibodies in combination with streptavidin-HRP (horse radish peroxidase) and the Amplex® UltraRed Reagent (Invitrogen (Ref. No. A36006).

[0960] Detection of Antigen-Specific Humoral Antibody Responses Measured by FAGS

[0961] Hela cells were transfected with 2 μg RSV mRNA constructs (R7595, R7596, R7597, R7598) using lipofectamine. The cells were harvested 20 h post transfection, and seeded at 1×10⁵ per well into a 96 well plate. The cells were incubated with corresponding sera of vaccinated mice (serum of day 28 and 49, diluted 1:50) followed by a FITC-conjugated anti-mouse IgG antibody staining. Cells were acquired on BD FACS Canto II using DIVA software and analyzed by FlowJo. The results are shown in FIG. 21a (day 28) and FIG. 21b (day 49). As read out the percentage of FITC-positive cells (out of live cells) was used.

[0962] Determination of Virus Neutralization Titers:

[0963] Serum was collected on day 49 and RSV virus neutralization titers (VNTs) were measured using a plaque reduction neutralization test (PRNT). Diluted serum samples were incubated with RSV/A2 (25-50 PFU) for 1 hour at room temperature and inoculated in duplicates onto confluent HEp-2 monolayers in 24 well plates. After one hour incubation at 37° C. in a 5% CO2 incubator, the wells were overlayed with 0.75% Methylcellulose medium. After 4 days of incubation, the overlays were removed and the cells were fixed and stained. The corresponding reciprocal neutralizing antibody titers were determined at the 60% reduction end-point of the virus control.

[0964] Determination of Cellular Immune Responses in Mice by ICS Using FACS

[0965] Splenocytes and lung cells from vaccinated and control mice were isolated according to standard protocols. Briefly, isolated spleens were grinded through a cell strainer and washed in PBS (1% FCS). After centrifugation, the cell pellet was resuspended with the remaining supernatant, treated with red cell lysis buffer and washed repeatedly with PBS (1% FCS). Finally, splenocytes were resuspended in FCS/10% DMSO, transferred into a cryovial and stored at −80° C. Lungs were perfused using RPMI-1640 medium (10% FCS; 2 mM glutamine; 1% Pen/Strep), harvested, and then stored in RPMI-1640 medium (10% FCS; 2 mM glutamine; 1% Pen/Strep) at 4° C. until lung cells were isolated using the Lung Dissociation Kit mouse from Miltenyi Biotec according to the manufacturer's instructions. For ICS, 2×10⁶ cells (splenocytes or lung cells) were seed in duplicates in round-bottom plates and stimulated with RSV M2-1-specific (VYNTVISYI, SYIGSINNI, SYIESNRKN, KSIDTLSEI), RSV F-specific (FYQSTCSAV, TYMLTNSEL, KYKNAVTEL, KIMTSKTDV), RSF M-specific (KHTATRFAI, AQMPSKFTI, KYIKPQSQF, TYLRSISVR), RSV P-specific (SPITSNSTI, SYEEINDQT), or RSV N-specific (SYKKMLKEM, FYHILNNPK, KYTIQRSTG, GYHVKANGV) peptides. After Golgi block (GolgiPlug 1/1000) and incubation for intracellular cytokine accumulation, cells were subjected to live/dead staining using Aqua-dye. Then, cells were surface stained using the antibodies α-CD8-APC-H7 (1/100), α-CD4-BD-Horizon V450 (1/200), α-Thy1.2-FITC (1/300), and α-CD107a PE-Cy7 (1/100) for splenocytes and α-CD8-APC-H7 (1/100), α-CD4-BD-Horizon V450 (1/200), α-Thy1.2-FITC (1/300), α-CD69-PE (1/100), and α-CD103-PE-Cy7 (1/60) for lung cells. After treatment with Cytofix/Cytoperm, lung cells were intracellularly stained with α-IFNg-APC (1/100) and splenocytes additionally with α-TNFα-PE (1/100). Finally, cells were acquired on BD FACS Canto II using DIVA software and analyzed by FlowJo.

[0966] Results:

[0967] The results of the immunogenicity study in mice, e.g. the humoral immune responses can be seen in FIG. 20 (FIG. 20a: anti-RSV F IgG, FIG. 20b: anti-RSV F IgG2a). In general, all groups induced humoral immune responses without significant differences between F-del alone and the F-del+ T-cell antigen groups. The addition of the T-cell antigens M, P, N, and M2-1 to the mRNA vaccine encoding RSV F-del did not influence or disturb the immune response against RSV F. These findings indicate that the co-expression of T cell antigens does not affect antibody responses induced by RSV F. The immune responses could be boosted by the second immunization (see responses on day 49). In general, the IgG2a titers are 10 times higher than the IgG1 titers, indicating a predominant Th1 response. A Th1-biased immune response is considered to be an important prerequisite for a potential RSV vaccine, as Th2-biased responses have been associated with enhanced respiratory disease (ERD) in animal models.

[0968] As shown in FIG. 21a and FIG. 21b specific antigen IgGs were detected in sera of immunized mice indicating that the applied mRNA constructs are suitable to induce specific humoral immune responses. Furthermore, the results reveal that the induction of antigen-specific antibody responses for N and M2-1 can already be detected at day 28, while for M and P immunization a boost vaccination is necessary. The decreased antigen-specific antibody responses after RSV F co-immunization are likely due to different immunization doses (5 μg vs, 2.5 μg).

[0969] As can be seen from FIG. 22, all LNP-formulated mRNA vaccines (F, M+F, P+F, N+F, M2-1+F) induced the formation of RSV specific functional antibodies in mice as shown by high virus neutralizing antibody titers. The serum neutralizing antibody titer assays against RSV/A2 revealed no significant differences between the immunization groups.

[0970] As can be seen from FIG. 23 (FIG. 23a lung ICS CD8, FIG. 23b, spleen ICS CD8, FIG. 23c spleen ICS CD4), all vaccines containing RSV F, RSV M2-1, or both surprisingly induced a tissue resident memory T cell (T_{RM}) response in the lung upon intramuscular immunization, as an increase of CD8⁺ T_{RM} cells specific for F or especially for M2-1 could be observed. The induction of a T_{RM} cell response in the lung might be favorable for a potential RSV vaccine, since lung T_{RM} cells (CD69⁺ and CD103⁺) are proposed to protect against RSV infection. The splenocyte analysis revealed that an immunization with RSV F and especially RSV M2-1 lead to an increase of antigen-specific CD8⁺ and CD4⁺ T cells secreting IFNγ and TNF indicating the induction of a systemic T cell response in addition to a site-specific response.

[0971] To conclude, the results show that RSV M2-1 induces the most promising T cell immune responses without affecting antibody responses induced by RSV F. Thus, a vaccine containing mRNAs encoding for RSV F in combination with RSV M2-1 might increase the protective efficacy against RSV infection.

### Example 13: Clinical Development of a RSV mRNA Vaccine Composition

[0972] To demonstrate safety and efficiency of the RSV mRNA vaccine composition, a clinical trial (phase 1) is initiated. For clinical development, RNA is used that has been produced under GMP conditions (e.g. using a procedure as described in WO2016/180430).

[0973] In the clinical trial, a cohort of healthy human volunteers is intramuscularly injected with respective LNP formulated vaccine compositions comprising favorable UTR combinations.

[0974] In order to assess the safety profile of the vaccine compositions according to the invention, subjects are monitored after administration (vital signals, vaccination site tolerability assessments, hematologic analysis).

[0975] The efficacy of the immunization is analyzed by determination of virus neutralizing titers (VNT) in sera from vaccinated subjects. Blood samples are collected on day 0 as baseline and after completed vaccination. Sera are analyzed for virus neutralizing antibodies.

1. An artificial RNA comprising
a) at least one heterologous 5′ untranslated region (5′-UTR) and/or at least one heterologous 3′ untranslated region (3′-UTR); and
b) at least one coding sequence operably linked to said 3′-UTR and/or 5′-UTR encoding at least one antigenic peptide or protein derived from a RSV fusion (F) protein or a fragment or variant thereof.

2. Artificial RNA according to claim 1, wherein the at least one heterologous 3′-UTR comprises a nucleic acid sequence derived from a 3′-UTR of a gene selected from PSMB3, ALB7, alpha-globin, CASP1, COX6B1, GNAS, NDUFA1 and RPS9, or from a homolog, a fragment or a variant of any one of these genes.

3. Artificial RNA according to claim 1 or 2, wherein the at least one heterologous 5′-UTR comprises a nucleic acid sequence derived from a 5′-UTR of a gene selected from HSD17B4, RPL32, ASAH1, ATP5A1, MP68, NDUFA4, NOSIP, RPL31, SLC7A3, TUBB4B and UBQLN2, or from a homolog, a fragment or variant of any one of these genes.

4. Artificial RNA according to any one of the preceding claims, comprising
a-1. at least one 5′-UTR derived from a 5′-UTR of a HSD174 gene, or from a corresponding RNA sequence, homolog, fragment or variant thereof and at least one 3′-UTR derived from a 3′-UTR of a PSMB3 gene, or from a corresponding RNA sequence, homolog, fragment or variant thereof; or
a-2. at least one 5′-UTR derived from a 5′-UTR of a NDUFA4 gene, or from a corresponding RNA sequence, homolog, fragment or variant thereof and at least one 3′-UTR derived from a 3′-UTR of a PSMB3 gene, or from a corresponding RNA sequence, homolog, fragment or variant thereof; or
a-3. at least one 5′-UTR derived from a 5′-UTR of a SLC7A3 gene, or from a corresponding RNA sequence, homolog, fragment or variant thereof and at least one 3′-UTR derived from a 3′-UTR of a PSMB3 gene, or from a corresponding RNA sequence, homolog, fragment or variant thereof; or
a-4. at least one 5′-UTR from a 5′-UTR of a NOSIP gene, or from a corresponding RNA sequence, homolog, fragment or variant thereof and at least one 3′-UTR derived from a 3′-UTR of a PSMB3 gene, or from a corresponding RNA sequence, homolog, fragment or variant thereof; or
a-5. at least one 5′-UTR derived from a 5′-UTR of a MP68 gene, or from a corresponding RNA sequence, homolog, fragment or variant thereof and at least one 3′-UTR derived from a 3′-UTR of a PSMB3 gene, or from a corresponding RNA sequence, homolog, fragment or variant thereof; or
b-1. at least one 5′-UTR derived from a 5′-UTR of a UBQLN2 gene, or from a corresponding RNA sequence, homolog, fragment or variant thereof and at least one 3′-UTR derived from a 3′-UTR of a RPS9 gene, or from a corresponding RNA sequence, homolog, fragment or variant thereof; or
b-2. at least one 5′-UTR derived from a 5′-UTR of a ASAH1 gene, or from a corresponding RNA sequence, homolog, fragment or variant thereof and at least one 3′-UTR derived from a 3′-UTR of a RPS9 gene, or from a corresponding RNA sequence, homolog, fragment or variant thereof; or
b-3. at least one 5′-UTR derived from a 5′-UTR of a HSD17B4 gene, or from a corresponding RNA sequence, homolog, fragment or variant thereof and at least one 3′-UTR derived from a 3′-UTR of a RPS9 gene, or from a corresponding RNA sequence, homolog, fragment or variant thereof; or
b-4. at least one 5′-UTR derived from a 5′-UTR of a HSD17B4 gene, or from a corresponding RNA sequence, homolog, fragment or variant thereof and at least one 3′-UTR derived from a 3-UTR of a CASP1 gene, or from a corresponding RNA sequence, homolog, fragment or variant thereof; or
b-5. at least one 5′-UTR derived from a 5′-UTR of a NOSIP gene, or from a corresponding RNA sequence, homolog, fragment or variant thereof and at least one 3T-UTR derived from a 3′-UTR of a COX6B1 gene, or from a corresponding RNA sequence, homolog, fragment or variant thereof; or
c-1. at least one 5′-UTR derived from a 5′-UTR of a NDUFA4 gene, or from a corresponding RNA sequence, homolog, fragment or variant thereof and at least one 3′-UTR derived from a 3′-UTR of a RPS9 gene, or from a corresponding RNA sequence, homolog, fragment or variant thereof; or
c-2. at least one 5′-UTR derived from a 5′-UTR of a NOSIP gene, or from a corresponding RNA sequence, homolog, fragment or variant thereof and at least one 3′-UTR derived from a 3′-UTR of a NDUFA1 gene, or from a corresponding RNA sequence, homolog, fragment or variant thereof; or
c-3. at least one 5′-UTR derived from a 5′-UTR of a NDUFA4 gene, or from a corresponding RNA sequence, homolog, fragment or variant thereof and at least one 3′-UTR derived from a 3′-UTR of a COX6B1 gene, or from a corresponding RNA sequence, homolog, fragment or variant thereof; or
c-4. at least one 5′-UTR derived from a 5′-UTR of a NDUFA4 gene, or from a corresponding RNA sequence, homolog, fragment or variant thereof and at least one 3′-UTR derived from a 3′-UTR of a NDUFA1 gene, or from a corresponding RNA sequence, homolog, fragment or variant thereof; or
c-5. at least one 5′-UTR derived from a 5′-UTR of a ATP5A1 gene, or from a corresponding RNA sequence, homolog, fragment or variant thereof and at least one 3′-UTR derived from a 3′-UTR of a PSMB3 gene, or from a corresponding RNA sequence, homolog, fragment or variant thereof; or
d-1. at least one 5′-UTR derived from a 5′-UTR of a RPL31 gene, or from a corresponding RNA sequence, homolog, fragment or variant thereof and at least one 3′-UTR derived from a 3′-UTR of a PSMB3 gene, or from a corresponding RNA sequence, homolog, fragment or variant thereof; or
d-2. at least one 5′-UTR derived from a 5′-UTR of a ATP5A1 gene, or from a corresponding RNA sequence, homolog, fragment or variant thereof and at least one 3′-UTR derived from a 3′-UTR of a CASP1 gene, or from a corresponding RNA sequence, homolog, fragment or variant thereof; or
d-3. at least one 5′-UTR derived from a 5′-UTR of a SLC7A3 gene, or from a corresponding RNA sequence, homolog, fragment or variant thereof and at least one 3′-UTR derived from a 3′-UTR of a GNAS gene, or from a corresponding RNA sequence, homolog, fragment or variant thereof; or
d-4. at least one 5′-UTR derived from a 5′-UTR of a HSD17B4 gene, or from a corresponding RNA sequence, homolog, fragment or variant thereof and at least one 3′-UTR derived from a 3′-UTR of a NDUFA1 gene, or from a corresponding RNA sequence, homolog, fragment or variant thereof; or
d-5. at least one 5′-UTR derived from a 5′-UTR of a SLC7A3 gene, or from a corresponding RNA sequence, homolog, fragment or variant thereof and at least one 3′-UTR derived from a 3′-UTR of a NDUFA1 gene, or from a corresponding RNA sequence, homolog, fragment or variant thereof; or
e-1. at least one 5′-UTR derived from a 5′-UTR of a TUBB4B gene, or from a corresponding RNA sequence, homolog, fragment or variant thereof and at least one 3′-UTR derived from a 3′-UTR of a RPS9 gene, or from a corresponding RNA sequence, homolog, fragment or variant thereof; or
e-2. at least one 5′-UTR derived from a 5′-UTR of a RPL31 gene, or from a corresponding RNA sequence, homolog, fragment or variant thereof and at least one 3′-UTR derived from a 3′-UTR of a RPS9 gene, or from a corresponding RNA sequence, homolog, fragment or variant thereof; or
e-3. at least one 5′-UTR derived from a 5′-UTR of a MP68 gene, or from a corresponding RNA sequence, homolog, fragment or variant thereof and at least one 3′-UTR derived from a 3′-UTR of a RPS9 gene, or from a corresponding RNA sequence, homolog, fragment or variant thereof; or
e-4. at least one 5′-UTR derived from a 5′-UTR of a NOSIP gene, or from a corresponding RNA sequence, homolog, fragment or variant thereof and at least one 3′-UTR derived from a 3′-UTR of a RPS9 gene, or from a corresponding RNA sequence, homolog, fragment or variant thereof; or
e-5. at least one 5′-UTR derived from a 5′-UTR of a ATP5A1 gene, or from a corresponding RNA sequence, homolog, fragment or variant thereof and at least one 3′-UTR derived from a 3′-UTR of a RPS9 gene, or from a corresponding RNA sequence, homolog, fragment or variant thereof; or
e-6. at least one 5′-UTR derived from a 5′-UTR of a ATP5A1 gene, or from a corresponding RNA sequence, homolog, fragment or variant thereof and at least one 3′-UTR derived from a 3′-UTR of a COX6B1 gene, or from a corresponding RNA sequence, homolog, fragment or variant thereof; or
f-1. at least one 5′-UTR derived from a 5′-UTR of a ATP5A1 gene, or from a corresponding RNA sequence, homolog, fragment or variant thereof and at least one 3′-UTR derived from a 3′-UTR of a GNAS gene, or from a corresponding RNA sequence, homolog, fragment or variant thereof; or
f-2. at least one 5′-UTR derived from a 5′-UTR of a ATP5A1 gene, or from a corresponding RNA sequence, homolog, fragment or variant thereof and at least one 3′-UTR derived from a 3′-UTR of a NDUFA1 gene, or from a corresponding RNA sequence, homolog, fragment or variant thereof; or
f-3. at least one 5′-UTR derived from a 5′-UTR of a HSD17B4 gene, or from a corresponding RNA sequence, homolog, fragment or variant thereof and at least one 3′-UTR derived from a 3-UTR of a COX6B1 gene, or from a corresponding RNA sequence, homolog, fragment or variant thereof; or
f-4. at least one 5′-UTR derived from a 5′-UTR of a HSD17B4 gene, or from a corresponding RNA sequence, homolog, fragment or variant thereof and at least one 3-UTR derived from a 3′-UTR of a GNAS gene, or from a corresponding RNA sequence, homolog, fragment or variant thereof; or
f-5. at least one 5′-UTR derived from a 5′-UTR of a MP68 gene, or from a corresponding RNA sequence, homolog, fragment or variant thereof and at least one 3′-UTR derived from a 3′-UTR of a COX6B1 ene, or from a corresponding RNA sequence, homolog, fragment or variant thereof; or
g-1. at least one 5′-UTR derived from a 5′-UTR of a MP68 gene, or from a corresponding RNA sequence, homolog, fragment or variant thereof and at least one 3-UTR derived from a 3′-UTR of a NDUFA1 gene, or from a corresponding RNA sequence, homolog, fragment or variant thereof; or
g-2. at least one 5′-UTR derived from a 5′-UTR of a NDUFA4 gene, or from a corresponding RNA sequence, homolog, fragment or variant thereof and at least one 3′-UTR derived from a 3′-UTR of a CASP1 gene, or from a corresponding RNA sequence, homolog, fragment or variant thereof; or
g-3. at least one 5′-UTR derived from a 5′-UTR of a NDUFA4 gene, or from a corresponding RNA sequence, homolog, fragment or variant thereof and at least one 3′-UTR derived from a 3′-UTR of a GNAS gene, or from a corresponding RNA sequence, homolog, fragment or variant thereof; or
g-4. at least one 5′-UTR derived from a 5′-UTR of a NOSIP gene, or from a corresponding RNA sequence, homolog, fragment or variant thereof and at least one 3′-UTR derived from a 3′-UTR of a CASP1 gene, or from a corresponding RNA sequence, homolog, fragment or variant thereof; or
g-5. at least one 5′-UTR derived from a 5′-UTR of a RPL31 gene, or from a corresponding RNA sequence, homolog, fragment or variant thereof and at least one 3′-UTR derived from a 3′-UTR of a CASP1 gene, or from a corresponding RNA sequence, homolog, fragment or variant thereof; or
h-1. at least one 5′-UTR derived from a 5′-UTR of a RPL31 gene, or from a corresponding RNA sequence, homolog, fragment or variant thereof and at least one 3′-UTR derived from a 3′-UTR of a COX6B1 gene, or from a corresponding RNA sequence, homolog, fragment or variant thereof; or
h-2. at least one 5′-UTR derived from a 5′-UTR of a RPL31 gene, or from a corresponding RNA sequence, homolog, fragment or variant thereof and at least one 3′-UTR derived from a 3′-UTR of a GNAS gene, or from a corresponding RNA sequence, homolog, fragment or variant thereof; or
h-3. at least one 5′-UTR derived from a 5′-UTR of a RPL31 gene, or from a corresponding RNA sequence, homolog, fragment or variant thereof and at least one 3′-UTR derived from a 3′-UTR of a NDUFA1 gene, or from a corresponding RNA sequence, homolog, fragment or variant thereof; or
h-4. at least one 5′-UTR derived from a 5′-UTR of a SLC7A3 gene, or from a corresponding RNA sequence, homolog, fragment or variant thereof and at least one 3′-UTR derived from a 3′-UTR of a CASP1 gene, or from a corresponding RNA sequence, homolog, fragment or variant thereof; or
h-5. at least one 5′-UTR derived from a 5′-UTR of a SLC7A3 gene, or from a corresponding RNA sequence, homolog, fragment or variant thereof and at least one 3′-UTR derived from a 3′-UTR of a COX6B1 gene, or from a corresponding RNA sequence, homolog, fragment or variant thereof; or
i-1. at least one 5′-UTR derived from a 5′-UTR of a SLC7A3 gene, or from a corresponding RNA sequence, homolog, fragment or variant thereof and at least one 3′-UTR derived from a 3′-UTR of a RPS9 gene, or from a corresponding RNA sequence, homolog, fragment or variant thereof.
i-2, at least one 5′-UTR derived from a 5′-UTR of a RPL32 gene, or from a corresponding RNA sequence, homolog, fragment or variant thereof and at least one 3′-UTR derived from a 3′-UTR of a ALB7 gene, or from a corresponding RNA sequence, homolog, fragment or variant thereof.
i-3. at least one 3′-UTR derived from a 3′-UTR of a alpha-globin gene gene, or from a corresponding RNA sequence, homolog, fragment or variant thereof.

5. Artificial RNA according to claim 4 comprising UTR elements according to a-1 (HSD17B4/PSMB3), a-4 (NDUFA4/PSMB3), c-1 (NDUFA4/RPS9), e-4 (NOSIP/RPS9), g-2 (NDUFA4/CASP1), i-2 (RPL32/ALB7), or i-3 (alpha-globin), preferably a-1 (HSD17B4/PSMB3)

6. Artificial RNA according to any one of the preceding claims, wherein
said 5′-UTR derived from a HSD17B4 gene comprises or consists of a nucleic acid sequence being identical or at least 70%, 80%, 85%, 86%, 87%, 88%, 89%, 90%, 91%, 92%, 93%, 94%, 95%, 96%, 97%, 98%, or 99% identical to SEQ ID NO: 1 or 2 or a fragment or a variant thereof;
said 5′-UTR derived from a ASAH1 gene comprises or consists of a nucleic acid sequence being identical or at least 70%, 80%, 85%, 86%, 87%, 88%, 89%, 90%, 91%, 92%, 93%, 94%, 95%, 96%, 97%, 98%, or 99% identical to SEQ ID NO: 3 or 4 or a fragment or a variant thereof;
said 5′-UTR derived from a ATP5A1 gene comprises or consists of a nucleic acid sequence being identical or at least 70%, 80%, 85%, 86%, 87%, 88%, 89%, 90%, 91%, 92%, 93%, 94%, 95%, 96%, 97%, 98%, or 99% identical to SEQ ID NO: 5 or 6 or a fragment or a variant thereof;
said 5′-UTR derived from a MP68 gene comprises or consists of a nucleic acid sequence being identical or at least 70%, 80%, 85%, 86%, 87%, 88%, 89%, 90%, 91%, 92%, 93%, 94%, 95%, 96%, 97%, 98%, or 99% identical to SEQ ID NO: 7 or 8 or a fragment or a variant thereof;
said 5′-UTR derived from a NDUFA4 gene comprises or consists of a nucleic acid sequence being identical or at least 70%, 80%, 85%, 86%, 87%, 88%, 89%, 90%, 91%, 92%, 93%, 94%, 95%, 96%, 97%, 98%, or 99% identical to SEQ ID NO: 9 or 10 or a fragment or a variant thereof;
said 5′-UTR derived from a NOSIP gene comprises or consists of a nucleic acid sequence being identical or at least 70%, 80%, 85%, 86%, 87%, 88%, 89%, 90%, 91%, 92%, 93%, 94%, 95%, 96%, 97%, 98%, or 99% identical to SEQ ID NO: 11 or 12 or a fragment or a variant thereof;
said 5′-UTR derived from a RPL31 gene comprises or consists of a nucleic acid sequence being identical or at least 70%, 80%, 85%, 86%, 87%, 88%, 89%, 90%, 91%, 92%, 93%, 94%, 95%, 96%, 97%, 98%, or 99% identical to SEQ ID NO: 13 or 14 or a fragment or a variant thereof;
said 5′-UTR derived from a RPL32 gene comprises or consists of a nucleic acid sequence being identical or at least 70%, 80%, 85%, 86%, 87%, 88%, 89%, 90%, 91%, 92%, 93%, 94%, 95%, 96%, 97%, 98%, or 99% identical to SEQ ID NO: 21 or 22 or a fragment or a variant thereof;
said 5′-UTR derived from a SLC7A3 gene comprises or consists of a nucleic acid sequence being identical or at least 70%, 80%, 85%, 86%, 87%, 88%, 89%, 90%, 91%, 92%, 93%, 94%, 95%, 96%, 97%, 98%, or 99% identical to SEQ ID NO: 15 or 16 or a fragment or a variant thereof;
said 5′-UTR derived from a TUBB48 gene comprises or consists of a nucleic acid sequence being identical or at least 70%, 80%, 85%, 86%, 87%, 88%, 89%, 90%, 91%, 92%, 93%, 94%, 95%, 96%, 97%, 98%, or 99% identical to SEQ ID NO: 17 or 18 or a fragment or a variant thereof;
said 5′-UTR derived from a UBQLN2 gene comprises or consists of a nucleic acid sequence being identical or at least 70%, 80%, 85%, 86%, 87%, 88%, 89%, 90%, 91%, 92%, 93%, 94%, 95%, 96%, 97%, 98%, or 99% identical to SEQ ID NO: 19 or 20 or a fragment or a variant thereof;
said 3′-UTR derived from a PSMB3 gene comprises or consists of a nucleic acid sequence being identical or at least 70%, 80%, 85%, 86%, 87%, 88%, 89%, 90%, 91%, 92%, 93%, 94%, 95%, 96%, 97%, 98%, or 99% identical to SEQ ID NO: 23 or 24 or a fragment or a variant thereof;
said 3′-UTR derived from a CASP1 gene comprises or consists of a nucleic acid sequence being identical or at least 70%, 80%, 85%, 86%, 87%, 88%, 89%, 90%, 91%, 92%, 93%, 94%, 95%, 96%, 97%, 98%, or 99% identical to SEQ ID NO: 25 or 26 or a fragment or a variant thereof;
said 3′-UTR derived from a COX6B1 gene comprises or consists of a nucleic acid sequence being identical or at least 70%, 80%, 85%, 86%, 87%, 88%, 89%, 90%, 91%, 92%, 93%, 94%, 95%, 96%, 97%, 98%, or 99% identical to SEQ ID NO: 27 or 28 or a fragment or a variant thereof;
said 3′-UTR derived from a GNAS gene comprises or consists of a nucleic acid sequence being identical or at least 70%, 80%, 85%, 86%, 87%, 88%, 89%, 90%, 91%, 92%, 93%, 94%, 95%, 96%, 97%, 98%, or 99% identical to SEQ ID NO: 29 or 30 or a fragment or a variant thereof;
said 3′-UTR derived from a NDUFA1 gene comprises or consists of a nucleic acid sequence being identical or at least 70%, 80%, 85%, 86%, 87%, 88%, 89%, 90%, 91%, 92%, 93%, 94%, 95%, 96%, 97%, 98%, or 99% identical to SEQ ID NO: 31 or 32 or a fragment or a variant thereof;
said 3′-UTR derived from a RPS9 gene comprises or consists of a nucleic acid sequence being identical or at least 70%, 80%, 85%, 86%, 87%, 88%, 89%, 90%, 91%, 92%, 93%, 94%, 95%, 96%, 97%, 98%, or 99% identical to SEQ ID NO: 33 or 34 or a fragment or a variant thereof; 1
said 3′-UTR derived from a ALB7 gene comprises or consists of a nucleic acid sequence being identical or at least 70%, 80%, 85%, 86%, 87%, 88%, 89%, 90%, 91%, 92%, 93%, 94%, 95%, 96%, 97%, 98%, or 99% identical to SEQ ID NO: 35 or 36 or a fragment or a variant thereof;
said 3′-UTR derived from a alpha-globin gene comprises or consists of a nucleic acid sequence being identical or at least 70%, 80%, 85%, 86%, 87%, 88%, 89%, 90%, 91%, 92%, 93%, 94%, 95%, 96%, 97%, 98%, or 99% identical to SEQ ID NO: 37 or 38 or a fragment or a variant thereof.

7. Artificial RNA according to any one of the preceding claims, wherein the at least one antigenic peptide or protein derived from RSV F protein is a full-length F protein (F0) or an F protein with deleted C-terminus (F-del), or a fragment or a variant thereof.

8. Artificial RNA according to any one of the preceding claims, wherein the RSV F protein is designed to stabilize the antigen in pre-fusion conformation.

9. Artificial RNA according to any one of the preceding claims, wherein the RSV F protein comprises a DSCav1 mutation (S155C. S290C, S190F, and V207L), or a fragment or a variant thereof.

10. Artificial RNA according to any one of the preceding claims, wherein the RSV F protein comprises the two subunits F2 and F1 in a single polypeptide chain, wherein F2 and F1 are connected via a linker element, preferably a GS linker, to generate a stable F2-linker-F1 protein, wherein said F2-linker-F1 protein preferably lacks aa104-aa144.

11. Artificial RNA according to any one of the preceding claims, wherein the RSV F protein comprises at least one further mutation selected from (S46G, A149C, S215P, Y458C, K465Q), (S46G, E92D, A149C, S215P, Y458C, K465Q), (S46G, N671, E92D, A149C, S215P, Y458C, K465Q), (A149C, Y458C), (N183GC, N428C), (Q98C, Q361C, S46G, E92D, L95M, S215P, I217P, I221M, R429K, K465Q), (Q98C, Q361C, L95M, I221M, R429K), or (N183GC, N428C, S46G, N671, E92D, S215P, K465Q) or a fragment or a variant thereof.

12. Artificial RNA according to any one of the preceding claims, wherein the RSV F protein is selected from F0, F-del, F0_DSCav1, F_DSCav1_mut0, F_DSCav1_mut1, F_DSCav1_mut2, F_DSCav1_mut3, F_DSCav1_mut4, F_DSCav1_mut5, F_DSCav1_mut6, F_DSCav1_mut7, F_DSCav1_mut8, F-del_DSCav1, F-del_DSCav1_mut0, F-del_DSCav1_mut1, F-del_DSCav1_mut2, F-del_DSCav1_mut3, F-del_DSCav1_mut4, F-del_DSCav1_mut5, F-del_DSCav1_mut6, F-del_DSCav1_mut7, F-del_DSCav1_mut8 or a fragment or a variant thereof.

13. Artificial RNA according to any one of the preceding claims, wherein the at least one coding sequence encodes at least one of the amino acid sequences being identical or at least 70%, 80%, 85%, 86%, 87%, 88%, 89%, 90%, 91%, 92%, 93%, 94%, 95%, 96%, 97%, 98%, or 99% identical to any one of SEQ ID NO: 68, 483, 898, 1267, 1636, 2005, 2374, 2743, 3112, 3481, 3850, 4219, 4588, 4957, 5326, 5695, 6064, 6433, 6802, 7171, 7540, 7909, 8279-9683, 11726, 12095, 12464, 12833, 13940, 14309, 14678, 15047, 15416, 15785, 13202, 13571, 16154, 16523, 16892, 17261, 17630, 17999, 18368, 18737, 19106, 19475 or a fragment or variant of any of these sequences.

14. Artificial RNA according to any one of the preceding claims, wherein the at least one coding sequence comprises at least one of the nucleic acid sequences being identical or at least 70%, 80%, 85%, 86%, 87%, 88%, 89%, 90%, 91%, 92%, 93%, 94%, 95%, 96%, 97%, 98%, or 99% identical to SEQ ID NOs: 69-77, 484-492, 899-906, 1268-1275, 1637-1644, 2006-2013, 2375-2382, 2744-2751, 3113-3120, 3482-3489, 3851-3858, 4220-4227, 4589-4596, 4958-4965, 5327-5334, 5696-5703, 6065-6072, 6434-6441, 6803-6810, 7172-7179, 7541-7548, 7910-7917, 11727-11734, 12096-12103, 12465-12472, 12834-12841, 13941-13948, 14310-14317, 14679-14686, 15048-15055, 15417-15424, 15786-15793, 13203-13210, 13572-13579, 16155-16162, 16524-16531, 16893-16900, 17262-17269, 17631-17638, 18000-18007, 18369-18376, 18738-18745, 19107-19114, 19476-19483, 21363-21384, 21389-21410 or a fragment or a fragment or variant of any of these sequences.

15. Artificial RNA according to any one of the preceding claims, wherein the at least one coding sequence is a codon modified coding sequence, wherein the amino acid sequence encoded by the at least one codon modified coding sequence is preferably not being modified compared to the amino acid sequence encoded by the corresponding wild type coding sequence.

16. Artificial RNA according to claim 15, wherein the at least one codon modified coding sequence is selected from C maximized coding sequence, CAI maximized coding sequence, human codon usage adapted coding sequence, G/C content modified coding sequence, and G/C optimized coding sequence, or any combination thereof.

17. Artificial RNA according to claim 15 or 16, wherein the at least one coding sequence comprises a codon modified coding sequence comprising a nucleic acid sequence being identical or at least 70%, 80%, 85%, 86%, 87%, 88%, 89%, 90%, 91%, 92%, 93%, 94%, 95%, 96%, 97%, 98%, or 99% identical to any one SEQ ID NOs: 70-77, 485-492, 899-906, 1268-1275, 1637-1644, 2006-2013, 2375-2382, 2744-2751, 3113-3120, 3482-3489, 3851-3858, 4220-4227, 4589-4596, 4958-4965, 5327-5334, 5696-5703, 6065-6072, 6434-6441, 6803-6810, 7172-7179, 7541-7548, 7910-7917, 11728-11734, 12097-12103, 12465-12472, 12834-12841, 13941-13948, 14310-14317, 14679-14686, 15048-15055, 15417-15424, 15786-15793, 13203-13210, 13572-13579, 16155-16162, 16524-16531, 16893-16900, 17262-17269, 17631-17638, 18000-18007, 18369-18376, 18738-18745, 19107-19114, 19476-19483, 21363-21384, 21389-21410 or a fragment or variant of any of these sequences.

18. Artificial RNA according to claim 15 to 17, wherein the at least one coding sequence comprises a codon modified coding sequence comprising a nucleic acid sequence being identical or at least 70%, 80%, 85%, 86%, 87%, 88%, 89%, 90%, 91%, 92%, 93%, 94%, 95%, 96%, 97%, 98%, or 99% identical to any one of SEQ ID NOs: 70-71, 75-77, 485-486, 490-492, 899-900, 904-906, 1268-1269, 1273-1275, 1637-1638, 1642-1644, 2006-2007, 2011-2013, 2375-2376, 2380-2382, 2744-2745, 2749-2751, 3113-3114, 3118-3120, 3482-3483, 3487-3489, 3852, 4221, 4590, 4959, 5328, 5697, 6066, 6435, 6804, 7173, 7542, 7911, 3856-3858, 4225-4227, 4594-4596, 4963-4965, 5332-5334, 5701-5703, 6070-6072, 6439-6441, 6808-6810, 7177-7179, 7546-7548, 7915-7917, 11728, 11732-11734, 12097, 12101-12103, 12465, 12466, 12470-12472, 12834, 12835, 12839-12841, 13941, 13942, 13946-13948, 14310, 14311, 14315-14317, 14679, 14680, 14684-14686, 15048, 15049, 15053-15055, 15417, 15418, 15422-15424, 15786, 15787, 15791-15793, 13203, 13204, 13208-13210, 13572, 13573, 13577-13579, 16155, 16156, 16160-16162, 16524, 16525, 16529-16531, 16893, 16894, 16898-16900, 17262, 17263, 17267-17269, 17631, 17632, 17636-17638, 18000, 18001, 18005-18007, 18369, 18370, 18374-18376, 18738, 18739, 18743-18745, 19107, 19108, 19112-19114, 19476, 19477, 19481-19483, 21363-21384, 21389-21410 or a fragment or variant of any of these sequences.

19. Artificial RNA according to any one of the preceding claims, wherein the RNA is an mRNA, a self-replicating RNA, a circular RNA, or a replicon RNA.

20. Artificial RNA according to claim 19, wherein the RNA is an mRNA.

21. Artificial RNA according to any one of the preceding claims, wherein the RNA comprises a 5′-cap structure, preferably m7G, cap0, cap1, cap2, a modified cap0 or a modified cap1 structure.

22. Artificial RNA according to any one of the preceding claims, wherein the RNA comprises at least one poly(A) sequence, preferably comprising 30 to 150 adenosine nucleotides, more preferably comprising 100 adenosine nucleotides and/or at least one poly(C) sequence, preferably comprising 10 to 40 cytosine nucleotides.

23. Artificial RNA according to any one of the preceding claims, wherein the RNA comprises at least one histone stem-loop, wherein the histone stem-loop preferably comprises a nucleic acid sequence according to SEQ ID NO: 39 or 40 or a fragment or variant thereof.

24. Artificial RNA according to any one of the preceding claims comprising the following elements, preferably in 5′- to 3′-direction:
a) 5′-cap structure, preferably as specified herein;
b) optionally, 5′-UTR as specified herein, preferably at least one selected from SEQ ID NOs: 1-22;
c) a ribosome binding site, preferably as specified herein
d) at least one coding sequence as specified herein, preferably as specified in Table 3 and Table 4;
d) 3′-UTR as specified herein, preferably at least one selected from SEQ ID NOs: 23-38;
e) optionally, a poly(A) sequence, preferably as specified herein;
f) optionally, a poly(C) sequence, preferably as specified herein;
g) optionally, a histone stem-loop, preferably as specified herein;
h) optionally, a 3′-terminal sequence element as specified herein, preferably according to according to SEQ ID NOs: 44-63, or 21322-21328;and
wherein optionally at least one or more than one, preferably wherein all uracil nucleotides are replaced by pseudouridine (ψ) nucleotides or N1-methylpseudouridine (m1ψ) nucleotides.

25. Artificial RNA according claims 1 to 24 comprising the following elements, preferably in 5′- to 3-direction:
a) 5′-cap structure, preferably as defined in claim 21, most preferably a Cap structure;
b) 5′-UTR and/or 3′-UTR according to a-1, a-4, c-1, e-4, g-2, i-2, or i-3;
c) at least one coding sequence as defined by any one of claims 13 to 18 or encoding a protein as defined by any one of claims 7 to 12 or;
d) optionally, a poly(A) sequence, preferably as defined by claim 22;
e) optionally, poly(C) sequence, preferably as defined by claim 22;
f) optionally, histone stem-loop, preferably as defined by any one of claim 23;
g) optionally, a 3′-terminal sequence according to SEQ ID NOs: 44-63, 21322-21328 and
wherein optionally at least one or more than one, preferably wherein all uracil nucleotides are replaced by pseudouridine (ψ) nucleotides or N1-methylpseudouridine (m1ψ) nucleotides.

26. Artificial RNA according claims 1 to 25 comprising the following elements in 5′- to 3′-direction:
a) 5′-cap structure, preferably as defined in claim 21, most preferably a Cap1 structure;
b) 5′-UTR and/or 3′-UTR according to a-1, a-4, c-1, e-4, g-2, i-2, or i-3, preferably a-1;
c) at least one coding sequence as defined by any one of claims 13 to 18 or encoding a protein as defined by any one of claims 7 to 12, wherein said coding sequence is located between said 5′-UTR and said 3′-UTR, preferably downstream of said 5′-UTR and upstream of said 3′-UTR;
d) a histone stem-loop, preferably as defined by any one of claim 23
e) a poly(A) sequence, preferably as defined by claim 22
f) a 3′-terminal sequence according to SEQ ID NOs: 21322-21328.
wherein optionally at least one or more than one, preferably wherein all uracil nucleotides are replaced by pseudouridine (ψ) nucleotides or N1-methylpseudouridine (m1ψ) nucleotides.

27. Artificial RNA any one of the preceding claims, wherein the artificial RNA comprises or consists of an RNA sequence which is identical or at least 70%, 80%, 85%, 86%, 87%, 88%, 89%, 90%, 91%, 92%, 93%, 94%, 95%, 96%, 97%, 98%, or 99% identical to a nucleic acid sequence selected from the group consisting of SEQ ID NOs: 78-482, 493-897, 907-1266, 1276-1635, 1645-2004, 2014-2373, 2383-2742, 2752-3111, 3121-3480, 3490-3849, 3859-4218, 4228-4587, 4597-4956, 4966-5325, 5335-5694, 5704-6063, 6073-6432, 6442-6801, 6811-7170, 7180-7539, 7549-7908, 7918-8277, 8278, 11735-12094, 12104-12463, 12473-12832, 12842-13201, 13949-14308, 14318-14677, 14687-15046, 15056-15415, 15425-15784, 15794-16153, 13211-13570, 13580-13939, 16163-16522, 16532-16891, 16901-17260, 17270-17629, 17639-17998, 18008-18367, 18377-18736, 18746-19105, 19115-19474, 19484-19843, 21415-21480, 21561-21626, 21489-21552, 21635-21698 or a fragment or variant of any of these sequences.

28. Artificial RNA according to claim 27, wherein
said artificial RNA comprises or consists of an RNA sequence which is identical or at least 70%, 80%, 85%, 86%, 87%, 88%, 89%, 90%, 91%, 92%, 93%, 94%, 95%, 96%, 97%, 98%, or 99% identical to a nucleic acid sequence selected from the group consisting of SEQ ID NOs: 78-482, 11735-12094, 21415-21417, 21561-21563, 21489, 21490, 21635, 21636 or a fragment or variant of any of these sequences;
said artificial RNA comprises or consists of an RNA sequence which is identical or at least 70%, 80%, 85%, 86%, 87%, 88%, 89%, 90%, 91%, 92%, 93%, 94%, 95%, 96%, 97%, 98%, or 99% identical to a nucleic acid sequence selected from the group consisting of SEQ ID NOs: 493-897, 12104-12463, 21418-21420, 21564-21566, 21491, 21492, 21637, 21638 or a fragment or variant of any of these sequences;
said artificial RNA comprises or consists of an RNA sequence which is identical or at least 70%, 80%, 85%, 86%, 87%, 88%, 89%, 90%, 91%, 92%, 93%, 94%, 95%, 96%, 97%, 98%, or 99% identical to a nucleic acid sequence selected from the group consisting of SEQ ID NOs: 907-1266, 12473-12832, 21421-21423, 21567-21569, 21493-21495, 21639-21641 or a fragment or variant of any of these sequences;
said artificial RNA comprises or consists of an RNA sequence which is identical or at least 70%, 80%, 85%, 86%, 87%, 88%, 89%, 90%, 91%, 92%, 93%, 94%, 95%, 96%, 97%, 98%, or 99% identical to a nucleic acid sequence selected from the group consisting of SEQ ID NOs: 1276-1635, 8278, 12842-13201, 21424-21426, 21570-21572, 21496-21498, 21642-21644 or a fragment or variant of any of these sequences;
said artificial RNA comprises or consists of an RNA sequence which is identical or at least 70%, 80%, 85%, 86%, 87%, 88%, 89%, 90%, 91%, 92%, 93%, 94%, 95%, 96%, 97%, 98%, or 99% identical to a nucleic acid sequence selected from the group consisting of SEQ ID NOs: 1645-2004, 13949-14308, 21433-21435, 21579-21581, 21505-21507, 21651-21653 or a fragment or variant of any of these sequences;
said artificial RNA comprises or consists of an RNA sequence which is identical or at least 70%, 80%, 85%, 86%, 87%, 88%, 89%, 90%, 91%, 92%, 93%, 94%, 95%, 96%, 97%, 98%, or 99% identical to a nucleic acid sequence selected from the group consisting of SEQ ID NOs: 2014-2373, 14318-14677, 21436-21438, 21582-21584, 21508-21510, 21654-21656 or a fragment or variant of any of these sequences;
said artificial RNA comprises or consists of an RNA sequence which is identical or at least 70%, 80%, 85%, 86%, 87%, 88%, 89%, 90%, 91%, 92%, 93%, 94%, 95%, 96%, 97%, 98%, or 99% identical to a nucleic acid sequence selected from the group consisting of SEQ ID NOs: 2383-2742, 14687-15046, 21439-21441, 21585-21587, 21511-21513, 21657-21659 or a fragment or variant of any of these sequences;
said artificial RNA comprises or consists of an RNA sequence which is identical or at least 70%, 80%, 85%, 86%, 87%, 88%, 89%, 90%, 91%, 92%, 93%, 94%, 95%, 96%, 97%, 98%, or 99% identical to a nucleic acid sequence selected from the group consisting of SEQ ID NOs: 2752-3111, 15056-15415, 21442-21444, 21588-21590, 21514-21516, 21660-21662 or a fragment or variant of any of these sequences;
said artificial RNA comprises or consists of an RNA sequence which is identical or at least 70%, 80%, 85%, 86%, 87%, 88%, 89%, 90%, 91%, 92%, 93%, 94%, 95%, 96%, 97%, 98%, or 99% identical to a nucleic acid sequence selected from the group consisting of SEQ ID NOs: 3121-3480, 15425-15784, 21445-21447, 21591-21593, 21517-21519, 21663-21665 or a fragment or variant of any of these sequences;
said artificial RNA comprises or consists of an RNA sequence which is identical or at least 70%, 80%, 85%, 86%, 87%, 88%, 89%, 90%, 91%, 92%, 93%, 94%, 95%, 96%, 97%, 98%, or 99% identical to a nucleic acid sequence selected from the group consisting of SEQ ID NOs: 3490-3849, 15794-16153, 1448-21450, 21594-21596, 21520-21522, 21666-21668 or a fragment or variant of any of these sequences;
said artificial RNA comprises or consists of an RNA sequence which is identical or at least 70%, 80%, 85%, 86%, 87%, 88%, 89%, 90%, 91%, 92%, 93%, 94%, 95%, 96%, 97%, 98%, or 99% identical to a nucleic acid sequence selected from the group consisting of SEQ ID NOs: 3859-4218, 13211-13570, 21427-21429, 21573-21575, 21499-21501, 21645-21647 or a fragment or variant of any of these sequences;
said artificial RNA comprises or consists of an RNA sequence which is identical or at least 70%, 80%, 85%, 86%, 87%, 88%, 89%, 90%, 91%, 92%, 93%, 94%, 95%, 96%, 97%, 98%, or 99% identical to a nucleic acid sequence selected from the group consisting of SEQ ID NOs: 4228-4587, 13580-13939, 21430-21432, 21576-21578, 21502-21504, 21648-21650 or a fragment or variant of any of these sequences;
said artificial RNA comprises or consists of an RNA sequence which is identical or at least 70%, 80%, 85%, 86%, 87%, 88%, 89%, 90%, 91%, 92%, 93%, 94%, 95%, 96%, 97%, 98%, or 99% identical to a nucleic acid sequence selected from the group consisting of SEQ ID NOs: 4597-4956, 16163-16522, 21451-21453, 21597-21599, 21523-21525, 21669-21671 or a fragment or variant of any of these sequences;
said artificial RNA comprises or consists of an RNA sequence which is identical or at least 70%, 80%, 85%, 86%, 87%, 88%, 89%, 90%, 91%, 92%, 93%, 94%, 95%, 96%, 97%, 98%, or 99% identical to a nucleic acid sequence selected from the group consisting of SEQ ID NOs: 4966-5325, 16532-16891, 21454-21456, 21600-21602, 21526-21528, 21672-21674 or a fragment or variant of any of these sequences;
said artificial RNA comprises or consists of an RNA sequence which is identical or at least 70%, 80%, 85%, 86%, 87%, 88%, 89%, 90%, 91%, 92%, 93%, 94%, 95%, 96%, 97%, 98%, or 99% identical to a nucleic acid sequence selected from the group consisting of SEQ ID NOs: 5335-5694, 16901-17260, 21457-21459, 21603-21605, 21529-21531, 21675-21677 or a fragment or variant of any of these sequences;
said artificial RNA comprises or consists of an RNA sequence which is identical or at least 70%, 80%, 85%, 86%, 87%, 88%, 89%, 90%, 91%, 92%, 93%, 94%, 95%, 96%, 97%, 98%, or 99% identical to a nucleic acid sequence selected from the group consisting of SEQ ID NOs: 5704-6063, 17270-17629, 21460-21462, 21606-21608, 21532-21534, 21678-21680 or a fragment or variant of any of these sequences;
said artificial RNA comprises or consists of an RNA sequence which is identical or at least 70%, 80%, 85%, 86%, 87%, 88%, 89%, 90%, 91%, 92%, 93%, 94%, 95%, 96%, 97%, 98%, or 99% identical to a nucleic acid sequence selected from the group consisting of SEQ ID NOs: 6073-6432, 17639-17998, 21463-21465, 21609-21611, 21535-21537, 21681-21683 or a fragment or variant of any of these sequences;
said artificial RNA comprises or consists of an RNA sequence which is identical or at least 70%, 80%, 85%, 86%, 87%, 88%, 89%, 90%, 91%, 92%, 93%, 94%, 95%, 96%, 97%, 98%, or 99% identical to a nucleic acid sequence selected from the group consisting of SEQ ID NOs: 6442-6801, 18008-18367, 21466-21468, 21612-21614, 21538-21540, 21684-21686 or a fragment or variant of any of these sequences;
said artificial RNA comprises or consists of an RNA sequence which is identical or at least 70%, 80%, 85%, 86%, 87%, 88%, 89%, 90%, 91%, 92%, 93%, 94%, 95%, 96%, 97%, 98%, or 99% identical to a nucleic acid sequence selected from the group consisting of SEQ ID NOs: 6811-7170, 18377-18736, 21469-21471, 21615-21617, 21541-21543, 21687-21689 or a fragment or variant of any of these sequences;
said artificial RNA comprises or consists of an RNA sequence which is identical or at least 70%, 80%, 85%, 86%, 87%, 88%, 89%, 90%, 91%, 92%, 93%, 94%, 95%, 96%, 97%, 98%, or 99% identical to a nucleic acid sequence selected from the group consisting of SEQ ID NOs: 7180-7539, 18746-19105, 21472-21474, 21618-21620, 21544-21546, 21690-21692 or a fragment or variant of any of these sequences;
said artificial RNA comprises or consists of an RNA sequence which is identical or at least 70%, 80%, 85%, 86%, 87%, 88%, 89%, 90%, 91%, 92%, 93%, 94%, 95%, 96%, 97%, 98%, or 99% identical to a nucleic acid sequence selected from the group consisting of SEQ ID NOs: 7549-7908, 19115-19474, 21475-21477, 21621-21623, 21547-21549, 21693-21695 or a fragment or variant of any of these sequences;
said artificial RNA comprises or consists of an RNA sequence which is identical or at least 70%, 80%, 85%, 86%, 87%, 88%, 89%, 90%, 91%, 92%, 93%, 94%, 95%, 96%, 97%, 98%, or 99% identical to a nucleic acid sequence selected from the group consisting of SEQ ID NOs: 7918-8277, 19484-19843, 21478-21480, 21624-21626, 21550-21552, 21696-21698 or a fragment or variant of any of these sequences;

29. A composition comprising at least one artificial RNA as defined in any one of claims 1 to 28, wherein the composition optionally comprises at least one pharmaceutically acceptable carrier.

30. A composition according to claim 29 comprising at least one further artificial RNA comprising at least one coding sequence encoding at least one antigenic peptide or protein derived from RSV selected from matrix protein M, nucleoprotein N, M2-1 protein, and/or phosphoprotein P or combinations thereof, preferably selected from M2-1.

31. A composition according to claim 29 or 30, comprising two further artificial RNA species each comprising at least one coding sequence encoding at least one antigenic peptide or protein derived from RSV selected from matrix protein M, nucleoprotein N, M2-1, and phosphoprotein P.

32. A composition according to claim 29 or 30, comprising three further artificial RNA species each comprising at least one coding sequence encoding at least one antigenic peptide or protein derived from RSV selected from matrix protein M, nucleoprotein N, M2-1, and phosphoprotein P.

33. A composition according to claims 30 to 32, wherein the coding sequence of the further artificial RNA encodes at least one of the amino acid sequences being identical or at least 70%, 80%, 85%, 86%, 87%, 88%, 89%, 90%, 91%, 92%, 93%, 94%, 95%, 96%, 97%, 98%, or 99% identical to any one of SEQ ID NOs: 9684, 10053-10133, 10134, 10503-10636, 10637, 11006-11182, 11183, 11552-11725, 19844, 20213, 20582, 20951 or a fragment or variant of any of these sequences.

34. A composition according to claim 30 to 33, wherein the coding sequence is operably linked to a 3′-UTR and a 5′-UTR selected from a-1, a-2, a-3, a-4, a-5, b-1, b-2, b-3, b-4, b-5, c-1, c-2, c-3, c-4, c-5, d-1, d-2, d-3, d-4, d-5, e-1, e-2, e-3, e-4, e-5, e-6, f-1, f-2, f-3, f-4, f-5, g-1, g-2, g-3, g-4, g-5, h-1, h-2, h-3, h-4, h-5, i-1, i-2, or i-3.

35. A composition according to claim 30 to 34, wherein the coding sequence comprises at least one of the nucleic acid sequences being identical or at least 70%, 80%, 85%, 86%, 87%, 88%, 89%, 90%, 91%, 92%, 93%, 94%, 95%, 96%, 97%, 98%, or 99% identical to SEQ ID NOs: 9685-9692, 10135-10142, 10638-10645, 11184-11191, 19845-19852, 20214-20221, 20583-20590, 20952-20959, 21385-21388, 21411-21414 or a fragment or a fragment or variant of any of these sequences.

36. A composition according to claim 30 to 35, wherein the further artificial RNA comprises or consists of an RNA sequence which is identical or at least 70%, 80%, 85%, 86%, 87%, 88%, 89%, 90%, 91%, 92%, 93%, 94%, 95%, 96%, 97%, 98%, or 99% identical to a nucleic acid sequence selected from SEQ ID NOs: 9693-10052, 10143-10502, 10646-11005, 11192-11551, 19853-20212, 20222-20581, 20591-20950, 20960-21319, 21481-21634, 21553-21706 or a fragment or variant of any of these sequences.

37. A composition according to claim 29 to 36 comprising
an artificial RNA which is identical or at least 70%, 80%, 85%, 86%, 87%, 88%, 89%, 90%, 91%, 92%, 93%, 94%, 95%, 96%, 97%, 98%, or 99% identical to a nucleic acid sequence selected from SEQ ID NOs: 78-482, 493-897, 907-1266, 1276-1635, 1645-2004, 2014-2373, 2383-2742, 2752-3111, 3121-3480, 3490-3849, 3859-4218, 4228-4587, 4597-4956, 4966-5325, 5335-5694, 5704-6063, 6073-6432, 6442-6801, 6811-7170, 7180-7539, 7549-7908, 7918-8277, 8278, 11735-12094, 12104-12463, 12473-12832, 12842-13201, 13949-14308, 14318-14677, 14687-15046, 15056-15415, 15425-15784, 15794-16153, 13211-13570, 13580-13939, 16163-16522, 16532-16891, 16901-17260, 17270-17629, 17639-17998, 18008-18367, 18377-18736, 18746-19105, 19115-19474, 19484-19843, 21415-21480, 21561-21626, 21489-21552, 21635-21698 and a further artificial RNA which is identical or at least 70%, 80%, 85%, 86%, 87%, 88%, 89%, 90%, 91%, 92%, 93%, 94%, 95%, 96%, 97%, 98%, or 99% identical to a nucleic acid sequence selected from the group consisting of SEQ ID NOs: 9693-10052, 19853-20212, 21481, 21482, 21627, 21628, 21553, 21554, 21699, 21700; or
an artificial RNA which is identical or at least 70%, 80%, 85%, 86%, 87%, 88%, 89%, 90%, 91%, 92%, 93%, 94%, 95%, 96%, 97%, 98%, or 99% identical to a nucleic acid sequence selected from SEQ ID NOs: 78-482, 493-897, 907-1266, 1276-1635, 1645-2004, 2014-2373, 2383-2742, 2752-3111, 3121-3480, 3490-3849, 3859-4218, 4228-4587, 4597-4956, 4966-5325, 5335-5694, 5704-6063, 6073-6432, 6442-6801, 6811-7170, 7180-7539, 7549-7908, 7918-8277, 8278, 11735-12094, 12104-12463, 12473-12832, 12842-13201, 13949-14308, 14318-14677, 14687-15046, 15056-15415, 15425-15784, 15794-16153, 13211-13570, 13580-13939, 16163-16522, 16532-16891, 16901-17260, 17270-17629, 17639-17998, 18008-18367, 18377-18736, 18746-19105, 19115-19474, 19484-19843, 21415-21480, 21561-21626, 21489-21552, 21635-21698 and a further artificial RNA which is identical or at least 70%, 80%, 85%, 86%, 87%, 88%, 89%, 90%, 91%, 92%, 93%, 94%, 95%, 96%, 97%, 98%, or 99% identical to a nucleic acid sequence selected from the group consisting of SEQ ID NOs: 10143-10502, 20222-20581, 21483, 21484, 21629, 21630, 21555, 21556, 21701, 21702; or
an artificial RNA which is identical or at least 70%, 80%, 85%, 86%, 87%, 88%, 89%, 90%, 91%, 92%, 93%, 94%, 95%, 96%, 97%, 98%, or 99% identical to a nucleic acid sequence selected from SEQ ID NOs: 78-482, 493-897, 907-1266, 1276-1635, 1645-2004, 2014-2373, 2383-2742, 2752-3111, 3121-3480, 3490-3849, 3859-4218, 4228-4587, 4597-4956, 4966-5325, 5335-5694, 5704-6063, 6073-6432, 6442-6801, 6811-7170, 7180-7539, 7549-7908, 7918-8277, 8278, 11735-12094, 12104-12463, 12473-12832, 12842-13201, 13949-14308, 14318-14677, 14687-15046, 15056-15415, 15425-15784, 15794-16153, 13211-13570, 13580-13939, 16163-16522, 16532-16891, 16901-17260, 17270-17629, 17639-17998, 18008-18367, 18377-18736, 18746-19105, 19115-19474, 19484-19843, 21415-21480, 21561-21626, 21489-21552, 21635-21698 and a further artificial RNA which is identical or at least 70%, 80%, 85%, 86%, 87%, 88%, 89%, 90%, 91%, 92%, 93%, 94%, 95%, 96%, 97%, 98%, or 99% identical to a nucleic acid sequence selected from the group consisting of SEQ ID NOs: 10646-11005, 20591-20950, 21485, 21486, 21631, 21632, 21557, 21558, 21703, 21704; or
an artificial RNA which is identical or at least 70%, 80%, 85%, 86%, 87%, 88%, 89%, 90%, 91%, 92%, 93%, 94%, 95%, 96%, 97%, 98%, or 99% identical to a nucleic acid sequence selected from SEQ ID NOs: 78-482, 493-897, 907-1266, 1276-1635, 1645-2004, 2014-2373, 2383-2742, 2752-3111, 3121-3480, 3490-3849, 3859-4218, 4228-4587, 4597-4956, 4966-5325, 5335-5694, 5704-6063, 6073-6432, 6442-6801, 6811-7170, 7180-7539, 7549-7908, 7918-8277, 8278, 11735-12094, 12104-12463, 12473-12832, 12842-13201, 13949-14308, 14318-14677, 14687-15046, 15056-15415, 15425-15784, 15794-16153, 13211-13570, 13580-13939, 16163-16522, 16532-16891, 16901-17260, 17270-17629, 17639-17998, 18008-18367, 18377-18736, 18746-19105, 19115-19474, 19484-19843, 21415-21480, 21561-21626, 21489-21552, 21635-21698 and a further artificial RNA which is identical or at least 70%, 80%, 85%, 86%, 87%, 88%, 89%, 90%, 91%, 92%, 93%, 94%, 95%, 96%, 97%, 98%, or 99% identical to a nucleic acid sequence selected from the group consisting of SEQ ID NOs: 11192-11551, 20960-21319; 21487, 21488, 21633, 21634, 21559, 21560, 21705, 21706 or
an artificial RNA which is identical or at least 70%, 80%, 85%, 86%, 87%, 88%, 89%, 90%, 91%, 92%, 93%, 94%, 95%, 96%, 97%, 98%, or 99% identical to a nucleic acid sequence selected from SEQ ID NOs: 78-482, 493-897, 907-1266, 1276-1635, 1645-2004, 2014-2373, 2383-2742, 2752-3111, 3121-3480, 3490-3849, 3859-4218, 4228-4587, 4597-4956, 4966-5325, 5335-5694, 5704-6063, 6073-6432, 6442-6801, 6811-7170, 7180-7539, 7549-7908, 7918-8277, 8278, 11735-12094, 12104-12463, 12473-12832, 12842-13201, 13949-14308, 14318-14677, 14687-15046, 15056-15415, 15425-15784, 15794-16153, 13211-13570, 13580-13939, 16163-16522, 16532-16891, 16901-17260, 17270-17629, 17639-17998, 18008-18367, 18377-18736, 18746-19105, 19115-19474, 19484-19843, 21415-21480, 21561-21626, 21489-21552, 21635-21698 and a further artificial RNA which is identical or at least 70%, 80%, 85%, 86%, 87%, 88%, 89%, 90%, 91%, 92%, 93%, 94%, 95%, 96%, 97%, 98%, or 99% identical to a nucleic acid sequence selected from SEQ ID NOs: 9693-10052, 19853-20212, 21481, 21482, 21627, 21628, 21553, 21554, 21699, 21700 and a further artificial RNA which is identical or at least 70%, 80%, 85%, 86%, 87%, 88%, 89%, 90%, 91%, 92%, 93%, 94%, 95%, 96%, 97%, 98%, or 99% identical to a nucleic acid sequence selected from SEQ ID NOs: 10646-11005, 20591-20950, 21485, 21486, 21631, 21632, 21557, 21558, 21703, 21704; or
an artificial RNA which is identical or at least 70%, 80%, 85%, 86%, 87%, 88%, 89%, 90%, 91%, 92%, 93%, 94%, 95%, 96%, 97%, 98%, or 99% identical to a nucleic acid sequence selected from SEQ ID NOs: 78-482, 493-897, 907-1266, 1276-1635, 1645-2004, 2014-2373, 2383-2742, 2752-3111, 3121-3480, 3490-3849, 3859-4218, 4228-4587, 4597-4956, 4966-5325, 5335-5694, 5704-6063, 6073-6432, 6442-6801, 6811-7170, 7180-7539, 7549-7908, 7918-8277, 8278, 11735-12094, 12104-12463, 12473-12832, 12842-13201, 13949-14308, 14318-14677, 14687-15046, 15056-15415, 15425-15784, 15794-16153, 13211-13570, 13580-13939, 16163-16522, 16532-16891, 16901-17260, 17270-17629, 17639-17998, 18008-18367, 18377-18736, 18746-19105, 19115-19474, 19484-19843, 21415-21480, 21561-21626, 21489-21552, 21635-21698 and a further artificial RNA which is identical or at least 70%, 80%, 85%, 86%, 87%, 88%, 89%, 90%, 91%, 92%, 93%, 94%, 95%, 96%, 97%, 98%, or 99% identical to a nucleic acid sequence selected from SEQ ID NOs: 9693-10052, 19853-20212, 21481, 21482, 21627, 21628, 21553, 21554, 21699, 21700 and a further artificial RNA which is identical or at least 70%, 80%, 85%, 86%, 87%, 88%, 89%, 90%, 91%, 92%, 93%, 94%, 95%, 96%, 97%, 98%, or 99% identical to a nucleic acid sequence selected from SEQ ID NOs: 10646-11005, 20591-20950, 21485, 21486, 21631, 21632, 21557, 21558, 21703, 21704 and a further artificial RNA which is identical or at least 70%, 80%, 85%, 86%, 87%, 88%, 89%, 90%, 91%, 92%, 93%, 94%, 95%, 96%, 97%, 98%, or 99% identical to a nucleic acid sequence selected from SEQ ID NOs: 10143-10502, 20222-20581, 21483, 21484, 21629, 21630, 21555, 21556, 21701, 21702.

38. Composition according to claim 29 to 37, wherein the at least one artificial RNA and, optionally, the further artificial RNA is complexed or associated with or at least partially complexed or partially associated with one or more cationic or polycationic compound, preferably cationic or polycationic polymer, cationic or polycationic polysaccharide, cationic or polycationic lipid, cationic or polycationic protein, cationic or polycationic peptide, or any combinations thereof.

39. Composition according to claim 38, wherein the artificial RNA and, optionally, the further artificial RNA is complexed or associated with one or more lipids, thereby forming liposomes, lipid nanoparticles, lipoplexes, and/or nanoliposomes.

40. Composition according to claim 39, wherein the artificial RNA and, optionally, the further artificial RNA is complexed with one or more lipids thereby forming lipid nanoparticles (LNP).

41. Composition according to claim 40, wherein the LNP comprises a cationic lipid with the formula Ill: [chemical structure]
or a pharmaceutically acceptable salt, tautomer, prodrug or stereoisomer thereof, wherein:
L¹ or L² is each independently —O(C═O)—, —(C═O)O—, —C(═O)—, —O—, —S(O)—, —S—S—, —C(═O)S—, —SC(═O)—, —NR^{a}C(═O)—, —C(═O)NR^{a}—, —NR^{a}C(═O)NR^{a}—, —OC(═O)NR^{a}— or —NR^{a}C(═O)O—, preferably L¹ or L² is —O(C═O)— or —(C═O)θ-;
G¹ and G² are each independently unsubstituted C₁-C₁₂ alkylene or C₁-C₁₂ alkenylene;
G³ is C₁-C₂₄ alkylene, C₁-C₂₄ alkenylene, C₃-C₈ cycloalkylene, or C₃-C₈ cycloalkenylene;
R^{a} is H or C₁-C₁₂ alkyl;
R¹ and R² are each independently C₆-C₂₄ alkyl or C₆-C₂₄ alkenyl;
R³ is H, OR⁵, CN, —C(═O)OR⁴, —OC(═O)R⁴ or —NR⁵C(═O)R⁴;
R⁴ is C₁-C₁₂ alkyl;
R⁵ is H or C₁-C₁₂ alkyl; and
x is 0, 1 or 2;

42. Composition according to claim 41, wherein the cationic lipid is a compound of formula I, and wherein:
L¹ and L² are each independently —O(C═O)— or (C═O)—O—;
G³ is C₁-C₂₄ alkylene or C₁-C₂₄ alkenylene; and
R³ is H or OR⁵.

43. Composition according to any one of claims 41 to 42, wherein the cationic lipid is a compound of formula III, and wherein:
L¹ and L² are each independently —O(C═O)— or (C═O)—O—; and
R¹ and R² each independently have one of the following structures:

[chemical structure]

44. Composition according to any one of claims 41 to 43, wherein the cationic lipid is a compound of formula III, and wherein R³ is OH.

45. Composition according to any one of claims 41 to 44, wherein the cationic lipid is selected from structures III-1 to III-36:

| No. | Structure |
|---|---|
| III-1 | [chemical structure] |
| III-2 | [chemical structure] |
| III-3 | [chemical structure] |
| III-4 | [chemical structure] |
| III-5 | [chemical structure] |
| III-6 | [chemical structure] |
| III-7 | [chemical structure] |
| III-8 | [chemical structure] |
| III-9 | [chemical structure] |
| III-10 | [chemical structure] |
| III-11 | [chemical structure] |
| III-12 | [chemical structure] |
| III-13 | [chemical structure] |
| III-14 | [chemical structure] |
| III-15 | [chemical structure] |
| III-16 | [chemical structure] |
| III-17 | [chemical structure] |
| III-18 | [chemical structure] |
| III-19 | [chemical structure] |
| III-20 | [chemical structure] |
| III-21 | [chemical structure] |
| III-22 | [chemical structure] |
| III-23 | [chemical structure] |
| III-24 | [chemical structure] |
| III-25 | [chemical structure] |
| III-26 | [chemical structure] |
| III-27 | [chemical structure] |
| III-28 | [chemical structure] |
| III-29 | [chemical structure] |
| III-30 | [chemical structure] |
| III-31 | [chemical structure] |
| III-32 | [chemical structure] |
| III-33 | [chemical structure] |
| III-34 | [chemical structure] |
| III-35 | [chemical structure] |
| III-36 | [chemical structure] |

46. Composition according to any one of claims 41 to 45, wherein the cationic lipid is

[chemical structure]

47. Composition according to any one of claims 40 to 46, wherein the LNP comprises a PEG lipid with the formula (IV): [chemical structure]
wherein R⁸ and R⁹ are each independently a straight or branched, saturated or unsaturated alkyl chain containing from 10 to 30 carbon atoms, wherein the alkyl chain is optionally interrupted by one or more ester bonds;
and w has a mean value ranging from 30 to 60.

48. Composition according to claim 47, wherein in the PEG lipid R⁸ and R⁹ are saturated alkyl chains.

49. Composition according to claim 47 or 48, wherein the PEG lipid is [chemical structure]
wherein n has a mean value ranging from 30 to 60, preferably wherein n has a mean value of about 45, 46, 47, 48, 49, 50, 51, 52, 53, 54, most preferably wherein n has a mean value of 49.

50. Composition according to any one of claims 40 to 49, wherein the LNP comprises one or more neutral lipids and/or a steroid or steroid analogues.

51. Composition according to claim 50, wherein the neutral lipid is selected from the group comprising distearoylphosphatidylcholine (DSPC), dioleoylphosphatidylcholine (DOPC), dipalmitoylphosphatidylcholine (DPPC), dioleoylphosphatidylglycerol (DOPG), dipalmitoylphosphatidylglycerol (DPPG), dioleoyl-phosphatidylethanolamine (DOPE), palmitoyloleoylphosphatidylcholine (POPC), palmitoyloleoyl-phosphatidylethanolamine (POPE) and dioleoyl-phosphatidylethanolamine 4-(N-maleimidomethyl)-cyclohexane-1carboxylate (DOPE-mal), dipalmitoyl phosphatidyl ethanolamine (DPPE), dimyristoylphosphoethanolamine (DMPE), distearoyl-phosphatidylethanolamine (DSPE), 16-O-monomethyl PE, 16-O-dimethyl PE, 18-1-trans PE, 1-stearioyl-2-oleoylphosphatidyethanol amine (SOPE), and 1,2-dielaidoyl-sn-glycero-3-phophoethanolamine (transDOPE).

52. Composition according to claim 50 or 51, wherein the neutral lipid is 1,2-distearoyl-sn-glycero-3-phosphocholine (DSPC), and wherein the molar ratio of the cationic lipid to DSPC is optionally in the range from about 2:1 to 8:1.

53. Composition according to claim 50, wherein the steroid is cholesterol, and wherein the molar ratio of the cationic lipid to cholesterol is optionally in the range from about 2:1 to 1:1

54. Composition according to any one of claims 40 to 53, wherein the LNP essentially consists of
(i) at least one cationic lipid, preferably as defined in any one of claims 41 to 46;
(ii) a neutral lipid, preferably as defined in any one of claims 50 to 52;
(iii) a steroid or steroid analogue, preferably as defined in claim 53; and
(iv) a PEG-lipid, e.g. PEG-DMG or PEG-cDMA, preferably as defined in any one of claims 47 to 49,
wherein (i) to (iv) are in a molar ratio of about 20-60% cationic lipid, 5-25% neutral lipid, 25-55% sterol, and 0.5-15% PEG-lipid.

55. Polypeptide encoded by the artificial RNA according to any one of claims 1 to 28, preferably having an amino acid sequence which is identical or at least 70%, 80%, 85%, 86%, 87%, 88%, 89%, 90%, 91%, 92%, 93%, 94%, 95%, 96%, 97%, 98%, or 99% identical to SEQ ID NOs: 1267, 2005, 2743, 3481, 4219, 4957, 5695, 6433, 7171, 7909, 12833, 14309, 15047, 15785, 13571, 16523, 17261, 17999, 18737, 19475 or a variant of any of these polypeptides.

56. A composition comprising the polypeptide as defined in claim 55, wherein the composition optionally comprises at least one pharmaceutically acceptable carrier or at least one artificial RNA as defined in any one of claims 1 to 28, or a composition as defined in any one of claims 29 to 54.

57. A vaccine comprising the artificial RNA as defined in any one of claims 1 to 28, the composition as defined in any one of claims 29 to 54, the polypeptide as defined in claim 55, or the composition as defined in claim 56.

58. Vaccine according to claim 49, wherein the artificial RNA as defined in any one of claims 1 to 28, the composition as defined in any one of claims 29 to 54, the polypeptide as defined in claim 55, or the composition as defined in claim 56 elicits an adaptive immune response.

59. Vaccine according to claim 57 or 58, wherein the vaccine further comprises a pharmaceutically acceptable carrier and optionally at least one adjuvant.

60. A Kit or kit of parts comprising the artificial RNA as defined in any one of claims 1 to 28, the composition as defined in any one of claims 29 to 54, the polypeptide as defined in claim 55, the composition as defined in claim 56, and/or the vaccine as defined in any one of claims 57 to 59, optionally comprising a liquid vehicle for solubilising, and optionally technical instructions providing information on administration and dosage of the components.

61. Kit or kit of parts according to claim 60 comprising at least the following components
a) at least one artificial RNA as defined in any one of claims 1 to 28 encoding at least one antigenic peptide or protein derived from a RSV fusion (F) protein, wherein said artificial RNA is preferably complexed with one or more lipids thereby forming lipid nanoparticles (LNP); and
b) at least one, two or three further artificial RNA species each encoding an antigenic peptide or protein derived from RSV selected from M, N, M2-1, or P, wherein each of said further artificial RNA species are preferably complexed with one or more lipids thereby forming lipid nanoparticles (LNP),
wherein components a) and b) are provided as separate entities or as a single entity.

62. Kit or kit of parts according to claim 60 or 61 further comprising Ringer lactate solution.

63. Artificial RNA as defined in any one of claims 1 to 28, the composition as defined in any one of claims 29 to 54, the polypeptide as defined in claim 55, the composition as defined in claim 56, the vaccine as defined in any one of claims 57 to 59, or the kit or kit of parts as defined in claim 60 to 62 for use as a medicament.

64. Artificial RNA as defined in any one of claims 1 to 28, the composition as defined in any one of claims 29 to 54, the polypeptide as defined in claim 55, the composition as defined in claim 56, the vaccine as defined in any one of claims 57 to 59, or the kit or kit of parts as defined in claim 60 to 62 for use in the treatment or prophylaxis of an infection with a virus, preferably with RSV, or a disorder related to such an infection.

65. A method of treating or preventing a disorder, wherein the method comprises applying or administering to a subject in need thereof the artificial RNA as defined in any one of claims 1 to 28, the composition as defined in any one of claims 29 to 54, the polypeptide as defined in claim 55, the composition as defined in claim 56, the vaccine as defined in any one of claims 57 to 59, or the kit or kit of parts as defined in claim 60 to 62

66. Method according to claim 65, wherein the disorder is an infection with a RSV, or a disorder related to such an infection.

67. Method according to claim 65 or 66, wherein the subject in need is a mammalian subject.

68. Method according to claim 67, wherein the mammalian subject is a human subject, preferably a newborn, a pregnant woman, a breast-feeding woman, an elderly, and/or an immunocompromised human subject

The application's sequence listing, which the Patent Office published only in electronic form, follows.

SEQUENCE LISTING (21706 sequences)

SEQ ID NO: 1 - DNA, 62 bp, Artificial Sequence
  5'-UTR of human peroxisomal multifunctional enzyme type 2 lacking the 5'-terminal oligopyrimidine tract (HSD17B4)
gtcccgcagtcggcgtccagcggctctgcttgttcgtgtgtgtgtcgttgcaggccttattc

SEQ ID NO: 2 - RNA, 62 nt, Artificial Sequence
  5'-UTR of human peroxisomal multifunctional enzyme type 2 lacking the 5'-terminal oligopyrimidine tract (HSD17B4) mRNA
gucccgcagucggcguccagcggcucugcuuguucgugugugugucguugcaggccuuauuc

SEQ ID NO: 3 - DNA, 42 bp, Artificial Sequence
  5'-UTR of human acid ceramidase lacking the 5'-terminal oligopyrimidine tract (ASAH1)
gcctctgctggagtccggggagtggcgttggctgctagagcg

SEQ ID NO: 4 - RNA, 42 nt, Artificial Sequence
  5'-UTR of human acid ceramidase lacking the 5'-terminal oligopyrimidine tract (ASAH1) mRNA
gccucugcuggaguccggggaguggcguuggcugcuagagcg

SEQ ID NO: 5 - DNA, 75 bp, Artificial Sequence
  5'-UTR of human mitochondrial ATP synthase subunit alpha lacking the 5'-terminal oligopyrimidine tract (ATP5A1)
gcggctcggccattttgtcccagtcagtccggaggctgcggctgcagaagtaccgcctgcggagtaactgcaaag

SEQ ID NO: 6 - RNA, 75 nt, Artificial Sequence
  5'-UTR of human mitochondrial ATP synthase subunit alpha lacking the 5'-terminal oligopyrimidine tract (ATP5A1) mRNA
gcggcucggccauuuugucccagucaguccggaggcugcggcugcagaaguaccgccugcggaguaacugcaaag

SEQ ID NO: 7 - DNA, 54 bp, Artificial Sequence
  5'-UTR of mouse RIKEN cDNA 2010107E04 gene (Mp68, 2010107E04Rik)
ctttcccattctgtagcagaatttggtgttgcctgtggtcttggtcccgcggag

SEQ ID NO: 8 - RNA, 54 nt, Artificial Sequence
  5'-UTR of mouse RIKEN cDNA 2010107E04 gene (Mp68, 2010107E04Rik) mRNA
cuuucccauucuguagcagaauuugguguugccuguggucuuggucccgcggag

SEQ ID NO: 9 - DNA, 81 bp, Artificial Sequence
  5'-UTR of mouse NADH dehydrogenase (ubiquinone) 1 alpha subcomplex, 4 (Ndufa4)
gtccgctcagccaggttgcagaagcggcttagcgtgtgtcctaatcttctctctgcgtgtaggtaggcctgtgccgcaaac

SEQ ID NO: 10 - RNA, 81 nt, Artificial Sequence
  5'-UTR of mouse NADH dehydrogenase (ubiquinone) 1 alpha subcomplex, 4 (Ndufa4) mRNA
guccgcucagccagguugcagaagcggcuuagcguguguccuaaucuucucucugcguguagguaggccugugccgcaaac

SEQ ID NO: 11 - DNA, 108 bp, Artificial Sequence
  5'-UTR of mouse nitric oxide synthase interacting protein (Nosip)
ctcctgtcgggcggaagtaggaggagtagagtttaaaaacagtactctttttccggttcgggacgtagttgaagcaacgacaagccggataaccgctcttgagacagg

SEQ ID NO: 12 - RNA, 108 nt, Artificial Sequence
  5'-UTR of mouse nitric oxide synthase interacting protein (Nosip) mRNA
cuccugucgggcggaaguaggaggaguagaguuuaaaaacaguacucuuuuuccgguucgggacguaguugaagcaacgacaagccggauaaccgcucuugagacagg

SEQ ID NO: 13 - DNA, 84 bp, Artificial Sequence
  5'-UTR of mouse ribosomal protein L31 (Rpl31)
cccgtgacccggaagttgtacggctacgcgactttccctcccacaaaccctcgcgcccttcctttcctacttgggcccggcaga

SEQ ID NO: 14 - RNA, 84 nt, Artificial Sequence
  5'-UTR of mouse ribosomal protein L31 (Rpl31) mRNA
cccgugacccggaaguuguacggcuacgcgacuuucccucccacaaacccucgcgcccuuccuuuccuacuugggcccggcaga

SEQ ID NO: 15 - DNA, 159 bp, Artificial Sequence
  5'-UTR of mouse solute carrier family 7 (cationic amino acid transporter, y+ system), member 3 (Slc7a3)
gggcgcttggcttgcaaggaccctgagctgcggcattgaagcacacccaacccaactcgactgaagtcagcctcactgaaccggatctgagaatcttctctctctgggcttgccagggctctccgaacctagctagcatcctcttcaattccaactaga

SEQ ID NO: 16 - RNA, 159 nt, Artificial Sequence
  5'-UTR of mouse solute carrier family 7 (cationic amino acid transporter, y+ system), member 3 (Slc7a3) mRNA
gggcgcuuggcuugcaaggacccugagcugcggcauugaagcacacccaacccaacucgacugaagucagccucacugaaccggaucugagaaucuucucucucugggcuugccagggcucuccgaaccuagcuagcauccucuucaauuccaacuaga

SEQ ID NO: 17 - DNA, 102 bp, Artificial Sequence
  5'-UTR of human tubulin beta 4B class Ivb (TUBB4B)
atataagcgttggcggagcgtcggttgtagcactctgcgcgcccgctcttctgctgctgtttgtctacttcctcctgcttccccgccgccgccgccgccatc

SEQ ID NO: 18 - RNA, 102 nt, Artificial Sequence
  5'-UTR of human tubulin beta 4B class Ivb (TUBB4B) mRNA
auauaagcguuggcggagcgucgguuguagcacucugcgcgcccgcucuucugcugcuguuugucuacuuccuccugcuuccccgccgccgccgccgccauc

SEQ ID NO: 19 - DNA, 222 bp, Artificial Sequence
  5'-UTR of mouse ubiquilin 2 (Ubqln2)
cggagacggcctgcaggacctgctctctcagccctcagccgaggcctacgccgagccgagtgcgcagccgacgaccgggaggagccgcagccttcaactctgaggtactgtgatccgcgctgcccgccgggccgccccagtccgctgctgcggcacctccttccctcgcgccctcttcgctcgccagcgccttccctgtgagcctgcgtcaccgcggccgcc

SEQ ID NO: 20 - RNA, 222 nt, Artificial Sequence
  5'-UTR of mouse ubiquilin 2 (Ubqln2)  mRNA
cggagacggccugcaggaccugcucucucagcccucagccgaggccuacgccgagccgagugcgcagccgacgaccgggaggagccgcagccuucaacucugagguacugugauccgcgcugcccgccgggccgccccaguccgcugcugcggcaccuccuucccucgcgcccucuucgcucgccagcgccuucccugugagccugcgucaccgcggccgcc

SEQ ID NO: 21 - DNA, 42 bp, Artificial Sequence
  5'-UTR of human ribosomal protein Large 32 lacking the 5'-terminal oligopyrimidine tract (RPL32, 32L4)
ggcgctgcctacggaggtggcagccatctccttctcggcatc

SEQ ID NO: 22 - RNA, 42 nt, Artificial Sequence
  5'-UTR of human ribosomal protein Large 32 lacking the 5'-terminal oligopyrimidine tract (RPL32, 32L4) mRNA
ggcgcugccuacggagguggcagccaucuccuucucggcauc

SEQ ID NO: 23 - DNA, 57 bp, Artificial Sequence
  3'-UTR of human proteasome subunit beta 3 (PSMB3)
ccctgttcccagagcccacttttttttctttttttgaaataaaatagcctgtctttc

SEQ ID NO: 24 - RNA, 57 nt, Artificial Sequence
  3'-UTR of human proteasome subunit beta 3 (PSMB3) mRNA
cccuguucccagagcccacuuuuuuuucuuuuuuugaaauaaaauagccugucuuuc

SEQ ID NO: 25 - DNA, 121 bp, Artificial Sequence
  3'-UTR of human caspase 1 (CASP1)
aataaggaaactgtatgaatgtctgtgggcaggaagtgaagagatccttctgtaaaggtttttggaattatgtctgctgaataataaacttttttgaaataataaatctggtagaaaaatg

SEQ ID NO: 26 - RNA, 121 nt, Artificial Sequence
  3'-UTR of human caspase 1 (CASP1) mRNA
aauaaggaaacuguaugaaugucugugggcaggaagugaagagauccuucuguaaagguuuuuggaauuaugucugcugaauaauaaacuuuuuugaaauaauaaaucugguagaaaaaug

SEQ ID NO: 27 - DNA, 137 bp, Artificial Sequence
  3'-UTR of human cytochrome c oxidase subunit 6B1 (COX6B1)
actggctgcatctccctttcctctgtcctccatccttctcccaggatggtgaagggggacctggtacccagtgatccccaccccaggatcctaaatcatgacttacctgctaataaaaactcattggaaaagtgaga

SEQ ID NO: 28 - RNA, 137 nt, Artificial Sequence
  3'-UTR of human cytochrome c oxidase subunit 6B1 (COX6B1) mRNA
acuggcugcaucucccuuuccucuguccuccauccuucucccaggauggugaagggggaccugguacccagugauccccaccccaggauccuaaaucaugacuuaccugcuaauaaaaacucauuggaaaagugaga

SEQ ID NO: 29 - DNA, 353 bp, Artificial Sequence
  3'-UTR of mouse GNAS (guanine nucleotide binding protein, alpha stimulating) complex locus (Gnas)
gaagggaacacccaaatttaattcagccttaagcacaattaattaagagtgaaacgtaattgtacaagcagttggtcacccaccatagggcatgatcaacaccgcaacctttcctttttcccccagtgattctgaaaaacccctcttcccttcagcttgcttagatgttccaaatttagtaagcttaaggcggcctacagaagaaaaagaaaaaaaaggccacaaaagttccctctcactttcagtaaataaaataaaagcagcaacagaaataaagaaataaatgaaattcaaaatgaaataaatattgtgttgtgcagcattaaaaaatcaataaaaattaaaaatgagca

SEQ ID NO: 30 - RNA, 353 nt, Artificial Sequence
  3'-UTR of mouse GNAS (guanine nucleotide binding protein, alpha stimulating) complex locus (Gnas) mRNA
gaagggaacacccaaauuuaauucagccuuaagcacaauuaauuaagagugaaacguaauuguacaagcaguuggucacccaccauagggcaugaucaacaccgcaaccuuuccuuuuucccccagugauucugaaaaaccccucuucccuucagcuugcuuagauguuccaaauuuaguaagcuuaaggcggccuacagaagaaaaagaaaaaaaaggccacaaaaguucccucucacuuucaguaaauaaaauaaaagcagcaacagaaauaaagaaauaaaugaaauucaaaaugaaauaaauauuguguugugcagcauuaaaaaaucaauaaaaauuaaaaaugagca

SEQ ID NO: 31 - DNA, 133 bp, Artificial Sequence
  3'-UTR of mouse NADH dehydrogenase (ubiquinone) 1 alpha subcomplex, 1 (Ndufa1)
ggaagcattttcctggctgattaaaagaaattactcagctatggtcatctgttcctgttagaaggctatgcagcatattatatactatgcgcatgttatgaaatgcataataaaaaattttaaaaaatctaaa

SEQ ID NO: 32 - RNA, 133 nt, Artificial Sequence
  3'-UTR of mouse NADH dehydrogenase (ubiquinone) 1 alpha subcomplex, 1 (Ndufa1) mRNA
ggaagcauuuuccuggcugauuaaaagaaauuacucagcuauggucaucuguuccuguuagaaggcuaugcagcauauuauauacuaugcgcauguuaugaaaugcauaauaaaaaauuuuaaaaaaucuaaa

SEQ ID NO: 33 - DNA, 70 bp, Artificial Sequence
  3'-UTR of human ribosomal protein S9 (RPS9)
gtccacctgtccctcctgggctgctggattgtctcgttttcctgccaaataaacaggatcagcgctttac

SEQ ID NO: 34 - RNA, 70 nt, Artificial Sequence
  3'-UTR of human ribosomal protein S9 (RPS9) mRNA
guccaccugucccuccugggcugcuggauugucucguuuuccugccaaauaaacaggaucagcgcuuuac

SEQ ID NO: 35 - DNA, 187 bp, Artificial Sequence
  3'-UTR ALB7
gcatcacatttaaaagcatctcagcctaccatgagaataagagaaagaaaatgaagatcaatagcttattcatctctttttctttttcgttggtgtaaagccaacaccctgtctaaaaaacataaatttctttaatcattttgcctcttttctctgtgcttcaattaataaaaaatggaaagaacct

SEQ ID NO: 36 - RNA, 187 nt, Artificial Sequence
  3'-UTR ALB7 mRNA
gcaucacauuuaaaagcaucucagccuaccaugagaauaagagaaagaaaaugaagaucaauagcuuauucaucucuuuuucuuuuucguugguguaaagccaacacccugucuaaaaaacauaaauuucuuuaaucauuuugccucuuuucucugugcuucaauuaauaaaaaauggaaagaaccu

SEQ ID NO: 37 - DNA, 44 bp, Artificial Sequence
  Center, alpha-complex-binding portion of the 3'-UTR of an alpha-globin gene (muag)
gcccgatgggcctcccaacgggccctcctcccctccttgcaccg

SEQ ID NO: 38 - RNA, 44 nt, Artificial Sequence
  Center, alpha-complex-binding portion of the 3'-UTR of an alpha-globin gene (muag) mRNA
gcccgaugggccucccaacgggcccuccuccccuccuugcaccg

SEQ ID NO: 39 - DNA, 24 bp, Artificial Sequence
  histone stem-loop sequence (histoneSL, hSL)
caaaggctcttttcagagccacca

SEQ ID NO: 40 - RNA, 24 nt, Artificial Sequence
  histone stem-loop sequence (histoneSL, hSL) mRNA
caaaggcucuuuucagagccacca

SEQ ID NO: 41 - DNA, 13 bp, Artificial Sequence
  Kozak
gccgccaccatgg

SEQ ID NO: 42 - RNA, 13 nt, Artificial Sequence
  Kozak mRNA
gccgccaccaugg

SEQ ID NO: 43 - RNA, 6 nt, Artificial Sequence
  mRNA 5'-end
gggaga

SEQ ID NO: 44 - RNA, 99 nt, Artificial Sequence
  mRNA 3'-end A75-histoneSL
aaaaaaaaaaaaaaaaaaaaaaaaaaaaaaaaaaaaaaaaaaaaaaaaaaaaaaaaaaaaaaaaaaaaaaaaaaacaaaggcucuuuucagagccacca

SEQ ID NO: 45 - RNA, 102 nt, Artificial Sequence
  mRNA 3'-end U3-A75-histoneSL
uuuaaaaaaaaaaaaaaaaaaaaaaaaaaaaaaaaaaaaaaaaaaaaaaaaaaaaaaaaaaaaaaaaaaaaaaaaaaacaaaggcucuuuucagagccacca

SEQ ID NO: 46 - RNA, 178 nt, Artificial Sequence
  mRNA 3'-end A154-histoneSL
aaaaaaaaaaaaaaaaaaaaaaaaaaaaaaaaaaaaaaaaaaaaaaaaaaaaaaaaaaaaaaaaaaaaaaaaaaaaaaaaaaaaaaaaaaaaaaaaaaaaaaaaaaaaaaaaaaaaaaaaaaaaaaaaaaaaaaaaaaaaaaaaaaaaaaaaaacaaaggcucuuuucagagccacca

SEQ ID NO: 47 - RNA, 181 nt, Artificial Sequence
  mRNA 3'-end U3-A154-histoneSL
uuuaaaaaaaaaaaaaaaaaaaaaaaaaaaaaaaaaaaaaaaaaaaaaaaaaaaaaaaaaaaaaaaaaaaaaaaaaaaaaaaaaaaaaaaaaaaaaaaaaaaaaaaaaaaaaaaaaaaaaaaaaaaaaaaaaaaaaaaaaaaaaaaaaaaaaaaaaacaaaggcucuuuucagagccacca

SEQ ID NO: 48 - RNA, 101 nt, Artificial Sequence
  mRNA 3'-end N2-A75-histoneSL
agaaaaaaaaaaaaaaaaaaaaaaaaaaaaaaaaaaaaaaaaaaaaaaaaaaaaaaaaaaaaaaaaaaaaaaaaaaacaaaggcucuuuucagagccacca

SEQ ID NO: 49 - RNA, 99 nt, Artificial Sequence
  mRNA 3'-end histoneSL-A75
caaaggcucuuuucagagccaccaaaaaaaaaaaaaaaaaaaaaaaaaaaaaaaaaaaaaaaaaaaaaaaaaaaaaaaaaaaaaaaaaaaaaaaaaaaa

SEQ ID NO: 50 - RNA, 124 nt, Artificial Sequence
  mRNA 3'-end histoneSL-A100
caaaggcucuuuucagagccaccaaaaaaaaaaaaaaaaaaaaaaaaaaaaaaaaaaaaaaaaaaaaaaaaaaaaaaaaaaaaaaaaaaaaaaaaaaaaaaaaaaaaaaaaaaaaaaaaaaaaa

SEQ ID NO: 51 - RNA, 170 nt, Artificial Sequence
  mRNA 3'-end histoneSL-A146
caaaggcucuuuucagagccaccaaaaaaaaaaaaaaaaaaaaaaaaaaaaaaaaaaaaaaaaaaaaaaaaaaaaaaaaaaaaaaaaaaaaaaaaaaaaaaaaaaaaaaaaaaaaaaaaaaaaaaaaaaaaaaaaaaaaaaaaaaaaaaaaaaaaaaaaaaaaaaaaaaa

SEQ ID NO: 52 - RNA, 136 nt, Artificial Sequence
  mRNA 3'-end N8-A64-N5-C30-histoneSL-N5
agauuaauaaaaaaaaaaaaaaaaaaaaaaaaaaaaaaaaaaaaaaaaaaaaaaaaaaaaaaaaaaaaaaaaugcaucccccccccccccccccccccccccccccccaaaggcucuuuucagagccaccagaauu

SEQ ID NO: 53 - RNA, 131 nt, Artificial Sequence
  mRNA 3'-end N8-A64-N5-C30-histoneSL
agauuaauaaaaaaaaaaaaaaaaaaaaaaaaaaaaaaaaaaaaaaaaaaaaaaaaaaaaaaaaaaaaaaaaugcaucccccccccccccccccccccccccccccccaaaggcucuuuucagagccacca

SEQ ID NO: 54 - RNA, 105 nt, Artificial Sequence
  mRNA 3'-end N8-A64-N5-C4-histoneSL
agauuaauaaaaaaaaaaaaaaaaaaaaaaaaaaaaaaaaaaaaaaaaaaaaaaaaaaaaaaaaaaaaaaaaugcaucccccaaaggcucuuuucagagccacca

SEQ ID NO: 55 - RNA, 115 nt, Artificial Sequence
  mRNA 3'-end N8-A64-N5-C14-histoneSL
agauuaauaaaaaaaaaaaaaaaaaaaaaaaaaaaaaaaaaaaaaaaaaaaaaaaaaaaaaaaaaaaaaaaaugcaucccccccccccccccaaaggcucuuuucagagccacca

SEQ ID NO: 56 - RNA, 134 nt, Artificial Sequence
  mRNA 3'-end N6-A64-N5-C30-histoneSL-N5
agaucuaaaaaaaaaaaaaaaaaaaaaaaaaaaaaaaaaaaaaaaaaaaaaaaaaaaaaaaaaaaaaaaaugcaucccccccccccccccccccccccccccccccaaaggcucuuuucagagccaccagaauu

SEQ ID NO: 57 - RNA, 129 nt, Artificial Sequence
  mRNA 3'-end N6-A64-N5-C30-histoneSL
agaucuaaaaaaaaaaaaaaaaaaaaaaaaaaaaaaaaaaaaaaaaaaaaaaaaaaaaaaaaaaaaaaaaugcaucccccccccccccccccccccccccccccccaaaggcucuuuucagagccacca

SEQ ID NO: 58 - RNA, 103 nt, Artificial Sequence
  mRNA 3'-end N6-A64-N5-C4-histoneSL
agaucuaaaaaaaaaaaaaaaaaaaaaaaaaaaaaaaaaaaaaaaaaaaaaaaaaaaaaaaaaaaaaaaaugcaucccccaaaggcucuuuucagagccacca

SEQ ID NO: 59 - RNA, 113 nt, Artificial Sequence
  mRNA 3'-end N6-A64-N5-C14-histoneSL
agaucuaaaaaaaaaaaaaaaaaaaaaaaaaaaaaaaaaaaaaaaaaaaaaaaaaaaaaaaaaaaaaaaaugcaucccccccccccccccaaaggcucuuuucagagccacca

SEQ ID NO: 60 - RNA, 128 nt, Artificial Sequence
  mRNA 3'-end A64-N5-C30-histoneSL-N5
aaaaaaaaaaaaaaaaaaaaaaaaaaaaaaaaaaaaaaaaaaaaaaaaaaaaaaaaaaaaaaaaugcaucccccccccccccccccccccccccccccccaaaggcucuuuucagagccaccagaauu

SEQ ID NO: 61 - RNA, 123 nt, Artificial Sequence
  mRNA 3'-end A64-N5-C30-histoneSL
aaaaaaaaaaaaaaaaaaaaaaaaaaaaaaaaaaaaaaaaaaaaaaaaaaaaaaaaaaaaaaaaugcaucccccccccccccccccccccccccccccccaaaggcucuuuucagagccacca

SEQ ID NO: 62 - RNA, 97 nt, Artificial Sequence
  mRNA 3'-end A64-N5-C4-histoneSL
aaaaaaaaaaaaaaaaaaaaaaaaaaaaaaaaaaaaaaaaaaaaaaaaaaaaaaaaaaaaaaaaugcaucccccaaaggcucuuuucagagccacca

SEQ ID NO: 63 - RNA, 107 nt, Artificial Sequence
  mRNA 3'-end A64-N5-C14-histoneSL
aaaaaaaaaaaaaaaaaaaaaaaaaaaaaaaaaaaaaaaaaaaaaaaaaaaaaaaaaaaaaaaaugcaucccccccccccccccaaaggcucuuuucagagccacca

SEQ ID NO: 64 - protein, 14 aa, Artificial Sequence
  derived and/or modified protein sequence (artificial) from Artificial__carrier peptide 1
CRRRRRRRRRRRRC

SEQ ID NO: 65 - protein, 13 aa, Artificial Sequence
  derived and/or modified protein sequence (artificial) from Artificial__carrier peptide 2
CRRRRRRRRRRRR

SEQ ID NO: 66 - protein, 14 aa, Artificial Sequence
  derived and/or modified protein sequence (artificial) from Artificial__carrier peptide 3
WRRRRRRRRRRRRC

SEQ ID NO: 67 - protein, 18 aa, Artificial Sequence
  derived and/or modified protein sequence (artificial) from Artificial__carrier peptide 4
CHHHHHHRRRRHHHHHHC

SEQ ID NO: 68 - protein, 574 aa, Artificial Sequence
  derived and/or modified protein sequence (artificial) from HRSV(A2)__F0
MELLILKANAITTILTAVTFCFASGQNITEEFYQSTCSAVSKGYLSALRTGWYTSVITIELSNIKENKCNGTDAKVKLIKQELDKYKNAVTELQLLMQSTPATNNRARRELPRFMNYTLNNAKKTNVTLSKKRKRRFLGFLLGVGSAIASGVAVSKVLHLEGEVNKIKSALLSTNKAVVSLSNGVSVLTSKVLDLKNYIDKQLLPIVNKQSCSISNIETVIEFQQKNNRLLEITREFSVNAGVTTPVSTYMLTNSELLSLINDMPITNDQKKLMSNNVQIVRQQSYSIMSIIKEEVLAYVVQLPLYGVIDTPCWKLHTSPLCTTNTKEGSNICLTRTDRGWYCDNAGSVSFFPQAETCKVQSNRVFCDTMNSLTLPSEVNLCNVDIFNPKYDCKIMTSKTDVSSSVITSLGAIVSCYGKTKCTASNKNRGIIKTFSNGCDYVSNKGVDTVSVGNTLYYVNKQEGKSLYVKGEPIINFYDPLVFPSDEFDASISQVNEKINQSLAFIRKSDELLHNVNAGKSTTNIMITTIIIVIIVILLSLIAVGLLLYCKARSTPVTLSKDQLSGINNIAFSN

SEQ ID NO: 69 - RNA, 1725 nt, Artificial Sequence
  derived and/or modified CDS sequence (artificial) from HRSV(A2)__F0
auggaguugcuaauccucaaagcaaaugcaauuaccacaauccucacugcagucacauuuuguuuugcuucuggucaaaacaucacugaagaauuuuaucaaucaacaugcagugcaguuagcaaaggcuaucuuagugcucugagaacugguugguauaccaguguuauaacuauagaauuaaguaauaucaaggaaaauaaguguaauggaacagaugcuaagguaaaauugauaaaacaagaauuagauaaauauaaaaaugcuguaacagaauugcaguugcucaugcaaagcacaccagcaacaaacaaucgagccagaagagaacuaccaagguuuaugaauuauacacucaacaaugccaaaaaaaccaauguaacauuaagcaagaaaaggaaaagaagauuucuugguuuuuuguuagguguuggaucugcaaucgccaguggcguugcuguaucuaagguccugcaccuagaaggggaagugaacaagaucaaaagugcucuacuauccacaaacaaggcuguagucagcuuaucaaauggaguuagugucuuaaccagcaaaguguuagaccucaaaaacuauauagauaaacaauuguuaccuauugugaacaagcaaagcugcagcauaucaaauauagaaacugugauagaguuccaacaaaagaacaacagacuacuagagauuaccagggaauuuaguguuaaugcagguguaacuacaccuguaagcacuuacauguuaacuaauagugaauuauugucauuaaucaaugauaugccuauaacaaaugaucagaaaaaguuaauguccaacaauguucaaauaguuagacagcaaaguuacucuaucauguccauaauaaaagaggaagucuuagcauauguaguacaauuaccacuauaugguguuauagauacacccuguuggaaacuacacacauccccucuauguacaaccaacacaaaagaaggguccaacaucuguuuaacaagaacugacagaggaugguacugugacaaugcaggaucaguaucuuucuucccacaagcugaaacauguaaaguucaaucaaaucgaguauuuugugacacaaugaacaguuuaacauuaccaagugaaguaaaucucugcaauguugacauauucaaccccaaauaugauuguaaaauuaugacuucaaaaacagauguaagcagcuccguuaucacaucucuaggagccauugugucaugcuauggcaaaacuaaauguacagcauccaauaaaaaucguggaaucauaaagacauuuucuaacgggugcgauuauguaucaaauaaagggguggacacugugucuguagguaacacauuauauuauguaaauaagcaagaagguaaaagucucuauguaaaaggugaaccaauaauaaauuucuaugacccauuaguauuccccucugaugaauuugaugcaucaauaucucaagucaacgagaagauuaaccagagccuagcauuuauucguaaauccgaugaauuauuacauaauguaaaugcugguaaauccaccacaaauaucaugauaacuacuauaauuauagugauuauaguaauauuguuaucauuaauugcuguuggacugcucuuauacuguaaggccagaagcacaccagucacacuaagcaaagaucaacugagugguauaaauaauauugcauuuaguaacuaa

SEQ ID NO: 70 - RNA, 1725 nt, Artificial Sequence
  derived and/or modified CDS sequence (opt1) from HRSV(A2)__F0
auggagcugcucauccugaaggccaacgccaucaccaccauccugacggcggugaccuucugcuucgccagcggccagaacaucaccgaggaguucuaccaguccaccugcagcgccgucuccaagggguaccucagcgcccugcggacgggcugguacaccuccgugaucaccaucgagcugagcaacaucaaggagaacaagugcaacgggaccgacgccaaggugaagcucaucaagcaggagcuggacaaguacaagaacgcggucacggagcugcagcuccugaugcaguccaccccggcaaccaacaaccgcgcccggcgcgagcugccccgguucaugaacuacacccucaacaacgccaagaagacgaacgugacccugagcaagaagcgcaagcggcgcuuccugggcuuccuccugggggugggcuccgccaucgcgagcggcgucgccguguccaaggugcugcaccucgagggggaggucaacaagaucaagagcgcccugcuguccaccaacaaggccguggugagccucuccaacggcgucagcgugcugaccuccaaggugcuggaccucaagaacuacaucgacaagcagcugcugcccaucgucaacaagcagagcugcuccaucagcaacaucgagacggugaucgaguuccagcagaagaacaaccggcuccuggagaucacccgcgaguucagcgugaacgccggggucaccacccccguguccacguacaugcugaccaacagcgagcuccugucccugaucaacgacaugccgaucaccaacgaccagaagaagcucaugagcaacaacgugcagaucguccggcagcaguccuacagcaucauguccaucaucaaggaggaggugcuggcguacgugguccagcugccccucuacggcgugaucgacacccccugcuggaagcugcacacgagcccccugugcaccaccaacaccaaggagggguccaacaucugccucacgcgcaccgaccggggcugguacugcgacaacgccggcagcgucuccuucuucccgcaggccgagaccugcaaggugcagagcaaccgcguguucugcgacaccaugaacucccugacgcugcccagcgagguaaaccucugcaacgucgacaucuucaaccccaaguacgacugcaagaucaugaccuccaagaccgacgugagcuccagcgugaucaccucccugggggccaucgucagcugcuacggcaagacgaagugcaccgccagcaacaagaaccgggggaucaucaagaccuucuccaacggcugcgacuacgugagcaacaagggcguggacaccguguccgucgggaacacccuguacuacgugaacaagcaggagggcaagagccucuacgugaagggggagcccaucaucaacuucuacgacccgcuggucuuccccuccgacgaguucgacgcgagcaucucccaggugaacgagaagaucaaccagagccuggccuucauccgcaaguccgacgagcugcuccacaacgugaacgccggcaagagcacgaccaacaucaugaucaccaccaucaucaucgucaucaucgugauccugcugucccucaucgccguggggcugcugcucuacugcaaggcccggagcacgcccgucacccuguccaaggaccagcugagcggcaucaacaacaucgcguucuccaacuga

SEQ ID NO: 71 - RNA, 1725 nt, Artificial Sequence
  derived and/or modified CDS sequence (opt1) from HRSV(A2)__F0
auggagcugcucauccugaaggccaacgccaucaccaccauccugacggcggugaccuucugcuucgccagcggccagaacaucaccgaggaguucuaccaguccacgugcagcgccgucuccaagggguaccucagcgcccugcgcaccggcugguacaccuccgugaucaccaucgagcugagcaacaucaaggagaacaagugcaacgggaccgacgccaaggugaagcucaucaagcaggagcuggacaaguacaagaacgcggucacggagcugcagcuccugaugcaguccacccccgccaccaacaaccgggcccgccgggagcugccgcgcuucaugaacuacacccucaacaacgccaagaagacgaacgugacccugagcaagaagcggaagcgccgguuccugggcuuccuccugggggugggcuccgcgaucgccagcggcgucgccguguccaaggugcugcaccucgagggggaggucaacaagaucaagagcgcccugcuguccaccaacaaggccguggugagccucuccaacggcgucagcgugcugaccuccaaggugcuggaccucaagaacuacaucgacaagcagcugcugcccaucgucaacaagcagagcugcuccaucagcaacaucgagacggugaucgaguuccagcagaagaacaaccgccuccuggagaucacccgggaguucagcgugaacgcgggggucaccacccccguguccacguacaugcugaccaacagcgagcuccugucccugaucaacgacaugcccaucaccaacgaccagaagaagcucaugagcaacaacgugcagaucguccgccagcaguccuacagcaucauguccaucaucaaggaggaggugcuggccuacgugguccagcugccgcucuacggcgugaucgacacccccugcuggaagcugcacacgagcccccugugcaccaccaacaccaaggagggguccaacaucugccucacgcggaccgaccgcggcugguacugcgacaacgccggcagcgucuccuucuucccccaggccgagaccugcaaggugcagagcaaccggguguucugcgacaccaugaacucccugacgcugccgagcgaggucaaccucugcaacguggacaucuucaaccccaaguacgacugcaagaucaugaccuccaagaccgacgugagcuccagcgucaucaccucccugggggccaucgugagcugcuacggcaagacgaagugcaccgcgagcaacaagaaccgcgggaucaucaagaccuucuccaacggcugcgacuacgugagcaacaagggcgucgacaccguguccguggggaacacccuguacuacgucaacaagcaggagggcaagagccucuacgugaagggggagcccaucaucaacuucuacgacccccugguguucccguccgacgaguucgacgccagcaucucccaggucaacgagaagaucaaccagagccuggccuucauccggaaguccgacgagcuccugcacaacgugaacgccggcaagagcacgaccaacaucaugaucaccaccaucaucaucgugaucaucgucauccugcugucccucaucgccguggggcugcugcucuacugcaaggcgcgcagcacgcccgugacccuguccaaggaccagcugagcggcaucaacaacaucgccuucuccaacuga

SEQ ID NO: 72 - RNA, 1725 nt, Artificial Sequence
  derived and/or modified CDS sequence (opt2) from HRSV(A2)__F0
auggagcuccucauccucaaggccaacgccaucaccaccauccucaccgccgucaccuucugcuucgccuccggccagaacaucaccgaggaguucuaccaguccaccugcuccgccgucuccaagggcuaccucuccgcccuccgcaccggcugguacaccuccgucaucaccaucgagcucuccaacaucaaggagaacaagugcaacggcaccgacgccaaggucaagcucaucaagcaggagcucgacaaguacaagaacgccgucaccgagcuccagcuccucaugcaguccacccccgccaccaacaaccgcgcccgccgcgagcucccccgcuucaugaacuacacccucaacaacgccaagaagaccaacgucacccucuccaagaagcgcaagcgccgcuuccucggcuuccuccucggcgucggcuccgccaucgccuccggcgucgccgucuccaagguccuccaccucgagggcgaggucaacaagaucaaguccgcccuccucuccaccaacaaggccgucgucucccucuccaacggcgucuccguccucaccuccaagguccucgaccucaagaacuacaucgacaagcagcuccuccccaucgucaacaagcaguccugcuccaucuccaacaucgagaccgucaucgaguuccagcagaagaacaaccgccuccucgagaucacccgcgaguucuccgucaacgccggcgucaccacccccgucuccaccuacaugcucaccaacuccgagcuccucucccucaucaacgacaugcccaucaccaacgaccagaagaagcucauguccaacaacguccagaucguccgccagcaguccuacuccaucauguccaucaucaaggaggagguccucgccuacgucguccagcucccccucuacggcgucaucgacacccccugcuggaagcuccacaccuccccccucugcaccaccaacaccaaggagggcuccaacaucugccucacccgcaccgaccgcggcugguacugcgacaacgccggcuccgucuccuucuucccccaggccgagaccugcaagguccaguccaaccgcgucuucugcgacaccaugaacucccucacccuccccuccgaggucaaccucugcaacgucgacaucuucaaccccaaguacgacugcaagaucaugaccuccaagaccgacgucuccuccuccgucaucaccucccucggcgccaucgucuccugcuacggcaagaccaagugcaccgccuccaacaagaaccgcggcaucaucaagaccuucuccaacggcugcgacuacgucuccaacaagggcgucgacaccgucuccgucggcaacacccucuacuacgucaacaagcaggagggcaagucccucuacgucaagggcgagcccaucaucaacuucuacgacccccucgucuuccccuccgacgaguucgacgccuccaucucccaggucaacgagaagaucaaccagucccucgccuucauccgcaaguccgacgagcuccuccacaacgucaacgccggcaaguccaccaccaacaucaugaucaccaccaucaucaucgucaucaucgucauccuccucucccucaucgccgucggccuccuccucuacugcaaggcccgcuccacccccgucacccucuccaaggaccagcucuccggcaucaacaacaucgccuucuccaacuga

SEQ ID NO: 73 - RNA, 1725 nt, Artificial Sequence
  derived and/or modified CDS sequence (opt3) from HRSV(A2)__F0
auggagcugcucauccuuaaggccaacgcuauuaccacaauacugacugcagugacguucugcuuugccagcggccagaauaucaccgaagaguucuaccaauccacauguucugcggucucaaaaggguauuugagugcuuuaagaacuggaugguacaccagcguuauuacaaucgaacuguccaacauuaaggagaauaaaugcaacgguaccgacgccaaggugaaacuaaucaagcaggaacucgauaaguauaaaaaugcaguaacugagcugcagcuucugaugcagucuacacccgccaccaacaauagggcucggcgcgaguugccucgauuuaugaacuacacgcucaauaacgcaaagaaaacuaaugugacccugucgaagaaacguaagagaagguuccugggcuuucucuuaggggucggaucagccauagcuagcggcguggccguuaguaaggugcugcaccuugaaggugaggucaacaaaaucaaguccgcguugcugucuacaaauaaagcagugguaagccuauccaacgggguuucagugcucacuucuaagguccuggaccuuaaaaauuauauugauaagcaacuguugccaaucgugaacaaacagagcuguucuauuuccaacaucgaaaccgugauagaguuccagcagaagaauaaccggcuccuggagauuacacgcgaauuuucagucaaugccggaguuaccacgccggugagcacuuacauguuaacaaacagugagcugcucucucuuaucaaugacaugcccauuaccaacgaucaaaagaaacugauguccaauaacguacagaucgugagacagcagagcuauucgaucaugucuauuauaaaggaagaggucuuggcuuacgugguucaacuaccucuguacggcgugaucgacacuccaugcuggaaacuccauacauccccacuguguaccacgaauaccaaggaaggcucaaacauuugccuuacaaggacugaucgggggugguauugugacaaugccggaagugucagcuucuuuccucaggcagagaccugcaaagugcaguccaaccgcguauucugugauacaaugaauagucugacuuugccaagcgagguuaaccucugcaauguggacaucuuuaaccccaaguacgauuguaagauaaugaccucaaaaacagacgucaguuccagcgugauuaccucucugggugcuaucgucucaugcuauggcaagacuaaaugcacggccaguaacaagaaucgagggaucauuaaaacauucagcaacggaugugauuacguguccaauaagggcguugacaccgugucuguagguaacacuuuauauuacgucaauaagcaagaagggaaaucgcuguaugugaagggagagccuaucauuaacuuuuacgacccccuaguuuucccgagcgaugaauuugacgcguccauaucacaggugaaugagaaaaucaaccagagucucgccuucauuagaaagucugaugaacugcuucacaaugucaacgcaggcaaaagcaccacaaauaucaugaucaccacuauuauaaucgugauuaucguaauuuugcugucccucaucgcugugggccugcuucuguacugcaaggccaggucaacacccguuacguugagcaaggaccagcucucugggauaaacaauaucgcuuucuccaacuga

SEQ ID NO: 74 - RNA, 1725 nt, Artificial Sequence
  derived and/or modified CDS sequence (opt4) from HRSV(A2)__F0
auggagcugcugauccugaaggccaacgccaucaccaccauccugaccgccgugaccuucugcuucgccagcggccagaacaucaccgaggaguucuaccagagcaccugcagcgccgugagcaagggcuaccugagcgcccugagaaccggcugguacaccagcgugaucaccaucgagcugagcaacaucaaggagaacaagugcaacggcaccgacgccaaggugaagcugaucaagcaggagcuggacaaguacaagaacgccgugaccgagcugcagcugcugaugcagagcacccccgccaccaacaacagagccagaagagagcugcccagauucaugaacuacacccugaacaacgccaagaagaccaacgugacccugagcaagaagagaaagagaagauuccugggcuuccugcugggcgugggcagcgccaucgccagcggcguggccgugagcaaggugcugcaccuggagggcgaggugaacaagaucaagagcgcccugcugagcaccaacaaggccguggugagccugagcaacggcgugagcgugcugaccagcaaggugcuggaccugaagaacuacaucgacaagcagcugcugcccaucgugaacaagcagagcugcagcaucagcaacaucgagaccgugaucgaguuccagcagaagaacaacagacugcuggagaucaccagagaguucagcgugaacgccggcgugaccacccccgugagcaccuacaugcugaccaacagcgagcugcugagccugaucaacgacaugcccaucaccaacgaccagaagaagcugaugagcaacaacgugcagaucgugagacagcagagcuacagcaucaugagcaucaucaaggaggaggugcuggccuacguggugcagcugccccuguacggcgugaucgacacccccugcuggaagcugcacaccagcccccugugcaccaccaacaccaaggagggcagcaacaucugccugaccagaaccgacagaggcugguacugcgacaacgccggcagcgugagcuucuucccccaggccgagaccugcaaggugcagagcaacagaguguucugcgacaccaugaacagccugacccugcccagcgaggugaaccugugcaacguggacaucuucaaccccaaguacgacugcaagaucaugaccagcaagaccgacgugagcagcagcgugaucaccagccugggcgccaucgugagcugcuacggcaagaccaagugcaccgccagcaacaagaacagaggcaucaucaagaccuucagcaacggcugcgacuacgugagcaacaagggcguggacaccgugagcgugggcaacacccuguacuacgugaacaagcaggagggcaagagccuguacgugaagggcgagcccaucaucaacuucuacgacccccugguguuccccagcgacgaguucgacgccagcaucagccaggugaacgagaagaucaaccagagccuggccuucaucagaaagagcgacgagcugcugcacaacgugaacgccggcaagagcaccaccaacaucaugaucaccaccaucaucaucgugaucaucgugauccugcugagccugaucgccgugggccugcugcuguacugcaaggccagaagcacccccgugacccugagcaaggaccagcugagcggcaucaacaacaucgccuucagcaacuga

SEQ ID NO: 75 - RNA, 1725 nt, Artificial Sequence
  derived and/or modified CDS sequence (opt5) from HRSV(A2)__F0
auggagcugcucauccugaaggccaacgcuauuaccacaauccuuacggccgugaccuucugcuuugcgagcggccagaauauuacagaagaguucuaccaauccaccuguucugcugucagcaaaggguaucuguccgcccucagaacaggaugguacaccucuguuaucacaauugaacugagcaacaucaaggagaauaaaugcaacggcaccgacgccaaggugaaacuuaucaagcaggaacuggauaaguauaaaaaugcugugacggagcuccagcugcugaugcaguccacccccgccacaaacaaucgggcucgcagagagcucccucgguuuaugaacuacacccugaauaacgccaagaaaacaaaugucacccuuucuaagaaacgcaagagacgguuccugggguuucuccugggagugggcagcgcgauugccuccgggguugcugugagcaagguccuucaccuggaaggagaggugaacaaaaucaagucugcccuccuguccacgaauaaagcuguugugagccugucuaacggcgucuccgugcucacaagcaaggugcuggaccuuaaaaauuauauugauaagcaacugcucccgaucgucaacaaacagucuuguuccauuagcaacaucgaaaccguuauugaguuccagcagaagaauaaccgccugcuugagaucacaagagaauuuuccgugaaugccggcgugaccacccccgucucuacauacaugcugacgaacagcgagcuccugucccugaucaaugacaugccuauuaccaacgaucaaaagaaacucaugagcaauaacgugcagaucguucggcagcagucuuauuccauuaugagcaucauuaaggaagaggugcuggcguacgucgugcaacuuccccuguacgggguuaucgacacaccuugcuggaaacuccauaccucuccccuguguacaaccaauacgaaggaaggaagcaacaucugccuuacacgcaccgauagaggcugguauugugacaaugccggguccgugucuuucuuuccucaggcugagaccugcaaaguccagagcaaccggguguucugugauacaaugaacucccugacccucccgagcgaggucaaucugugcaauguggacauuuuuaaccccaaguacgauuguaagaucaugacaucuaaaacggacguuuccagcucugugauuaccucccugggagccaucgucagcugcuauggcaagacaaaaugcaccgcuuccaacaagaaucgcgggauuaucaaaacauucucuaacggaugugauuacgugagcaauaagggcguugacaccguguccgucggcaacacgcucuauuacgugaauaagcaagaagggaaaucucuguaugugaagggagagccuaucauuaacuuuuacgacccccuuguuuucccuagcgaugaauuugacgccuccaucagccaggucaaugagaaaauuaaccagucucuggccuucaucagaaaguccgaugaacuccugcacaaugugaacgcuggcaaaagcaccacaaauauuaugaucaccacaauuaucaucgugauuaucgucauucugcuuucucucaucgcgguggggcugcugcucuacugcaaggcccgguccacccccguuacgcugagcaaggaccagcuuucuggaauuaacaauaucgcuuucagcaacuga

SEQ ID NO: 76 - RNA, 1725 nt, Artificial Sequence
  derived and/or modified CDS sequence (opt6) from HRSV(A2)__F0
auggaacuucuaauauuaaaagcuaacgcaaucacuacuaucuuaaccgcaguaacauucuguuuugcauccggccaaaacauaacagaagaauuuuaccaaucaacuugcucugcagucucaaaagguuaucuaucugcauuaagaacaggcugguacaccucaguaauaacgaucgaacuaucaaacaucaaagaaaacaaauguaauggaacagacgcaaaaguaaaacuaaucaaacaagaacuagacaaauacaaaaacgcaguaaccgaacuccaacuccucaugcaaaguacaccagcaacaaauaacagagcaagacgugaacuaccacguuuuaugaauuacacgcucaauaacgcaaaaaaaacaaauguuacccuaucaaaaaaacgaaaaagaagauuccucggauuccuacuaggcguaggcucagcaauagcuucaggaguagcaguaucaaaaguacuccaccucgaaggagaaguaaacaaaaucaaaagcgcucuccucucaacaaacaaagcaguuguuucacucucaaacggaguaucaguacuaaccucaaaaguacuugaccuaaaaaauuauauagacaaacaacuauuaccaauaguaaacaaacaaagcugcuccaucuccaacaucgagacagucauagaauuucaacaaaaaaauaaccgccuauuagaaauaaccagagaauuuucaguaaacgcaggaguaacuaccccaguaucaacauauauguuaacaaacucagaacuccuaagucuaaucaacgacaugccaauaaccaacgaccaaaaaaaacuaaugagcaacaauguacaaauaguucgucaacaaucuuacuccauaaugucuauaauaaaagaagaaguacucgccuauguaguccaacuaccacuauacggagucaucgauacaccaugcuggaaacuccacacauccccacucuguacuacuaacaccaaagaagguucaaauauaugccuaaccagaacagauagagguugguacugcgauaaugcaggaucaguauccuuuuucccccaagccgaaacaugcaaaguucaauccaauagaguauuuugugauacaaugaacucuuuaacccucccauccgaagucaaucuauguaacgucgacauauuuaacccaaaauacgauugcaaaauaaugacaucaaaaacagacgucucauccucaguuauaacguccuuaggcgcuauaguaucaugcuacggcaaaacaaaauguacagcaucaaacaaaaacagaggaaucauaaaaacuuucucuaacgguugcgacuauguauccaacaaaggugucgacacaguauccguaggcaacacccuuuacuauguuaauaaacaagaaggaaaaucucuauauguaaaaggcgaaccaauuauaaauuuuuacgacccccuugucuuucccucugacgaauuugacgcuuccauaucacaagucaacgaaaaaaucaaccaaucccucgcauucauacgcaaaucagacgaacuacuacauaacgucaacgcaggcaaauccacaacaaacauaaugauaaccacaaucauaauuguaauaauaguaauacuacuuucucuaauagcagucggauuacucuuauacuguaaagcucgaucaacaccagucacccucucuaaagaucaacuauccggaaucaacaacauagcuuucucaaacuaa

SEQ ID NO: 77 - RNA, 1725 nt, Artificial Sequence
  derived and/or modified CDS sequence (opt11) from HRSV(A2)__F0
auggaacuccucauacucaaagccaacgcaaucacaaccauacucaccgccgucaccuucugcuuugcaucuggccagaacaucacugaagaguucuaccaauccacaugcuccgccguaagcaaaggcuaccuauccgcccuacgcaccggcugguacaccagcguaaucaccauagaacucuccaauauaaaagaaaacaaaugcaacggcaccgacgcaaaagucaagcuaauaaaacaagaacucgacaaauacaaaaacgccguuaccgaacuccagcuacucaugcaaucgaccccagcaaccaacaaccgugcgagacgcgaacucccccgcuucaugaacuacacccuaaacaacgccaaaaagaccaacguaacucuauccaagaaacgcaaacgccgcuuccucggauuccuccucggcgucggcuccgcaaucgccagcggcgucgccguuagcaaaguccuucaccucgaaggagaaguaaacaaaauuaaaagcgcccucuuauccacaaacaaggccguaguaucccugucaaacggcgucuccguccuuacauccaaaguccucgaccucaagaacuacauagacaaacagcuacuacccauuguaaauaaacaaagcugcucaauuagcaacaucgaaaccguaaucgaguuccagcagaaaaacaacagacuucucgaaaucacccgcgaguucagcgucaacgccggcguaaccaccccugucucaacauacaugcuaaccaacagcgaacugcucucccucaucaacgacaugcccaucaccaacgaccaaaagaaacucaugagcaacaacguacaaaucgugcgccaacaguccuacucaauaaugucaaucaucaaagaagaagugcuagcauacgucguacaacuaccacucuacggcguaauagauacccccugcuggaagcuccauaccuccccacucuguaccaccaacaccaaagaaggcucaaacaucugccuaacgcgcacagaccguggaugguacugugacaacgccggcuccgucuccuucuucccucaagccgaaacaugcaaaguccaauccaacagagucuucugcgauaccaugaacucccugacacucccaagcgaagucaaccuuugcaacgucgauaucuuuaaccccaaauacgacugcaagaucaugacaucaaaaaccgacguauccuccucuguaauaaccucccuaggcgcaaucguaucaugcuacggcaaaaccaaauguaccgccuccaacaaaaaucgcggcaucaucaaaaccuucucgaacggcugcgacuacgucuccaacaaaggcguagacacaguuuccguaggcaacacccucuacuacgucaauaaacaggaaggcaagucccucuacgucaaaggcgaacccaucaucaauuucuacgacccccucguuuuccccuccgaugaguucgacgcaagcaucagccaggucaacgaaaagauaaaccagucccucgccuucauccgcaaaucagaugaacuccuucacaacguuaacgcaggcaagagcaccaccaacaucaugaucacaacuauaaucaucgucauaaucgucauccuacucucacuaaucgccgucggucuccuacuauauuguaaagcccgaucaacaccggucacacucuccaaagaccaacucuccggaaucaacaauaucgcuuucucgaacuaa

SEQ ID NO: 78 - RNA, 2001 nt, Artificial Sequence
  mRNA product Design a-1 comprising derived and/or modified sequence from HRSV(A2)__F0 (artificial)
gggagagucccgcagucggcguccagcggcucugcuuguucgugugugugucguugcaggccuuauucaagcuuaccauggaguugcuaauccucaaagcaaaugcaauuaccacaauccucacugcagucacauuuuguuuugcuucuggucaaaacaucacugaagaauuuuaucaaucaacaugcagugcaguuagcaaaggcuaucuuagugcucugagaacugguugguauaccaguguuauaacuauagaauuaaguaauaucaaggaaaauaaguguaauggaacagaugcuaagguaaaauugauaaaacaagaauuagauaaauauaaaaaugcuguaacagaauugcaguugcucaugcaaagcacaccagcaacaaacaaucgagccagaagagaacuaccaagguuuaugaauuauacacucaacaaugccaaaaaaaccaauguaacauuaagcaagaaaaggaaaagaagauuucuugguuuuuuguuagguguuggaucugcaaucgccaguggcguugcuguaucuaagguccugcaccuagaaggggaagugaacaagaucaaaagugcucuacuauccacaaacaaggcuguagucagcuuaucaaauggaguuagugucuuaaccagcaaaguguuagaccucaaaaacuauauagauaaacaauuguuaccuauugugaacaagcaaagcugcagcauaucaaauauagaaacugugauagaguuccaacaaaagaacaacagacuacuagagauuaccagggaauuuaguguuaaugcagguguaacuacaccuguaagcacuuacauguuaacuaauagugaauuauugucauuaaucaaugauaugccuauaacaaaugaucagaaaaaguuaauguccaacaauguucaaauaguuagacagcaaaguuacucuaucauguccauaauaaaagaggaagucuuagcauauguaguacaauuaccacuauaugguguuauagauacacccuguuggaaacuacacacauccccucuauguacaaccaacacaaaagaaggguccaacaucuguuuaacaagaacugacagaggaugguacugugacaaugcaggaucaguaucuuucuucccacaagcugaaacauguaaaguucaaucaaaucgaguauuuugugacacaaugaacaguuuaacauuaccaagugaaguaaaucucugcaauguugacauauucaaccccaaauaugauuguaaaauuaugacuucaaaaacagauguaagcagcuccguuaucacaucucuaggagccauugugucaugcuauggcaaaacuaaauguacagcauccaauaaaaaucguggaaucauaaagacauuuucuaacgggugcgauuauguaucaaauaaagggguggacacugugucuguagguaacacauuauauuauguaaauaagcaagaagguaaaagucucuauguaaaaggugaaccaauaauaaauuucuaugacccauuaguauuccccucugaugaauuugaugcaucaauaucucaagucaacgagaagauuaaccagagccuagcauuuauucguaaauccgaugaauuauuacauaauguaaaugcugguaaauccaccacaaauaucaugauaacuacuauaauuauagugauuauaguaauauuguuaucauuaauugcuguuggacugcucuuauacuguaaggccagaagcacaccagucacacuaagcaaagaucaacugagugguauaaauaauauugcauuuaguaacuaaggacuagucccuguucccagagcccacuuuuuuuucuuuuuuugaaauaaaauagccugucuuucagaucuaaaaaaaaaaaaaaaaaaaaaaaaaaaaaaaaaaaaaaaaaaaaaaaaaaaaaaaaaaaaaaaaugcaucccccccccccccccccccccccccccccccaaaggcucuuuucagagccaccagaauu

SEQ ID NO: 79 - RNA, 2001 nt, Artificial Sequence
  mRNA product Design a-1 comprising derived and/or modified sequence from HRSV(A2)__F0 (opt1)
gggagagucccgcagucggcguccagcggcucugcuuguucgugugugugucguugcaggccuuauucaagcuuaccauggagcugcucauccugaaggccaacgccaucaccaccauccugacggcggugaccuucugcuucgccagcggccagaacaucaccgaggaguucuaccaguccaccugcagcgccgucuccaagggguaccucagcgcccugcggacgggcugguacaccuccgugaucaccaucgagcugagcaacaucaaggagaacaagugcaacgggaccgacgccaaggugaagcucaucaagcaggagcuggacaaguacaagaacgcggucacggagcugcagcuccugaugcaguccaccccggcaaccaacaaccgcgcccggcgcgagcugccccgguucaugaacuacacccucaacaacgccaagaagacgaacgugacccugagcaagaagcgcaagcggcgcuuccugggcuuccuccugggggugggcuccgccaucgcgagcggcgucgccguguccaaggugcugcaccucgagggggaggucaacaagaucaagagcgcccugcuguccaccaacaaggccguggugagccucuccaacggcgucagcgugcugaccuccaaggugcuggaccucaagaacuacaucgacaagcagcugcugcccaucgucaacaagcagagcugcuccaucagcaacaucgagacggugaucgaguuccagcagaagaacaaccggcuccuggagaucacccgcgaguucagcgugaacgccggggucaccacccccguguccacguacaugcugaccaacagcgagcuccugucccugaucaacgacaugccgaucaccaacgaccagaagaagcucaugagcaacaacgugcagaucguccggcagcaguccuacagcaucauguccaucaucaaggaggaggugcuggcguacgugguccagcugccccucuacggcgugaucgacacccccugcuggaagcugcacacgagcccccugugcaccaccaacaccaaggagggguccaacaucugccucacgcgcaccgaccggggcugguacugcgacaacgccggcagcgucuccuucuucccgcaggccgagaccugcaaggugcagagcaaccgcguguucugcgacaccaugaacucccugacgcugcccagcgagguaaaccucugcaacgucgacaucuucaaccccaaguacgacugcaagaucaugaccuccaagaccgacgugagcuccagcgugaucaccucccugggggccaucgucagcugcuacggcaagacgaagugcaccgccagcaacaagaaccgggggaucaucaagaccuucuccaacggcugcgacuacgugagcaacaagggcguggacaccguguccgucgggaacacccuguacuacgugaacaagcaggagggcaagagccucuacgugaagggggagcccaucaucaacuucuacgacccgcuggucuuccccuccgacgaguucgacgcgagcaucucccaggugaacgagaagaucaaccagagccuggccuucauccgcaaguccgacgagcugcuccacaacgugaacgccggcaagagcacgaccaacaucaugaucaccaccaucaucaucgucaucaucgugauccugcugucccucaucgccguggggcugcugcucuacugcaaggcccggagcacgcccgucacccuguccaaggaccagcugagcggcaucaacaacaucgcguucuccaacugaggacuagucccuguucccagagcccacuuuuuuuucuuuuuuugaaauaaaauagccugucuuucagaucuaaaaaaaaaaaaaaaaaaaaaaaaaaaaaaaaaaaaaaaaaaaaaaaaaaaaaaaaaaaaaaaaugcaucccccccccccccccccccccccccccccccaaaggcucuuuucagagccaccagaauu

SEQ ID NO: 80 - RNA, 2001 nt, Artificial Sequence
  mRNA product Design a-1 comprising derived and/or modified sequence from HRSV(A2)__F0 (opt1)
gggagagucccgcagucggcguccagcggcucugcuuguucgugugugugucguugcaggccuuauucaagcuuaccauggagcugcucauccugaaggccaacgccaucaccaccauccugacggcggugaccuucugcuucgccagcggccagaacaucaccgaggaguucuaccaguccacgugcagcgccgucuccaagggguaccucagcgcccugcgcaccggcugguacaccuccgugaucaccaucgagcugagcaacaucaaggagaacaagugcaacgggaccgacgccaaggugaagcucaucaagcaggagcuggacaaguacaagaacgcggucacggagcugcagcuccugaugcaguccacccccgccaccaacaaccgggcccgccgggagcugccgcgcuucaugaacuacacccucaacaacgccaagaagacgaacgugacccugagcaagaagcggaagcgccgguuccugggcuuccuccugggggugggcuccgcgaucgccagcggcgucgccguguccaaggugcugcaccucgagggggaggucaacaagaucaagagcgcccugcuguccaccaacaaggccguggugagccucuccaacggcgucagcgugcugaccuccaaggugcuggaccucaagaacuacaucgacaagcagcugcugcccaucgucaacaagcagagcugcuccaucagcaacaucgagacggugaucgaguuccagcagaagaacaaccgccuccuggagaucacccgggaguucagcgugaacgcgggggucaccacccccguguccacguacaugcugaccaacagcgagcuccugucccugaucaacgacaugcccaucaccaacgaccagaagaagcucaugagcaacaacgugcagaucguccgccagcaguccuacagcaucauguccaucaucaaggaggaggugcuggccuacgugguccagcugccgcucuacggcgugaucgacacccccugcuggaagcugcacacgagcccccugugcaccaccaacaccaaggagggguccaacaucugccucacgcggaccgaccgcggcugguacugcgacaacgccggcagcgucuccuucuucccccaggccgagaccugcaaggugcagagcaaccggguguucugcgacaccaugaacucccugacgcugccgagcgaggucaaccucugcaacguggacaucuucaaccccaaguacgacugcaagaucaugaccuccaagaccgacgugagcuccagcgucaucaccucccugggggccaucgugagcugcuacggcaagacgaagugcaccgcgagcaacaagaaccgcgggaucaucaagaccuucuccaacggcugcgacuacgugagcaacaagggcgucgacaccguguccguggggaacacccuguacuacgucaacaagcaggagggcaagagccucuacgugaagggggagcccaucaucaacuucuacgacccccugguguucccguccgacgaguucgacgccagcaucucccaggucaacgagaagaucaaccagagccuggccuucauccggaaguccgacgagcuccugcacaacgugaacgccggcaagagcacgaccaacaucaugaucaccaccaucaucaucgugaucaucgucauccugcugucccucaucgccguggggcugcugcucuacugcaaggcgcgcagcacgcccgugacccuguccaaggaccagcugagcggcaucaacaacaucgccuucuccaacugaggacuagucccuguucccagagcccacuuuuuuuucuuuuuuugaaauaaaauagccugucuuucagaucuaaaaaaaaaaaaaaaaaaaaaaaaaaaaaaaaaaaaaaaaaaaaaaaaaaaaaaaaaaaaaaaaugcaucccccccccccccccccccccccccccccccaaaggcucuuuucagagccaccagaauu

SEQ ID NO: 81 - RNA, 2001 nt, Artificial Sequence
  mRNA product Design a-1 comprising derived and/or modified sequence from HRSV(A2)__F0 (opt2)
gggagagucccgcagucggcguccagcggcucugcuuguucgugugugugucguugcaggccuuauucaagcuuaccauggagcuccucauccucaaggccaacgccaucaccaccauccucaccgccgucaccuucugcuucgccuccggccagaacaucaccgaggaguucuaccaguccaccugcuccgccgucuccaagggcuaccucuccgcccuccgcaccggcugguacaccuccgucaucaccaucgagcucuccaacaucaaggagaacaagugcaacggcaccgacgccaaggucaagcucaucaagcaggagcucgacaaguacaagaacgccgucaccgagcuccagcuccucaugcaguccacccccgccaccaacaaccgcgcccgccgcgagcucccccgcuucaugaacuacacccucaacaacgccaagaagaccaacgucacccucuccaagaagcgcaagcgccgcuuccucggcuuccuccucggcgucggcuccgccaucgccuccggcgucgccgucuccaagguccuccaccucgagggcgaggucaacaagaucaaguccgcccuccucuccaccaacaaggccgucgucucccucuccaacggcgucuccguccucaccuccaagguccucgaccucaagaacuacaucgacaagcagcuccuccccaucgucaacaagcaguccugcuccaucuccaacaucgagaccgucaucgaguuccagcagaagaacaaccgccuccucgagaucacccgcgaguucuccgucaacgccggcgucaccacccccgucuccaccuacaugcucaccaacuccgagcuccucucccucaucaacgacaugcccaucaccaacgaccagaagaagcucauguccaacaacguccagaucguccgccagcaguccuacuccaucauguccaucaucaaggaggagguccucgccuacgucguccagcucccccucuacggcgucaucgacacccccugcuggaagcuccacaccuccccccucugcaccaccaacaccaaggagggcuccaacaucugccucacccgcaccgaccgcggcugguacugcgacaacgccggcuccgucuccuucuucccccaggccgagaccugcaagguccaguccaaccgcgucuucugcgacaccaugaacucccucacccuccccuccgaggucaaccucugcaacgucgacaucuucaaccccaaguacgacugcaagaucaugaccuccaagaccgacgucuccuccuccgucaucaccucccucggcgccaucgucuccugcuacggcaagaccaagugcaccgccuccaacaagaaccgcggcaucaucaagaccuucuccaacggcugcgacuacgucuccaacaagggcgucgacaccgucuccgucggcaacacccucuacuacgucaacaagcaggagggcaagucccucuacgucaagggcgagcccaucaucaacuucuacgacccccucgucuuccccuccgacgaguucgacgccuccaucucccaggucaacgagaagaucaaccagucccucgccuucauccgcaaguccgacgagcuccuccacaacgucaacgccggcaaguccaccaccaacaucaugaucaccaccaucaucaucgucaucaucgucauccuccucucccucaucgccgucggccuccuccucuacugcaaggcccgcuccacccccgucacccucuccaaggaccagcucuccggcaucaacaacaucgccuucuccaacugaggacuagucccuguucccagagcccacuuuuuuuucuuuuuuugaaauaaaauagccugucuuucagaucuaaaaaaaaaaaaaaaaaaaaaaaaaaaaaaaaaaaaaaaaaaaaaaaaaaaaaaaaaaaaaaaaugcaucccccccccccccccccccccccccccccccaaaggcucuuuucagagccaccagaauu

SEQ ID NO: 82 - RNA, 2001 nt, Artificial Sequence
  mRNA product Design a-1 comprising derived and/or modified sequence from HRSV(A2)__F0 (opt3)
gggagagucccgcagucggcguccagcggcucugcuuguucgugugugugucguugcaggccuuauucaagcuuaccauggagcugcucauccuuaaggccaacgcuauuaccacaauacugacugcagugacguucugcuuugccagcggccagaauaucaccgaagaguucuaccaauccacauguucugcggucucaaaaggguauuugagugcuuuaagaacuggaugguacaccagcguuauuacaaucgaacuguccaacauuaaggagaauaaaugcaacgguaccgacgccaaggugaaacuaaucaagcaggaacucgauaaguauaaaaaugcaguaacugagcugcagcuucugaugcagucuacacccgccaccaacaauagggcucggcgcgaguugccucgauuuaugaacuacacgcucaauaacgcaaagaaaacuaaugugacccugucgaagaaacguaagagaagguuccugggcuuucucuuaggggucggaucagccauagcuagcggcguggccguuaguaaggugcugcaccuugaaggugaggucaacaaaaucaaguccgcguugcugucuacaaauaaagcagugguaagccuauccaacgggguuucagugcucacuucuaagguccuggaccuuaaaaauuauauugauaagcaacuguugccaaucgugaacaaacagagcuguucuauuuccaacaucgaaaccgugauagaguuccagcagaagaauaaccggcuccuggagauuacacgcgaauuuucagucaaugccggaguuaccacgccggugagcacuuacauguuaacaaacagugagcugcucucucuuaucaaugacaugcccauuaccaacgaucaaaagaaacugauguccaauaacguacagaucgugagacagcagagcuauucgaucaugucuauuauaaaggaagaggucuuggcuuacgugguucaacuaccucuguacggcgugaucgacacuccaugcuggaaacuccauacauccccacuguguaccacgaauaccaaggaaggcucaaacauuugccuuacaaggacugaucgggggugguauugugacaaugccggaagugucagcuucuuuccucaggcagagaccugcaaagugcaguccaaccgcguauucugugauacaaugaauagucugacuuugccaagcgagguuaaccucugcaauguggacaucuuuaaccccaaguacgauuguaagauaaugaccucaaaaacagacgucaguuccagcgugauuaccucucugggugcuaucgucucaugcuauggcaagacuaaaugcacggccaguaacaagaaucgagggaucauuaaaacauucagcaacggaugugauuacguguccaauaagggcguugacaccgugucuguagguaacacuuuauauuacgucaauaagcaagaagggaaaucgcuguaugugaagggagagccuaucauuaacuuuuacgacccccuaguuuucccgagcgaugaauuugacgcguccauaucacaggugaaugagaaaaucaaccagagucucgccuucauuagaaagucugaugaacugcuucacaaugucaacgcaggcaaaagcaccacaaauaucaugaucaccacuauuauaaucgugauuaucguaauuuugcugucccucaucgcugugggccugcuucuguacugcaaggccaggucaacacccguuacguugagcaaggaccagcucucugggauaaacaauaucgcuuucuccaacugaggacuagucccuguucccagagcccacuuuuuuuucuuuuuuugaaauaaaauagccugucuuucagaucuaaaaaaaaaaaaaaaaaaaaaaaaaaaaaaaaaaaaaaaaaaaaaaaaaaaaaaaaaaaaaaaaugcaucccccccccccccccccccccccccccccccaaaggcucuuuucagagccaccagaauu

SEQ ID NO: 83 - RNA, 2001 nt, Artificial Sequence
  mRNA product Design a-1 comprising derived and/or modified sequence from HRSV(A2)__F0 (opt4)
gggagagucccgcagucggcguccagcggcucugcuuguucgugugugugucguugcaggccuuauucaagcuuaccauggagcugcugauccugaaggccaacgccaucaccaccauccugaccgccgugaccuucugcuucgccagcggccagaacaucaccgaggaguucuaccagagcaccugcagcgccgugagcaagggcuaccugagcgcccugagaaccggcugguacaccagcgugaucaccaucgagcugagcaacaucaaggagaacaagugcaacggcaccgacgccaaggugaagcugaucaagcaggagcuggacaaguacaagaacgccgugaccgagcugcagcugcugaugcagagcacccccgccaccaacaacagagccagaagagagcugcccagauucaugaacuacacccugaacaacgccaagaagaccaacgugacccugagcaagaagagaaagagaagauuccugggcuuccugcugggcgugggcagcgccaucgccagcggcguggccgugagcaaggugcugcaccuggagggcgaggugaacaagaucaagagcgcccugcugagcaccaacaaggccguggugagccugagcaacggcgugagcgugcugaccagcaaggugcuggaccugaagaacuacaucgacaagcagcugcugcccaucgugaacaagcagagcugcagcaucagcaacaucgagaccgugaucgaguuccagcagaagaacaacagacugcuggagaucaccagagaguucagcgugaacgccggcgugaccacccccgugagcaccuacaugcugaccaacagcgagcugcugagccugaucaacgacaugcccaucaccaacgaccagaagaagcugaugagcaacaacgugcagaucgugagacagcagagcuacagcaucaugagcaucaucaaggaggaggugcuggccuacguggugcagcugccccuguacggcgugaucgacacccccugcuggaagcugcacaccagcccccugugcaccaccaacaccaaggagggcagcaacaucugccugaccagaaccgacagaggcugguacugcgacaacgccggcagcgugagcuucuucccccaggccgagaccugcaaggugcagagcaacagaguguucugcgacaccaugaacagccugacccugcccagcgaggugaaccugugcaacguggacaucuucaaccccaaguacgacugcaagaucaugaccagcaagaccgacgugagcagcagcgugaucaccagccugggcgccaucgugagcugcuacggcaagaccaagugcaccgccagcaacaagaacagaggcaucaucaagaccuucagcaacggcugcgacuacgugagcaacaagggcguggacaccgugagcgugggcaacacccuguacuacgugaacaagcaggagggcaagagccuguacgugaagggcgagcccaucaucaacuucuacgacccccugguguuccccagcgacgaguucgacgccagcaucagccaggugaacgagaagaucaaccagagccuggccuucaucagaaagagcgacgagcugcugcacaacgugaacgccggcaagagcaccaccaacaucaugaucaccaccaucaucaucgugaucaucgugauccugcugagccugaucgccgugggccugcugcuguacugcaaggccagaagcacccccgugacccugagcaaggaccagcugagcggcaucaacaacaucgccuucagcaacugaggacuagucccuguucccagagcccacuuuuuuuucuuuuuuugaaauaaaauagccugucuuucagaucuaaaaaaaaaaaaaaaaaaaaaaaaaaaaaaaaaaaaaaaaaaaaaaaaaaaaaaaaaaaaaaaaugcaucccccccccccccccccccccccccccccccaaaggcucuuuucagagccaccagaauu

SEQ ID NO: 84 - RNA, 2001 nt, Artificial Sequence
  mRNA product Design a-1 comprising derived and/or modified sequence from HRSV(A2)__F0 (opt5)
gggagagucccgcagucggcguccagcggcucugcuuguucgugugugugucguugcaggccuuauucaagcuuaccauggagcugcucauccugaaggccaacgcuauuaccacaauccuuacggccgugaccuucugcuuugcgagcggccagaauauuacagaagaguucuaccaauccaccuguucugcugucagcaaaggguaucuguccgcccucagaacaggaugguacaccucuguuaucacaauugaacugagcaacaucaaggagaauaaaugcaacggcaccgacgccaaggugaaacuuaucaagcaggaacuggauaaguauaaaaaugcugugacggagcuccagcugcugaugcaguccacccccgccacaaacaaucgggcucgcagagagcucccucgguuuaugaacuacacccugaauaacgccaagaaaacaaaugucacccuuucuaagaaacgcaagagacgguuccugggguuucuccugggagugggcagcgcgauugccuccgggguugcugugagcaagguccuucaccuggaaggagaggugaacaaaaucaagucugcccuccuguccacgaauaaagcuguugugagccugucuaacggcgucuccgugcucacaagcaaggugcuggaccuuaaaaauuauauugauaagcaacugcucccgaucgucaacaaacagucuuguuccauuagcaacaucgaaaccguuauugaguuccagcagaagaauaaccgccugcuugagaucacaagagaauuuuccgugaaugccggcgugaccacccccgucucuacauacaugcugacgaacagcgagcuccugucccugaucaaugacaugccuauuaccaacgaucaaaagaaacucaugagcaauaacgugcagaucguucggcagcagucuuauuccauuaugagcaucauuaaggaagaggugcuggcguacgucgugcaacuuccccuguacgggguuaucgacacaccuugcuggaaacuccauaccucuccccuguguacaaccaauacgaaggaaggaagcaacaucugccuuacacgcaccgauagaggcugguauugugacaaugccggguccgugucuuucuuuccucaggcugagaccugcaaaguccagagcaaccggguguucugugauacaaugaacucccugacccucccgagcgaggucaaucugugcaauguggacauuuuuaaccccaaguacgauuguaagaucaugacaucuaaaacggacguuuccagcucugugauuaccucccugggagccaucgucagcugcuauggcaagacaaaaugcaccgcuuccaacaagaaucgcgggauuaucaaaacauucucuaacggaugugauuacgugagcaauaagggcguugacaccguguccgucggcaacacgcucuauuacgugaauaagcaagaagggaaaucucuguaugugaagggagagccuaucauuaacuuuuacgacccccuuguuuucccuagcgaugaauuugacgccuccaucagccaggucaaugagaaaauuaaccagucucuggccuucaucagaaaguccgaugaacuccugcacaaugugaacgcuggcaaaagcaccacaaauauuaugaucaccacaauuaucaucgugauuaucgucauucugcuuucucucaucgcgguggggcugcugcucuacugcaaggcccgguccacccccguuacgcugagcaaggaccagcuuucuggaauuaacaauaucgcuuucagcaacugaggacuagucccuguucccagagcccacuuuuuuuucuuuuuuugaaauaaaauagccugucuuucagaucuaaaaaaaaaaaaaaaaaaaaaaaaaaaaaaaaaaaaaaaaaaaaaaaaaaaaaaaaaaaaaaaaugcaucccccccccccccccccccccccccccccccaaaggcucuuuucagagccaccagaauu

SEQ ID NO: 85 - RNA, 2001 nt, Artificial Sequence
  mRNA product Design a-1 comprising derived and/or modified sequence from HRSV(A2)__F0 (opt6)
gggagagucccgcagucggcguccagcggcucugcuuguucgugugugugucguugcaggccuuauucaagcuuaccauggaacuucuaauauuaaaagcuaacgcaaucacuacuaucuuaaccgcaguaacauucuguuuugcauccggccaaaacauaacagaagaauuuuaccaaucaacuugcucugcagucucaaaagguuaucuaucugcauuaagaacaggcugguacaccucaguaauaacgaucgaacuaucaaacaucaaagaaaacaaauguaauggaacagacgcaaaaguaaaacuaaucaaacaagaacuagacaaauacaaaaacgcaguaaccgaacuccaacuccucaugcaaaguacaccagcaacaaauaacagagcaagacgugaacuaccacguuuuaugaauuacacgcucaauaacgcaaaaaaaacaaauguuacccuaucaaaaaaacgaaaaagaagauuccucggauuccuacuaggcguaggcucagcaauagcuucaggaguagcaguaucaaaaguacuccaccucgaaggagaaguaaacaaaaucaaaagcgcucuccucucaacaaacaaagcaguuguuucacucucaaacggaguaucaguacuaaccucaaaaguacuugaccuaaaaaauuauauagacaaacaacuauuaccaauaguaaacaaacaaagcugcuccaucuccaacaucgagacagucauagaauuucaacaaaaaaauaaccgccuauuagaaauaaccagagaauuuucaguaaacgcaggaguaacuaccccaguaucaacauauauguuaacaaacucagaacuccuaagucuaaucaacgacaugccaauaaccaacgaccaaaaaaaacuaaugagcaacaauguacaaauaguucgucaacaaucuuacuccauaaugucuauaauaaaagaagaaguacucgccuauguaguccaacuaccacuauacggagucaucgauacaccaugcuggaaacuccacacauccccacucuguacuacuaacaccaaagaagguucaaauauaugccuaaccagaacagauagagguugguacugcgauaaugcaggaucaguauccuuuuucccccaagccgaaacaugcaaaguucaauccaauagaguauuuugugauacaaugaacucuuuaacccucccauccgaagucaaucuauguaacgucgacauauuuaacccaaaauacgauugcaaaauaaugacaucaaaaacagacgucucauccucaguuauaacguccuuaggcgcuauaguaucaugcuacggcaaaacaaaauguacagcaucaaacaaaaacagaggaaucauaaaaacuuucucuaacgguugcgacuauguauccaacaaaggugucgacacaguauccguaggcaacacccuuuacuauguuaauaaacaagaaggaaaaucucuauauguaaaaggcgaaccaauuauaaauuuuuacgacccccuugucuuucccucugacgaauuugacgcuuccauaucacaagucaacgaaaaaaucaaccaaucccucgcauucauacgcaaaucagacgaacuacuacauaacgucaacgcaggcaaauccacaacaaacauaaugauaaccacaaucauaauuguaauaauaguaauacuacuuucucuaauagcagucggauuacucuuauacuguaaagcucgaucaacaccagucacccucucuaaagaucaacuauccggaaucaacaacauagcuuucucaaacuaaggacuagucccuguucccagagcccacuuuuuuuucuuuuuuugaaauaaaauagccugucuuucagaucuaaaaaaaaaaaaaaaaaaaaaaaaaaaaaaaaaaaaaaaaaaaaaaaaaaaaaaaaaaaaaaaaugcaucccccccccccccccccccccccccccccccaaaggcucuuuucagagccaccagaauu

SEQ ID NO: 86 - RNA, 2001 nt, Artificial Sequence
  mRNA product Design a-1 comprising derived and/or modified sequence from HRSV(A2)__F0 (opt11)
gggagagucccgcagucggcguccagcggcucugcuuguucgugugugugucguugcaggccuuauucaagcuuaccauggaacuccucauacucaaagccaacgcaaucacaaccauacucaccgccgucaccuucugcuuugcaucuggccagaacaucacugaagaguucuaccaauccacaugcuccgccguaagcaaaggcuaccuauccgcccuacgcaccggcugguacaccagcguaaucaccauagaacucuccaauauaaaagaaaacaaaugcaacggcaccgacgcaaaagucaagcuaauaaaacaagaacucgacaaauacaaaaacgccguuaccgaacuccagcuacucaugcaaucgaccccagcaaccaacaaccgugcgagacgcgaacucccccgcuucaugaacuacacccuaaacaacgccaaaaagaccaacguaacucuauccaagaaacgcaaacgccgcuuccucggauuccuccucggcgucggcuccgcaaucgccagcggcgucgccguuagcaaaguccuucaccucgaaggagaaguaaacaaaauuaaaagcgcccucuuauccacaaacaaggccguaguaucccugucaaacggcgucuccguccuuacauccaaaguccucgaccucaagaacuacauagacaaacagcuacuacccauuguaaauaaacaaagcugcucaauuagcaacaucgaaaccguaaucgaguuccagcagaaaaacaacagacuucucgaaaucacccgcgaguucagcgucaacgccggcguaaccaccccugucucaacauacaugcuaaccaacagcgaacugcucucccucaucaacgacaugcccaucaccaacgaccaaaagaaacucaugagcaacaacguacaaaucgugcgccaacaguccuacucaauaaugucaaucaucaaagaagaagugcuagcauacgucguacaacuaccacucuacggcguaauagauacccccugcuggaagcuccauaccuccccacucuguaccaccaacaccaaagaaggcucaaacaucugccuaacgcgcacagaccguggaugguacugugacaacgccggcuccgucuccuucuucccucaagccgaaacaugcaaaguccaauccaacagagucuucugcgauaccaugaacucccugacacucccaagcgaagucaaccuuugcaacgucgauaucuuuaaccccaaauacgacugcaagaucaugacaucaaaaaccgacguauccuccucuguaauaaccucccuaggcgcaaucguaucaugcuacggcaaaaccaaauguaccgccuccaacaaaaaucgcggcaucaucaaaaccuucucgaacggcugcgacuacgucuccaacaaaggcguagacacaguuuccguaggcaacacccucuacuacgucaauaaacaggaaggcaagucccucuacgucaaaggcgaacccaucaucaauuucuacgacccccucguuuuccccuccgaugaguucgacgcaagcaucagccaggucaacgaaaagauaaaccagucccucgccuucauccgcaaaucagaugaacuccuucacaacguuaacgcaggcaagagcaccaccaacaucaugaucacaacuauaaucaucgucauaaucgucauccuacucucacuaaucgccgucggucuccuacuauauuguaaagcccgaucaacaccggucacacucuccaaagaccaacucuccggaaucaacaauaucgcuuucucgaacuaaggacuagucccuguucccagagcccacuuuuuuuucuuuuuuugaaauaaaauagccugucuuucagaucuaaaaaaaaaaaaaaaaaaaaaaaaaaaaaaaaaaaaaaaaaaaaaaaaaaaaaaaaaaaaaaaaugcaucccccccccccccccccccccccccccccccaaaggcucuuuucagagccaccagaauu

SEQ ID NO: 87 - RNA, 2020 nt, Artificial Sequence
  mRNA product Design a-2 comprising derived and/or modified sequence from HRSV(A2)__F0 (artificial)
gggagaguccgcucagccagguugcagaagcggcuuagcguguguccuaaucuucucucugcguguagguaggccugugccgcaaacaagcuuaccauggaguugcuaauccucaaagcaaaugcaauuaccacaauccucacugcagucacauuuuguuuugcuucuggucaaaacaucacugaagaauuuuaucaaucaacaugcagugcaguuagcaaaggcuaucuuagugcucugagaacugguugguauaccaguguuauaacuauagaauuaaguaauaucaaggaaaauaaguguaauggaacagaugcuaagguaaaauugauaaaacaagaauuagauaaauauaaaaaugcuguaacagaauugcaguugcucaugcaaagcacaccagcaacaaacaaucgagccagaagagaacuaccaagguuuaugaauuauacacucaacaaugccaaaaaaaccaauguaacauuaagcaagaaaaggaaaagaagauuucuugguuuuuuguuagguguuggaucugcaaucgccaguggcguugcuguaucuaagguccugcaccuagaaggggaagugaacaagaucaaaagugcucuacuauccacaaacaaggcuguagucagcuuaucaaauggaguuagugucuuaaccagcaaaguguuagaccucaaaaacuauauagauaaacaauuguuaccuauugugaacaagcaaagcugcagcauaucaaauauagaaacugugauagaguuccaacaaaagaacaacagacuacuagagauuaccagggaauuuaguguuaaugcagguguaacuacaccuguaagcacuuacauguuaacuaauagugaauuauugucauuaaucaaugauaugccuauaacaaaugaucagaaaaaguuaauguccaacaauguucaaauaguuagacagcaaaguuacucuaucauguccauaauaaaagaggaagucuuagcauauguaguacaauuaccacuauaugguguuauagauacacccuguuggaaacuacacacauccccucuauguacaaccaacacaaaagaaggguccaacaucuguuuaacaagaacugacagaggaugguacugugacaaugcaggaucaguaucuuucuucccacaagcugaaacauguaaaguucaaucaaaucgaguauuuugugacacaaugaacaguuuaacauuaccaagugaaguaaaucucugcaauguugacauauucaaccccaaauaugauuguaaaauuaugacuucaaaaacagauguaagcagcuccguuaucacaucucuaggagccauugugucaugcuauggcaaaacuaaauguacagcauccaauaaaaaucguggaaucauaaagacauuuucuaacgggugcgauuauguaucaaauaaagggguggacacugugucuguagguaacacauuauauuauguaaauaagcaagaagguaaaagucucuauguaaaaggugaaccaauaauaaauuucuaugacccauuaguauuccccucugaugaauuugaugcaucaauaucucaagucaacgagaagauuaaccagagccuagcauuuauucguaaauccgaugaauuauuacauaauguaaaugcugguaaauccaccacaaauaucaugauaacuacuauaauuauagugauuauaguaauauuguuaucauuaauugcuguuggacugcucuuauacuguaaggccagaagcacaccagucacacuaagcaaagaucaacugagugguauaaauaauauugcauuuaguaacuaaggacuagucccuguucccagagcccacuuuuuuuucuuuuuuugaaauaaaauagccugucuuucagaucuaaaaaaaaaaaaaaaaaaaaaaaaaaaaaaaaaaaaaaaaaaaaaaaaaaaaaaaaaaaaaaaaugcaucccccccccccccccccccccccccccccccaaaggcucuuuucagagccaccagaauu

SEQ ID NO: 88 - RNA, 2020 nt, Artificial Sequence
  mRNA product Design a-2 comprising derived and/or modified sequence from HRSV(A2)__F0 (opt1)
gggagaguccgcucagccagguugcagaagcggcuuagcguguguccuaaucuucucucugcguguagguaggccugugccgcaaacaagcuuaccauggagcugcucauccugaaggccaacgccaucaccaccauccugacggcggugaccuucugcuucgccagcggccagaacaucaccgaggaguucuaccaguccaccugcagcgccgucuccaagggguaccucagcgcccugcggacgggcugguacaccuccgugaucaccaucgagcugagcaacaucaaggagaacaagugcaacgggaccgacgccaaggugaagcucaucaagcaggagcuggacaaguacaagaacgcggucacggagcugcagcuccugaugcaguccaccccggcaaccaacaaccgcgcccggcgcgagcugccccgguucaugaacuacacccucaacaacgccaagaagacgaacgugacccugagcaagaagcgcaagcggcgcuuccugggcuuccuccugggggugggcuccgccaucgcgagcggcgucgccguguccaaggugcugcaccucgagggggaggucaacaagaucaagagcgcccugcuguccaccaacaaggccguggugagccucuccaacggcgucagcgugcugaccuccaaggugcuggaccucaagaacuacaucgacaagcagcugcugcccaucgucaacaagcagagcugcuccaucagcaacaucgagacggugaucgaguuccagcagaagaacaaccggcuccuggagaucacccgcgaguucagcgugaacgccggggucaccacccccguguccacguacaugcugaccaacagcgagcuccugucccugaucaacgacaugccgaucaccaacgaccagaagaagcucaugagcaacaacgugcagaucguccggcagcaguccuacagcaucauguccaucaucaaggaggaggugcuggcguacgugguccagcugccccucuacggcgugaucgacacccccugcuggaagcugcacacgagcccccugugcaccaccaacaccaaggagggguccaacaucugccucacgcgcaccgaccggggcugguacugcgacaacgccggcagcgucuccuucuucccgcaggccgagaccugcaaggugcagagcaaccgcguguucugcgacaccaugaacucccugacgcugcccagcgagguaaaccucugcaacgucgacaucuucaaccccaaguacgacugcaagaucaugaccuccaagaccgacgugagcuccagcgugaucaccucccugggggccaucgucagcugcuacggcaagacgaagugcaccgccagcaacaagaaccgggggaucaucaagaccuucuccaacggcugcgacuacgugagcaacaagggcguggacaccguguccgucgggaacacccuguacuacgugaacaagcaggagggcaagagccucuacgugaagggggagcccaucaucaacuucuacgacccgcuggucuuccccuccgacgaguucgacgcgagcaucucccaggugaacgagaagaucaaccagagccuggccuucauccgcaaguccgacgagcugcuccacaacgugaacgccggcaagagcacgaccaacaucaugaucaccaccaucaucaucgucaucaucgugauccugcugucccucaucgccguggggcugcugcucuacugcaaggcccggagcacgcccgucacccuguccaaggaccagcugagcggcaucaacaacaucgcguucuccaacugaggacuagucccuguucccagagcccacuuuuuuuucuuuuuuugaaauaaaauagccugucuuucagaucuaaaaaaaaaaaaaaaaaaaaaaaaaaaaaaaaaaaaaaaaaaaaaaaaaaaaaaaaaaaaaaaaugcaucccccccccccccccccccccccccccccccaaaggcucuuuucagagccaccagaauu

SEQ ID NO: 89 - RNA, 2020 nt, Artificial Sequence
  mRNA product Design a-2 comprising derived and/or modified sequence from HRSV(A2)__F0 (opt1)
gggagaguccgcucagccagguugcagaagcggcuuagcguguguccuaaucuucucucugcguguagguaggccugugccgcaaacaagcuuaccauggagcugcucauccugaaggccaacgccaucaccaccauccugacggcggugaccuucugcuucgccagcggccagaacaucaccgaggaguucuaccaguccacgugcagcgccgucuccaagggguaccucagcgcccugcgcaccggcugguacaccuccgugaucaccaucgagcugagcaacaucaaggagaacaagugcaacgggaccgacgccaaggugaagcucaucaagcaggagcuggacaaguacaagaacgcggucacggagcugcagcuccugaugcaguccacccccgccaccaacaaccgggcccgccgggagcugccgcgcuucaugaacuacacccucaacaacgccaagaagacgaacgugacccugagcaagaagcggaagcgccgguuccugggcuuccuccugggggugggcuccgcgaucgccagcggcgucgccguguccaaggugcugcaccucgagggggaggucaacaagaucaagagcgcccugcuguccaccaacaaggccguggugagccucuccaacggcgucagcgugcugaccuccaaggugcuggaccucaagaacuacaucgacaagcagcugcugcccaucgucaacaagcagagcugcuccaucagcaacaucgagacggugaucgaguuccagcagaagaacaaccgccuccuggagaucacccgggaguucagcgugaacgcgggggucaccacccccguguccacguacaugcugaccaacagcgagcuccugucccugaucaacgacaugcccaucaccaacgaccagaagaagcucaugagcaacaacgugcagaucguccgccagcaguccuacagcaucauguccaucaucaaggaggaggugcuggccuacgugguccagcugccgcucuacggcgugaucgacacccccugcuggaagcugcacacgagcccccugugcaccaccaacaccaaggagggguccaacaucugccucacgcggaccgaccgcggcugguacugcgacaacgccggcagcgucuccuucuucccccaggccgagaccugcaaggugcagagcaaccggguguucugcgacaccaugaacucccugacgcugccgagcgaggucaaccucugcaacguggacaucuucaaccccaaguacgacugcaagaucaugaccuccaagaccgacgugagcuccagcgucaucaccucccugggggccaucgugagcugcuacggcaagacgaagugcaccgcgagcaacaagaaccgcgggaucaucaagaccuucuccaacggcugcgacuacgugagcaacaagggcgucgacaccguguccguggggaacacccuguacuacgucaacaagcaggagggcaagagccucuacgugaagggggagcccaucaucaacuucuacgacccccugguguucccguccgacgaguucgacgccagcaucucccaggucaacgagaagaucaaccagagccuggccuucauccggaaguccgacgagcuccugcacaacgugaacgccggcaagagcacgaccaacaucaugaucaccaccaucaucaucgugaucaucgucauccugcugucccucaucgccguggggcugcugcucuacugcaaggcgcgcagcacgcccgugacccuguccaaggaccagcugagcggcaucaacaacaucgccuucuccaacugaggacuagucccuguucccagagcccacuuuuuuuucuuuuuuugaaauaaaauagccugucuuucagaucuaaaaaaaaaaaaaaaaaaaaaaaaaaaaaaaaaaaaaaaaaaaaaaaaaaaaaaaaaaaaaaaaugcaucccccccccccccccccccccccccccccccaaaggcucuuuucagagccaccagaauu

SEQ ID NO: 90 - RNA, 2020 nt, Artificial Sequence
  mRNA product Design a-2 comprising derived and/or modified sequence from HRSV(A2)__F0 (opt2)
gggagaguccgcucagccagguugcagaagcggcuuagcguguguccuaaucuucucucugcguguagguaggccugugccgcaaacaagcuuaccauggagcuccucauccucaaggccaacgccaucaccaccauccucaccgccgucaccuucugcuucgccuccggccagaacaucaccgaggaguucuaccaguccaccugcuccgccgucuccaagggcuaccucuccgcccuccgcaccggcugguacaccuccgucaucaccaucgagcucuccaacaucaaggagaacaagugcaacggcaccgacgccaaggucaagcucaucaagcaggagcucgacaaguacaagaacgccgucaccgagcuccagcuccucaugcaguccacccccgccaccaacaaccgcgcccgccgcgagcucccccgcuucaugaacuacacccucaacaacgccaagaagaccaacgucacccucuccaagaagcgcaagcgccgcuuccucggcuuccuccucggcgucggcuccgccaucgccuccggcgucgccgucuccaagguccuccaccucgagggcgaggucaacaagaucaaguccgcccuccucuccaccaacaaggccgucgucucccucuccaacggcgucuccguccucaccuccaagguccucgaccucaagaacuacaucgacaagcagcuccuccccaucgucaacaagcaguccugcuccaucuccaacaucgagaccgucaucgaguuccagcagaagaacaaccgccuccucgagaucacccgcgaguucuccgucaacgccggcgucaccacccccgucuccaccuacaugcucaccaacuccgagcuccucucccucaucaacgacaugcccaucaccaacgaccagaagaagcucauguccaacaacguccagaucguccgccagcaguccuacuccaucauguccaucaucaaggaggagguccucgccuacgucguccagcucccccucuacggcgucaucgacacccccugcuggaagcuccacaccuccccccucugcaccaccaacaccaaggagggcuccaacaucugccucacccgcaccgaccgcggcugguacugcgacaacgccggcuccgucuccuucuucccccaggccgagaccugcaagguccaguccaaccgcgucuucugcgacaccaugaacucccucacccuccccuccgaggucaaccucugcaacgucgacaucuucaaccccaaguacgacugcaagaucaugaccuccaagaccgacgucuccuccuccgucaucaccucccucggcgccaucgucuccugcuacggcaagaccaagugcaccgccuccaacaagaaccgcggcaucaucaagaccuucuccaacggcugcgacuacgucuccaacaagggcgucgacaccgucuccgucggcaacacccucuacuacgucaacaagcaggagggcaagucccucuacgucaagggcgagcccaucaucaacuucuacgacccccucgucuuccccuccgacgaguucgacgccuccaucucccaggucaacgagaagaucaaccagucccucgccuucauccgcaaguccgacgagcuccuccacaacgucaacgccggcaaguccaccaccaacaucaugaucaccaccaucaucaucgucaucaucgucauccuccucucccucaucgccgucggccuccuccucuacugcaaggcccgcuccacccccgucacccucuccaaggaccagcucuccggcaucaacaacaucgccuucuccaacugaggacuagucccuguucccagagcccacuuuuuuuucuuuuuuugaaauaaaauagccugucuuucagaucuaaaaaaaaaaaaaaaaaaaaaaaaaaaaaaaaaaaaaaaaaaaaaaaaaaaaaaaaaaaaaaaaugcaucccccccccccccccccccccccccccccccaaaggcucuuuucagagccaccagaauu

SEQ ID NO: 91 - RNA, 2020 nt, Artificial Sequence
  mRNA product Design a-2 comprising derived and/or modified sequence from HRSV(A2)__F0 (opt3)
gggagaguccgcucagccagguugcagaagcggcuuagcguguguccuaaucuucucucugcguguagguaggccugugccgcaaacaagcuuaccauggagcugcucauccuuaaggccaacgcuauuaccacaauacugacugcagugacguucugcuuugccagcggccagaauaucaccgaagaguucuaccaauccacauguucugcggucucaaaaggguauuugagugcuuuaagaacuggaugguacaccagcguuauuacaaucgaacuguccaacauuaaggagaauaaaugcaacgguaccgacgccaaggugaaacuaaucaagcaggaacucgauaaguauaaaaaugcaguaacugagcugcagcuucugaugcagucuacacccgccaccaacaauagggcucggcgcgaguugccucgauuuaugaacuacacgcucaauaacgcaaagaaaacuaaugugacccugucgaagaaacguaagagaagguuccugggcuuucucuuaggggucggaucagccauagcuagcggcguggccguuaguaaggugcugcaccuugaaggugaggucaacaaaaucaaguccgcguugcugucuacaaauaaagcagugguaagccuauccaacgggguuucagugcucacuucuaagguccuggaccuuaaaaauuauauugauaagcaacuguugccaaucgugaacaaacagagcuguucuauuuccaacaucgaaaccgugauagaguuccagcagaagaauaaccggcuccuggagauuacacgcgaauuuucagucaaugccggaguuaccacgccggugagcacuuacauguuaacaaacagugagcugcucucucuuaucaaugacaugcccauuaccaacgaucaaaagaaacugauguccaauaacguacagaucgugagacagcagagcuauucgaucaugucuauuauaaaggaagaggucuuggcuuacgugguucaacuaccucuguacggcgugaucgacacuccaugcuggaaacuccauacauccccacuguguaccacgaauaccaaggaaggcucaaacauuugccuuacaaggacugaucgggggugguauugugacaaugccggaagugucagcuucuuuccucaggcagagaccugcaaagugcaguccaaccgcguauucugugauacaaugaauagucugacuuugccaagcgagguuaaccucugcaauguggacaucuuuaaccccaaguacgauuguaagauaaugaccucaaaaacagacgucaguuccagcgugauuaccucucugggugcuaucgucucaugcuauggcaagacuaaaugcacggccaguaacaagaaucgagggaucauuaaaacauucagcaacggaugugauuacguguccaauaagggcguugacaccgugucuguagguaacacuuuauauuacgucaauaagcaagaagggaaaucgcuguaugugaagggagagccuaucauuaacuuuuacgacccccuaguuuucccgagcgaugaauuugacgcguccauaucacaggugaaugagaaaaucaaccagagucucgccuucauuagaaagucugaugaacugcuucacaaugucaacgcaggcaaaagcaccacaaauaucaugaucaccacuauuauaaucgugauuaucguaauuuugcugucccucaucgcugugggccugcuucuguacugcaaggccaggucaacacccguuacguugagcaaggaccagcucucugggauaaacaauaucgcuuucuccaacugaggacuagucccuguucccagagcccacuuuuuuuucuuuuuuugaaauaaaauagccugucuuucagaucuaaaaaaaaaaaaaaaaaaaaaaaaaaaaaaaaaaaaaaaaaaaaaaaaaaaaaaaaaaaaaaaaugcaucccccccccccccccccccccccccccccccaaaggcucuuuucagagccaccagaauu

SEQ ID NO: 92 - RNA, 2020 nt, Artificial Sequence
  mRNA product Design a-2 comprising derived and/or modified sequence from HRSV(A2)__F0 (opt4)
gggagaguccgcucagccagguugcagaagcggcuuagcguguguccuaaucuucucucugcguguagguaggccugugccgcaaacaagcuuaccauggagcugcugauccugaaggccaacgccaucaccaccauccugaccgccgugaccuucugcuucgccagcggccagaacaucaccgaggaguucuaccagagcaccugcagcgccgugagcaagggcuaccugagcgcccugagaaccggcugguacaccagcgugaucaccaucgagcugagcaacaucaaggagaacaagugcaacggcaccgacgccaaggugaagcugaucaagcaggagcuggacaaguacaagaacgccgugaccgagcugcagcugcugaugcagagcacccccgccaccaacaacagagccagaagagagcugcccagauucaugaacuacacccugaacaacgccaagaagaccaacgugacccugagcaagaagagaaagagaagauuccugggcuuccugcugggcgugggcagcgccaucgccagcggcguggccgugagcaaggugcugcaccuggagggcgaggugaacaagaucaagagcgcccugcugagcaccaacaaggccguggugagccugagcaacggcgugagcgugcugaccagcaaggugcuggaccugaagaacuacaucgacaagcagcugcugcccaucgugaacaagcagagcugcagcaucagcaacaucgagaccgugaucgaguuccagcagaagaacaacagacugcuggagaucaccagagaguucagcgugaacgccggcgugaccacccccgugagcaccuacaugcugaccaacagcgagcugcugagccugaucaacgacaugcccaucaccaacgaccagaagaagcugaugagcaacaacgugcagaucgugagacagcagagcuacagcaucaugagcaucaucaaggaggaggugcuggccuacguggugcagcugccccuguacggcgugaucgacacccccugcuggaagcugcacaccagcccccugugcaccaccaacaccaaggagggcagcaacaucugccugaccagaaccgacagaggcugguacugcgacaacgccggcagcgugagcuucuucccccaggccgagaccugcaaggugcagagcaacagaguguucugcgacaccaugaacagccugacccugcccagcgaggugaaccugugcaacguggacaucuucaaccccaaguacgacugcaagaucaugaccagcaagaccgacgugagcagcagcgugaucaccagccugggcgccaucgugagcugcuacggcaagaccaagugcaccgccagcaacaagaacagaggcaucaucaagaccuucagcaacggcugcgacuacgugagcaacaagggcguggacaccgugagcgugggcaacacccuguacuacgugaacaagcaggagggcaagagccuguacgugaagggcgagcccaucaucaacuucuacgacccccugguguuccccagcgacgaguucgacgccagcaucagccaggugaacgagaagaucaaccagagccuggccuucaucagaaagagcgacgagcugcugcacaacgugaacgccggcaagagcaccaccaacaucaugaucaccaccaucaucaucgugaucaucgugauccugcugagccugaucgccgugggccugcugcuguacugcaaggccagaagcacccccgugacccugagcaaggaccagcugagcggcaucaacaacaucgccuucagcaacugaggacuagucccuguucccagagcccacuuuuuuuucuuuuuuugaaauaaaauagccugucuuucagaucuaaaaaaaaaaaaaaaaaaaaaaaaaaaaaaaaaaaaaaaaaaaaaaaaaaaaaaaaaaaaaaaaugcaucccccccccccccccccccccccccccccccaaaggcucuuuucagagccaccagaauu

SEQ ID NO: 93 - RNA, 2020 nt, Artificial Sequence
  mRNA product Design a-2 comprising derived and/or modified sequence from HRSV(A2)__F0 (opt5)
gggagaguccgcucagccagguugcagaagcggcuuagcguguguccuaaucuucucucugcguguagguaggccugugccgcaaacaagcuuaccauggagcugcucauccugaaggccaacgcuauuaccacaauccuuacggccgugaccuucugcuuugcgagcggccagaauauuacagaagaguucuaccaauccaccuguucugcugucagcaaaggguaucuguccgcccucagaacaggaugguacaccucuguuaucacaauugaacugagcaacaucaaggagaauaaaugcaacggcaccgacgccaaggugaaacuuaucaagcaggaacuggauaaguauaaaaaugcugugacggagcuccagcugcugaugcaguccacccccgccacaaacaaucgggcucgcagagagcucccucgguuuaugaacuacacccugaauaacgccaagaaaacaaaugucacccuuucuaagaaacgcaagagacgguuccugggguuucuccugggagugggcagcgcgauugccuccgggguugcugugagcaagguccuucaccuggaaggagaggugaacaaaaucaagucugcccuccuguccacgaauaaagcuguugugagccugucuaacggcgucuccgugcucacaagcaaggugcuggaccuuaaaaauuauauugauaagcaacugcucccgaucgucaacaaacagucuuguuccauuagcaacaucgaaaccguuauugaguuccagcagaagaauaaccgccugcuugagaucacaagagaauuuuccgugaaugccggcgugaccacccccgucucuacauacaugcugacgaacagcgagcuccugucccugaucaaugacaugccuauuaccaacgaucaaaagaaacucaugagcaauaacgugcagaucguucggcagcagucuuauuccauuaugagcaucauuaaggaagaggugcuggcguacgucgugcaacuuccccuguacgggguuaucgacacaccuugcuggaaacuccauaccucuccccuguguacaaccaauacgaaggaaggaagcaacaucugccuuacacgcaccgauagaggcugguauugugacaaugccggguccgugucuuucuuuccucaggcugagaccugcaaaguccagagcaaccggguguucugugauacaaugaacucccugacccucccgagcgaggucaaucugugcaauguggacauuuuuaaccccaaguacgauuguaagaucaugacaucuaaaacggacguuuccagcucugugauuaccucccugggagccaucgucagcugcuauggcaagacaaaaugcaccgcuuccaacaagaaucgcgggauuaucaaaacauucucuaacggaugugauuacgugagcaauaagggcguugacaccguguccgucggcaacacgcucuauuacgugaauaagcaagaagggaaaucucuguaugugaagggagagccuaucauuaacuuuuacgacccccuuguuuucccuagcgaugaauuugacgccuccaucagccaggucaaugagaaaauuaaccagucucuggccuucaucagaaaguccgaugaacuccugcacaaugugaacgcuggcaaaagcaccacaaauauuaugaucaccacaauuaucaucgugauuaucgucauucugcuuucucucaucgcgguggggcugcugcucuacugcaaggcccgguccacccccguuacgcugagcaaggaccagcuuucuggaauuaacaauaucgcuuucagcaacugaggacuagucccuguucccagagcccacuuuuuuuucuuuuuuugaaauaaaauagccugucuuucagaucuaaaaaaaaaaaaaaaaaaaaaaaaaaaaaaaaaaaaaaaaaaaaaaaaaaaaaaaaaaaaaaaaugcaucccccccccccccccccccccccccccccccaaaggcucuuuucagagccaccagaauu

SEQ ID NO: 94 - RNA, 2020 nt, Artificial Sequence
  mRNA product Design a-2 comprising derived and/or modified sequence from HRSV(A2)__F0 (opt6)
gggagaguccgcucagccagguugcagaagcggcuuagcguguguccuaaucuucucucugcguguagguaggccugugccgcaaacaagcuuaccauggaacuucuaauauuaaaagcuaacgcaaucacuacuaucuuaaccgcaguaacauucuguuuugcauccggccaaaacauaacagaagaauuuuaccaaucaacuugcucugcagucucaaaagguuaucuaucugcauuaagaacaggcugguacaccucaguaauaacgaucgaacuaucaaacaucaaagaaaacaaauguaauggaacagacgcaaaaguaaaacuaaucaaacaagaacuagacaaauacaaaaacgcaguaaccgaacuccaacuccucaugcaaaguacaccagcaacaaauaacagagcaagacgugaacuaccacguuuuaugaauuacacgcucaauaacgcaaaaaaaacaaauguuacccuaucaaaaaaacgaaaaagaagauuccucggauuccuacuaggcguaggcucagcaauagcuucaggaguagcaguaucaaaaguacuccaccucgaaggagaaguaaacaaaaucaaaagcgcucuccucucaacaaacaaagcaguuguuucacucucaaacggaguaucaguacuaaccucaaaaguacuugaccuaaaaaauuauauagacaaacaacuauuaccaauaguaaacaaacaaagcugcuccaucuccaacaucgagacagucauagaauuucaacaaaaaaauaaccgccuauuagaaauaaccagagaauuuucaguaaacgcaggaguaacuaccccaguaucaacauauauguuaacaaacucagaacuccuaagucuaaucaacgacaugccaauaaccaacgaccaaaaaaaacuaaugagcaacaauguacaaauaguucgucaacaaucuuacuccauaaugucuauaauaaaagaagaaguacucgccuauguaguccaacuaccacuauacggagucaucgauacaccaugcuggaaacuccacacauccccacucuguacuacuaacaccaaagaagguucaaauauaugccuaaccagaacagauagagguugguacugcgauaaugcaggaucaguauccuuuuucccccaagccgaaacaugcaaaguucaauccaauagaguauuuugugauacaaugaacucuuuaacccucccauccgaagucaaucuauguaacgucgacauauuuaacccaaaauacgauugcaaaauaaugacaucaaaaacagacgucucauccucaguuauaacguccuuaggcgcuauaguaucaugcuacggcaaaacaaaauguacagcaucaaacaaaaacagaggaaucauaaaaacuuucucuaacgguugcgacuauguauccaacaaaggugucgacacaguauccguaggcaacacccuuuacuauguuaauaaacaagaaggaaaaucucuauauguaaaaggcgaaccaauuauaaauuuuuacgacccccuugucuuucccucugacgaauuugacgcuuccauaucacaagucaacgaaaaaaucaaccaaucccucgcauucauacgcaaaucagacgaacuacuacauaacgucaacgcaggcaaauccacaacaaacauaaugauaaccacaaucauaauuguaauaauaguaauacuacuuucucuaauagcagucggauuacucuuauacuguaaagcucgaucaacaccagucacccucucuaaagaucaacuauccggaaucaacaacauagcuuucucaaacuaaggacuagucccuguucccagagcccacuuuuuuuucuuuuuuugaaauaaaauagccugucuuucagaucuaaaaaaaaaaaaaaaaaaaaaaaaaaaaaaaaaaaaaaaaaaaaaaaaaaaaaaaaaaaaaaaaugcaucccccccccccccccccccccccccccccccaaaggcucuuuucagagccaccagaauu

SEQ ID NO: 95 - RNA, 2020 nt, Artificial Sequence
  mRNA product Design a-2 comprising derived and/or modified sequence from HRSV(A2)__F0 (opt11)
gggagaguccgcucagccagguugcagaagcggcuuagcguguguccuaaucuucucucugcguguagguaggccugugccgcaaacaagcuuaccauggaacuccucauacucaaagccaacgcaaucacaaccauacucaccgccgucaccuucugcuuugcaucuggccagaacaucacugaagaguucuaccaauccacaugcuccgccguaagcaaaggcuaccuauccgcccuacgcaccggcugguacaccagcguaaucaccauagaacucuccaauauaaaagaaaacaaaugcaacggcaccgacgcaaaagucaagcuaauaaaacaagaacucgacaaauacaaaaacgccguuaccgaacuccagcuacucaugcaaucgaccccagcaaccaacaaccgugcgagacgcgaacucccccgcuucaugaacuacacccuaaacaacgccaaaaagaccaacguaacucuauccaagaaacgcaaacgccgcuuccucggauuccuccucggcgucggcuccgcaaucgccagcggcgucgccguuagcaaaguccuucaccucgaaggagaaguaaacaaaauuaaaagcgcccucuuauccacaaacaaggccguaguaucccugucaaacggcgucuccguccuuacauccaaaguccucgaccucaagaacuacauagacaaacagcuacuacccauuguaaauaaacaaagcugcucaauuagcaacaucgaaaccguaaucgaguuccagcagaaaaacaacagacuucucgaaaucacccgcgaguucagcgucaacgccggcguaaccaccccugucucaacauacaugcuaaccaacagcgaacugcucucccucaucaacgacaugcccaucaccaacgaccaaaagaaacucaugagcaacaacguacaaaucgugcgccaacaguccuacucaauaaugucaaucaucaaagaagaagugcuagcauacgucguacaacuaccacucuacggcguaauagauacccccugcuggaagcuccauaccuccccacucuguaccaccaacaccaaagaaggcucaaacaucugccuaacgcgcacagaccguggaugguacugugacaacgccggcuccgucuccuucuucccucaagccgaaacaugcaaaguccaauccaacagagucuucugcgauaccaugaacucccugacacucccaagcgaagucaaccuuugcaacgucgauaucuuuaaccccaaauacgacugcaagaucaugacaucaaaaaccgacguauccuccucuguaauaaccucccuaggcgcaaucguaucaugcuacggcaaaaccaaauguaccgccuccaacaaaaaucgcggcaucaucaaaaccuucucgaacggcugcgacuacgucuccaacaaaggcguagacacaguuuccguaggcaacacccucuacuacgucaauaaacaggaaggcaagucccucuacgucaaaggcgaacccaucaucaauuucuacgacccccucguuuuccccuccgaugaguucgacgcaagcaucagccaggucaacgaaaagauaaaccagucccucgccuucauccgcaaaucagaugaacuccuucacaacguuaacgcaggcaagagcaccaccaacaucaugaucacaacuauaaucaucgucauaaucgucauccuacucucacuaaucgccgucggucuccuacuauauuguaaagcccgaucaacaccggucacacucuccaaagaccaacucuccggaaucaacaauaucgcuuucucgaacuaaggacuagucccuguucccagagcccacuuuuuuuucuuuuuuugaaauaaaauagccugucuuucagaucuaaaaaaaaaaaaaaaaaaaaaaaaaaaaaaaaaaaaaaaaaaaaaaaaaaaaaaaaaaaaaaaaugcaucccccccccccccccccccccccccccccccaaaggcucuuuucagagccaccagaauu

SEQ ID NO: 96 - RNA, 2098 nt, Artificial Sequence
  mRNA product Design a-3 comprising derived and/or modified sequence from HRSV(A2)__F0 (artificial)
gggagagggcgcuuggcuugcaaggacccugagcugcggcauugaagcacacccaacccaacucgacugaagucagccucacugaaccggaucugagaaucuucucucucugggcuugccagggcucuccgaaccuagcuagcauccucuucaauuccaacuagaaagcuuaccauggaguugcuaauccucaaagcaaaugcaauuaccacaauccucacugcagucacauuuuguuuugcuucuggucaaaacaucacugaagaauuuuaucaaucaacaugcagugcaguuagcaaaggcuaucuuagugcucugagaacugguugguauaccaguguuauaacuauagaauuaaguaauaucaaggaaaauaaguguaauggaacagaugcuaagguaaaauugauaaaacaagaauuagauaaauauaaaaaugcuguaacagaauugcaguugcucaugcaaagcacaccagcaacaaacaaucgagccagaagagaacuaccaagguuuaugaauuauacacucaacaaugccaaaaaaaccaauguaacauuaagcaagaaaaggaaaagaagauuucuugguuuuuuguuagguguuggaucugcaaucgccaguggcguugcuguaucuaagguccugcaccuagaaggggaagugaacaagaucaaaagugcucuacuauccacaaacaaggcuguagucagcuuaucaaauggaguuagugucuuaaccagcaaaguguuagaccucaaaaacuauauagauaaacaauuguuaccuauugugaacaagcaaagcugcagcauaucaaauauagaaacugugauagaguuccaacaaaagaacaacagacuacuagagauuaccagggaauuuaguguuaaugcagguguaacuacaccuguaagcacuuacauguuaacuaauagugaauuauugucauuaaucaaugauaugccuauaacaaaugaucagaaaaaguuaauguccaacaauguucaaauaguuagacagcaaaguuacucuaucauguccauaauaaaagaggaagucuuagcauauguaguacaauuaccacuauaugguguuauagauacacccuguuggaaacuacacacauccccucuauguacaaccaacacaaaagaaggguccaacaucuguuuaacaagaacugacagaggaugguacugugacaaugcaggaucaguaucuuucuucccacaagcugaaacauguaaaguucaaucaaaucgaguauuuugugacacaaugaacaguuuaacauuaccaagugaaguaaaucucugcaauguugacauauucaaccccaaauaugauuguaaaauuaugacuucaaaaacagauguaagcagcuccguuaucacaucucuaggagccauugugucaugcuauggcaaaacuaaauguacagcauccaauaaaaaucguggaaucauaaagacauuuucuaacgggugcgauuauguaucaaauaaagggguggacacugugucuguagguaacacauuauauuauguaaauaagcaagaagguaaaagucucuauguaaaaggugaaccaauaauaaauuucuaugacccauuaguauuccccucugaugaauuugaugcaucaauaucucaagucaacgagaagauuaaccagagccuagcauuuauucguaaauccgaugaauuauuacauaauguaaaugcugguaaauccaccacaaauaucaugauaacuacuauaauuauagugauuauaguaauauuguuaucauuaauugcuguuggacugcucuuauacuguaaggccagaagcacaccagucacacuaagcaaagaucaacugagugguauaaauaauauugcauuuaguaacuaaggacuagucccuguucccagagcccacuuuuuuuucuuuuuuugaaauaaaauagccugucuuucagaucuaaaaaaaaaaaaaaaaaaaaaaaaaaaaaaaaaaaaaaaaaaaaaaaaaaaaaaaaaaaaaaaaugcaucccccccccccccccccccccccccccccccaaaggcucuuuucagagccaccagaauu

SEQ ID NO: 97 - RNA, 2098 nt, Artificial Sequence
  mRNA product Design a-3 comprising derived and/or modified sequence from HRSV(A2)__F0 (opt1)
gggagagggcgcuuggcuugcaaggacccugagcugcggcauugaagcacacccaacccaacucgacugaagucagccucacugaaccggaucugagaaucuucucucucugggcuugccagggcucuccgaaccuagcuagcauccucuucaauuccaacuagaaagcuuaccauggagcugcucauccugaaggccaacgccaucaccaccauccugacggcggugaccuucugcuucgccagcggccagaacaucaccgaggaguucuaccaguccaccugcagcgccgucuccaagggguaccucagcgcccugcggacgggcugguacaccuccgugaucaccaucgagcugagcaacaucaaggagaacaagugcaacgggaccgacgccaaggugaagcucaucaagcaggagcuggacaaguacaagaacgcggucacggagcugcagcuccugaugcaguccaccccggcaaccaacaaccgcgcccggcgcgagcugccccgguucaugaacuacacccucaacaacgccaagaagacgaacgugacccugagcaagaagcgcaagcggcgcuuccugggcuuccuccugggggugggcuccgccaucgcgagcggcgucgccguguccaaggugcugcaccucgagggggaggucaacaagaucaagagcgcccugcuguccaccaacaaggccguggugagccucuccaacggcgucagcgugcugaccuccaaggugcuggaccucaagaacuacaucgacaagcagcugcugcccaucgucaacaagcagagcugcuccaucagcaacaucgagacggugaucgaguuccagcagaagaacaaccggcuccuggagaucacccgcgaguucagcgugaacgccggggucaccacccccguguccacguacaugcugaccaacagcgagcuccugucccugaucaacgacaugccgaucaccaacgaccagaagaagcucaugagcaacaacgugcagaucguccggcagcaguccuacagcaucauguccaucaucaaggaggaggugcuggcguacgugguccagcugccccucuacggcgugaucgacacccccugcuggaagcugcacacgagcccccugugcaccaccaacaccaaggagggguccaacaucugccucacgcgcaccgaccggggcugguacugcgacaacgccggcagcgucuccuucuucccgcaggccgagaccugcaaggugcagagcaaccgcguguucugcgacaccaugaacucccugacgcugcccagcgagguaaaccucugcaacgucgacaucuucaaccccaaguacgacugcaagaucaugaccuccaagaccgacgugagcuccagcgugaucaccucccugggggccaucgucagcugcuacggcaagacgaagugcaccgccagcaacaagaaccgggggaucaucaagaccuucuccaacggcugcgacuacgugagcaacaagggcguggacaccguguccgucgggaacacccuguacuacgugaacaagcaggagggcaagagccucuacgugaagggggagcccaucaucaacuucuacgacccgcuggucuuccccuccgacgaguucgacgcgagcaucucccaggugaacgagaagaucaaccagagccuggccuucauccgcaaguccgacgagcugcuccacaacgugaacgccggcaagagcacgaccaacaucaugaucaccaccaucaucaucgucaucaucgugauccugcugucccucaucgccguggggcugcugcucuacugcaaggcccggagcacgcccgucacccuguccaaggaccagcugagcggcaucaacaacaucgcguucuccaacugaggacuagucccuguucccagagcccacuuuuuuuucuuuuuuugaaauaaaauagccugucuuucagaucuaaaaaaaaaaaaaaaaaaaaaaaaaaaaaaaaaaaaaaaaaaaaaaaaaaaaaaaaaaaaaaaaugcaucccccccccccccccccccccccccccccccaaaggcucuuuucagagccaccagaauu

SEQ ID NO: 98 - RNA, 2098 nt, Artificial Sequence
  mRNA product Design a-3 comprising derived and/or modified sequence from HRSV(A2)__F0 (opt1)
gggagagggcgcuuggcuugcaaggacccugagcugcggcauugaagcacacccaacccaacucgacugaagucagccucacugaaccggaucugagaaucuucucucucugggcuugccagggcucuccgaaccuagcuagcauccucuucaauuccaacuagaaagcuuaccauggagcugcucauccugaaggccaacgccaucaccaccauccugacggcggugaccuucugcuucgccagcggccagaacaucaccgaggaguucuaccaguccacgugcagcgccgucuccaagggguaccucagcgcccugcgcaccggcugguacaccuccgugaucaccaucgagcugagcaacaucaaggagaacaagugcaacgggaccgacgccaaggugaagcucaucaagcaggagcuggacaaguacaagaacgcggucacggagcugcagcuccugaugcaguccacccccgccaccaacaaccgggcccgccgggagcugccgcgcuucaugaacuacacccucaacaacgccaagaagacgaacgugacccugagcaagaagcggaagcgccgguuccugggcuuccuccugggggugggcuccgcgaucgccagcggcgucgccguguccaaggugcugcaccucgagggggaggucaacaagaucaagagcgcccugcuguccaccaacaaggccguggugagccucuccaacggcgucagcgugcugaccuccaaggugcuggaccucaagaacuacaucgacaagcagcugcugcccaucgucaacaagcagagcugcuccaucagcaacaucgagacggugaucgaguuccagcagaagaacaaccgccuccuggagaucacccgggaguucagcgugaacgcgggggucaccacccccguguccacguacaugcugaccaacagcgagcuccugucccugaucaacgacaugcccaucaccaacgaccagaagaagcucaugagcaacaacgugcagaucguccgccagcaguccuacagcaucauguccaucaucaaggaggaggugcuggccuacgugguccagcugccgcucuacggcgugaucgacacccccugcuggaagcugcacacgagcccccugugcaccaccaacaccaaggagggguccaacaucugccucacgcggaccgaccgcggcugguacugcgacaacgccggcagcgucuccuucuucccccaggccgagaccugcaaggugcagagcaaccggguguucugcgacaccaugaacucccugacgcugccgagcgaggucaaccucugcaacguggacaucuucaaccccaaguacgacugcaagaucaugaccuccaagaccgacgugagcuccagcgucaucaccucccugggggccaucgugagcugcuacggcaagacgaagugcaccgcgagcaacaagaaccgcgggaucaucaagaccuucuccaacggcugcgacuacgugagcaacaagggcgucgacaccguguccguggggaacacccuguacuacgucaacaagcaggagggcaagagccucuacgugaagggggagcccaucaucaacuucuacgacccccugguguucccguccgacgaguucgacgccagcaucucccaggucaacgagaagaucaaccagagccuggccuucauccggaaguccgacgagcuccugcacaacgugaacgccggcaagagcacgaccaacaucaugaucaccaccaucaucaucgugaucaucgucauccugcugucccucaucgccguggggcugcugcucuacugcaaggcgcgcagcacgcccgugacccuguccaaggaccagcugagcggcaucaacaacaucgccuucuccaacugaggacuagucccuguucccagagcccacuuuuuuuucuuuuuuugaaauaaaauagccugucuuucagaucuaaaaaaaaaaaaaaaaaaaaaaaaaaaaaaaaaaaaaaaaaaaaaaaaaaaaaaaaaaaaaaaaugcaucccccccccccccccccccccccccccccccaaaggcucuuuucagagccaccagaauu

SEQ ID NO: 99 - RNA, 2098 nt, Artificial Sequence
  mRNA product Design a-3 comprising derived and/or modified sequence from HRSV(A2)__F0 (opt2)
gggagagggcgcuuggcuugcaaggacccugagcugcggcauugaagcacacccaacccaacucgacugaagucagccucacugaaccggaucugagaaucuucucucucugggcuugccagggcucuccgaaccuagcuagcauccucuucaauuccaacuagaaagcuuaccauggagcuccucauccucaaggccaacgccaucaccaccauccucaccgccgucaccuucugcuucgccuccggccagaacaucaccgaggaguucuaccaguccaccugcuccgccgucuccaagggcuaccucuccgcccuccgcaccggcugguacaccuccgucaucaccaucgagcucuccaacaucaaggagaacaagugcaacggcaccgacgccaaggucaagcucaucaagcaggagcucgacaaguacaagaacgccgucaccgagcuccagcuccucaugcaguccacccccgccaccaacaaccgcgcccgccgcgagcucccccgcuucaugaacuacacccucaacaacgccaagaagaccaacgucacccucuccaagaagcgcaagcgccgcuuccucggcuuccuccucggcgucggcuccgccaucgccuccggcgucgccgucuccaagguccuccaccucgagggcgaggucaacaagaucaaguccgcccuccucuccaccaacaaggccgucgucucccucuccaacggcgucuccguccucaccuccaagguccucgaccucaagaacuacaucgacaagcagcuccuccccaucgucaacaagcaguccugcuccaucuccaacaucgagaccgucaucgaguuccagcagaagaacaaccgccuccucgagaucacccgcgaguucuccgucaacgccggcgucaccacccccgucuccaccuacaugcucaccaacuccgagcuccucucccucaucaacgacaugcccaucaccaacgaccagaagaagcucauguccaacaacguccagaucguccgccagcaguccuacuccaucauguccaucaucaaggaggagguccucgccuacgucguccagcucccccucuacggcgucaucgacacccccugcuggaagcuccacaccuccccccucugcaccaccaacaccaaggagggcuccaacaucugccucacccgcaccgaccgcggcugguacugcgacaacgccggcuccgucuccuucuucccccaggccgagaccugcaagguccaguccaaccgcgucuucugcgacaccaugaacucccucacccuccccuccgaggucaaccucugcaacgucgacaucuucaaccccaaguacgacugcaagaucaugaccuccaagaccgacgucuccuccuccgucaucaccucccucggcgccaucgucuccugcuacggcaagaccaagugcaccgccuccaacaagaaccgcggcaucaucaagaccuucuccaacggcugcgacuacgucuccaacaagggcgucgacaccgucuccgucggcaacacccucuacuacgucaacaagcaggagggcaagucccucuacgucaagggcgagcccaucaucaacuucuacgacccccucgucuuccccuccgacgaguucgacgccuccaucucccaggucaacgagaagaucaaccagucccucgccuucauccgcaaguccgacgagcuccuccacaacgucaacgccggcaaguccaccaccaacaucaugaucaccaccaucaucaucgucaucaucgucauccuccucucccucaucgccgucggccuccuccucuacugcaaggcccgcuccacccccgucacccucuccaaggaccagcucuccggcaucaacaacaucgccuucuccaacugaggacuagucccuguucccagagcccacuuuuuuuucuuuuuuugaaauaaaauagccugucuuucagaucuaaaaaaaaaaaaaaaaaaaaaaaaaaaaaaaaaaaaaaaaaaaaaaaaaaaaaaaaaaaaaaaaugcaucccccccccccccccccccccccccccccccaaaggcucuuuucagagccaccagaauu

SEQ ID NO: 100 - RNA, 2098 nt, Artificial Sequence
  mRNA product Design a-3 comprising derived and/or modified sequence from HRSV(A2)__F0 (opt3)
gggagagggcgcuuggcuugcaaggacccugagcugcggcauugaagcacacccaacccaacucgacugaagucagccucacugaaccggaucugagaaucuucucucucugggcuugccagggcucuccgaaccuagcuagcauccucuucaauuccaacuagaaagcuuaccauggagcugcucauccuuaaggccaacgcuauuaccacaauacugacugcagugacguucugcuuugccagcggccagaauaucaccgaagaguucuaccaauccacauguucugcggucucaaaaggguauuugagugcuuuaagaacuggaugguacaccagcguuauuacaaucgaacuguccaacauuaaggagaauaaaugcaacgguaccgacgccaaggugaaacuaaucaagcaggaacucgauaaguauaaaaaugcaguaacugagcugcagcuucugaugcagucuacacccgccaccaacaauagggcucggcgcgaguugccucgauuuaugaacuacacgcucaauaacgcaaagaaaacuaaugugacccugucgaagaaacguaagagaagguuccugggcuuucucuuaggggucggaucagccauagcuagcggcguggccguuaguaaggugcugcaccuugaaggugaggucaacaaaaucaaguccgcguugcugucuacaaauaaagcagugguaagccuauccaacgggguuucagugcucacuucuaagguccuggaccuuaaaaauuauauugauaagcaacuguugccaaucgugaacaaacagagcuguucuauuuccaacaucgaaaccgugauagaguuccagcagaagaauaaccggcuccuggagauuacacgcgaauuuucagucaaugccggaguuaccacgccggugagcacuuacauguuaacaaacagugagcugcucucucuuaucaaugacaugcccauuaccaacgaucaaaagaaacugauguccaauaacguacagaucgugagacagcagagcuauucgaucaugucuauuauaaaggaagaggucuuggcuuacgugguucaacuaccucuguacggcgugaucgacacuccaugcuggaaacuccauacauccccacuguguaccacgaauaccaaggaaggcucaaacauuugccuuacaaggacugaucgggggugguauugugacaaugccggaagugucagcuucuuuccucaggcagagaccugcaaagugcaguccaaccgcguauucugugauacaaugaauagucugacuuugccaagcgagguuaaccucugcaauguggacaucuuuaaccccaaguacgauuguaagauaaugaccucaaaaacagacgucaguuccagcgugauuaccucucugggugcuaucgucucaugcuauggcaagacuaaaugcacggccaguaacaagaaucgagggaucauuaaaacauucagcaacggaugugauuacguguccaauaagggcguugacaccgugucuguagguaacacuuuauauuacgucaauaagcaagaagggaaaucgcuguaugugaagggagagccuaucauuaacuuuuacgacccccuaguuuucccgagcgaugaauuugacgcguccauaucacaggugaaugagaaaaucaaccagagucucgccuucauuagaaagucugaugaacugcuucacaaugucaacgcaggcaaaagcaccacaaauaucaugaucaccacuauuauaaucgugauuaucguaauuuugcugucccucaucgcugugggccugcuucuguacugcaaggccaggucaacacccguuacguugagcaaggaccagcucucugggauaaacaauaucgcuuucuccaacugaggacuagucccuguucccagagcccacuuuuuuuucuuuuuuugaaauaaaauagccugucuuucagaucuaaaaaaaaaaaaaaaaaaaaaaaaaaaaaaaaaaaaaaaaaaaaaaaaaaaaaaaaaaaaaaaaugcaucccccccccccccccccccccccccccccccaaaggcucuuuucagagccaccagaauu

SEQ ID NO: 101 - RNA, 2098 nt, Artificial Sequence
  mRNA product Design a-3 comprising derived and/or modified sequence from HRSV(A2)__F0 (opt4)
gggagagggcgcuuggcuugcaaggacccugagcugcggcauugaagcacacccaacccaacucgacugaagucagccucacugaaccggaucugagaaucuucucucucugggcuugccagggcucuccgaaccuagcuagcauccucuucaauuccaacuagaaagcuuaccauggagcugcugauccugaaggccaacgccaucaccaccauccugaccgccgugaccuucugcuucgccagcggccagaacaucaccgaggaguucuaccagagcaccugcagcgccgugagcaagggcuaccugagcgcccugagaaccggcugguacaccagcgugaucaccaucgagcugagcaacaucaaggagaacaagugcaacggcaccgacgccaaggugaagcugaucaagcaggagcuggacaaguacaagaacgccgugaccgagcugcagcugcugaugcagagcacccccgccaccaacaacagagccagaagagagcugcccagauucaugaacuacacccugaacaacgccaagaagaccaacgugacccugagcaagaagagaaagagaagauuccugggcuuccugcugggcgugggcagcgccaucgccagcggcguggccgugagcaaggugcugcaccuggagggcgaggugaacaagaucaagagcgcccugcugagcaccaacaaggccguggugagccugagcaacggcgugagcgugcugaccagcaaggugcuggaccugaagaacuacaucgacaagcagcugcugcccaucgugaacaagcagagcugcagcaucagcaacaucgagaccgugaucgaguuccagcagaagaacaacagacugcuggagaucaccagagaguucagcgugaacgccggcgugaccacccccgugagcaccuacaugcugaccaacagcgagcugcugagccugaucaacgacaugcccaucaccaacgaccagaagaagcugaugagcaacaacgugcagaucgugagacagcagagcuacagcaucaugagcaucaucaaggaggaggugcuggccuacguggugcagcugccccuguacggcgugaucgacacccccugcuggaagcugcacaccagcccccugugcaccaccaacaccaaggagggcagcaacaucugccugaccagaaccgacagaggcugguacugcgacaacgccggcagcgugagcuucuucccccaggccgagaccugcaaggugcagagcaacagaguguucugcgacaccaugaacagccugacccugcccagcgaggugaaccugugcaacguggacaucuucaaccccaaguacgacugcaagaucaugaccagcaagaccgacgugagcagcagcgugaucaccagccugggcgccaucgugagcugcuacggcaagaccaagugcaccgccagcaacaagaacagaggcaucaucaagaccuucagcaacggcugcgacuacgugagcaacaagggcguggacaccgugagcgugggcaacacccuguacuacgugaacaagcaggagggcaagagccuguacgugaagggcgagcccaucaucaacuucuacgacccccugguguuccccagcgacgaguucgacgccagcaucagccaggugaacgagaagaucaaccagagccuggccuucaucagaaagagcgacgagcugcugcacaacgugaacgccggcaagagcaccaccaacaucaugaucaccaccaucaucaucgugaucaucgugauccugcugagccugaucgccgugggccugcugcuguacugcaaggccagaagcacccccgugacccugagcaaggaccagcugagcggcaucaacaacaucgccuucagcaacugaggacuagucccuguucccagagcccacuuuuuuuucuuuuuuugaaauaaaauagccugucuuucagaucuaaaaaaaaaaaaaaaaaaaaaaaaaaaaaaaaaaaaaaaaaaaaaaaaaaaaaaaaaaaaaaaaugcaucccccccccccccccccccccccccccccccaaaggcucuuuucagagccaccagaauu

SEQ ID NO: 102 - RNA, 2098 nt, Artificial Sequence
  mRNA product Design a-3 comprising derived and/or modified sequence from HRSV(A2)__F0 (opt5)
gggagagggcgcuuggcuugcaaggacccugagcugcggcauugaagcacacccaacccaacucgacugaagucagccucacugaaccggaucugagaaucuucucucucugggcuugccagggcucuccgaaccuagcuagcauccucuucaauuccaacuagaaagcuuaccauggagcugcucauccugaaggccaacgcuauuaccacaauccuuacggccgugaccuucugcuuugcgagcggccagaauauuacagaagaguucuaccaauccaccuguucugcugucagcaaaggguaucuguccgcccucagaacaggaugguacaccucuguuaucacaauugaacugagcaacaucaaggagaauaaaugcaacggcaccgacgccaaggugaaacuuaucaagcaggaacuggauaaguauaaaaaugcugugacggagcuccagcugcugaugcaguccacccccgccacaaacaaucgggcucgcagagagcucccucgguuuaugaacuacacccugaauaacgccaagaaaacaaaugucacccuuucuaagaaacgcaagagacgguuccugggguuucuccugggagugggcagcgcgauugccuccgggguugcugugagcaagguccuucaccuggaaggagaggugaacaaaaucaagucugcccuccuguccacgaauaaagcuguugugagccugucuaacggcgucuccgugcucacaagcaaggugcuggaccuuaaaaauuauauugauaagcaacugcucccgaucgucaacaaacagucuuguuccauuagcaacaucgaaaccguuauugaguuccagcagaagaauaaccgccugcuugagaucacaagagaauuuuccgugaaugccggcgugaccacccccgucucuacauacaugcugacgaacagcgagcuccugucccugaucaaugacaugccuauuaccaacgaucaaaagaaacucaugagcaauaacgugcagaucguucggcagcagucuuauuccauuaugagcaucauuaaggaagaggugcuggcguacgucgugcaacuuccccuguacgggguuaucgacacaccuugcuggaaacuccauaccucuccccuguguacaaccaauacgaaggaaggaagcaacaucugccuuacacgcaccgauagaggcugguauugugacaaugccggguccgugucuuucuuuccucaggcugagaccugcaaaguccagagcaaccggguguucugugauacaaugaacucccugacccucccgagcgaggucaaucugugcaauguggacauuuuuaaccccaaguacgauuguaagaucaugacaucuaaaacggacguuuccagcucugugauuaccucccugggagccaucgucagcugcuauggcaagacaaaaugcaccgcuuccaacaagaaucgcgggauuaucaaaacauucucuaacggaugugauuacgugagcaauaagggcguugacaccguguccgucggcaacacgcucuauuacgugaauaagcaagaagggaaaucucuguaugugaagggagagccuaucauuaacuuuuacgacccccuuguuuucccuagcgaugaauuugacgccuccaucagccaggucaaugagaaaauuaaccagucucuggccuucaucagaaaguccgaugaacuccugcacaaugugaacgcuggcaaaagcaccacaaauauuaugaucaccacaauuaucaucgugauuaucgucauucugcuuucucucaucgcgguggggcugcugcucuacugcaaggcccgguccacccccguuacgcugagcaaggaccagcuuucuggaauuaacaauaucgcuuucagcaacugaggacuagucccuguucccagagcccacuuuuuuuucuuuuuuugaaauaaaauagccugucuuucagaucuaaaaaaaaaaaaaaaaaaaaaaaaaaaaaaaaaaaaaaaaaaaaaaaaaaaaaaaaaaaaaaaaugcaucccccccccccccccccccccccccccccccaaaggcucuuuucagagccaccagaauu

SEQ ID NO: 103 - RNA, 2098 nt, Artificial Sequence
  mRNA product Design a-3 comprising derived and/or modified sequence from HRSV(A2)__F0 (opt6)
gggagagggcgcuuggcuugcaaggacccugagcugcggcauugaagcacacccaacccaacucgacugaagucagccucacugaaccggaucugagaaucuucucucucugggcuugccagggcucuccgaaccuagcuagcauccucuucaauuccaacuagaaagcuuaccauggaacuucuaauauuaaaagcuaacgcaaucacuacuaucuuaaccgcaguaacauucuguuuugcauccggccaaaacauaacagaagaauuuuaccaaucaacuugcucugcagucucaaaagguuaucuaucugcauuaagaacaggcugguacaccucaguaauaacgaucgaacuaucaaacaucaaagaaaacaaauguaauggaacagacgcaaaaguaaaacuaaucaaacaagaacuagacaaauacaaaaacgcaguaaccgaacuccaacuccucaugcaaaguacaccagcaacaaauaacagagcaagacgugaacuaccacguuuuaugaauuacacgcucaauaacgcaaaaaaaacaaauguuacccuaucaaaaaaacgaaaaagaagauuccucggauuccuacuaggcguaggcucagcaauagcuucaggaguagcaguaucaaaaguacuccaccucgaaggagaaguaaacaaaaucaaaagcgcucuccucucaacaaacaaagcaguuguuucacucucaaacggaguaucaguacuaaccucaaaaguacuugaccuaaaaaauuauauagacaaacaacuauuaccaauaguaaacaaacaaagcugcuccaucuccaacaucgagacagucauagaauuucaacaaaaaaauaaccgccuauuagaaauaaccagagaauuuucaguaaacgcaggaguaacuaccccaguaucaacauauauguuaacaaacucagaacuccuaagucuaaucaacgacaugccaauaaccaacgaccaaaaaaaacuaaugagcaacaauguacaaauaguucgucaacaaucuuacuccauaaugucuauaauaaaagaagaaguacucgccuauguaguccaacuaccacuauacggagucaucgauacaccaugcuggaaacuccacacauccccacucuguacuacuaacaccaaagaagguucaaauauaugccuaaccagaacagauagagguugguacugcgauaaugcaggaucaguauccuuuuucccccaagccgaaacaugcaaaguucaauccaauagaguauuuugugauacaaugaacucuuuaacccucccauccgaagucaaucuauguaacgucgacauauuuaacccaaaauacgauugcaaaauaaugacaucaaaaacagacgucucauccucaguuauaacguccuuaggcgcuauaguaucaugcuacggcaaaacaaaauguacagcaucaaacaaaaacagaggaaucauaaaaacuuucucuaacgguugcgacuauguauccaacaaaggugucgacacaguauccguaggcaacacccuuuacuauguuaauaaacaagaaggaaaaucucuauauguaaaaggcgaaccaauuauaaauuuuuacgacccccuugucuuucccucugacgaauuugacgcuuccauaucacaagucaacgaaaaaaucaaccaaucccucgcauucauacgcaaaucagacgaacuacuacauaacgucaacgcaggcaaauccacaacaaacauaaugauaaccacaaucauaauuguaauaauaguaauacuacuuucucuaauagcagucggauuacucuuauacuguaaagcucgaucaacaccagucacccucucuaaagaucaacuauccggaaucaacaacauagcuuucucaaacuaaggacuagucccuguucccagagcccacuuuuuuuucuuuuuuugaaauaaaauagccugucuuucagaucuaaaaaaaaaaaaaaaaaaaaaaaaaaaaaaaaaaaaaaaaaaaaaaaaaaaaaaaaaaaaaaaaugcaucccccccccccccccccccccccccccccccaaaggcucuuuucagagccaccagaauu

SEQ ID NO: 104 - RNA, 2098 nt, Artificial Sequence
  mRNA product Design a-3 comprising derived and/or modified sequence from HRSV(A2)__F0 (opt11)
gggagagggcgcuuggcuugcaaggacccugagcugcggcauugaagcacacccaacccaacucgacugaagucagccucacugaaccggaucugagaaucuucucucucugggcuugccagggcucuccgaaccuagcuagcauccucuucaauuccaacuagaaagcuuaccauggaacuccucauacucaaagccaacgcaaucacaaccauacucaccgccgucaccuucugcuuugcaucuggccagaacaucacugaagaguucuaccaauccacaugcuccgccguaagcaaaggcuaccuauccgcccuacgcaccggcugguacaccagcguaaucaccauagaacucuccaauauaaaagaaaacaaaugcaacggcaccgacgcaaaagucaagcuaauaaaacaagaacucgacaaauacaaaaacgccguuaccgaacuccagcuacucaugcaaucgaccccagcaaccaacaaccgugcgagacgcgaacucccccgcuucaugaacuacacccuaaacaacgccaaaaagaccaacguaacucuauccaagaaacgcaaacgccgcuuccucggauuccuccucggcgucggcuccgcaaucgccagcggcgucgccguuagcaaaguccuucaccucgaaggagaaguaaacaaaauuaaaagcgcccucuuauccacaaacaaggccguaguaucccugucaaacggcgucuccguccuuacauccaaaguccucgaccucaagaacuacauagacaaacagcuacuacccauuguaaauaaacaaagcugcucaauuagcaacaucgaaaccguaaucgaguuccagcagaaaaacaacagacuucucgaaaucacccgcgaguucagcgucaacgccggcguaaccaccccugucucaacauacaugcuaaccaacagcgaacugcucucccucaucaacgacaugcccaucaccaacgaccaaaagaaacucaugagcaacaacguacaaaucgugcgccaacaguccuacucaauaaugucaaucaucaaagaagaagugcuagcauacgucguacaacuaccacucuacggcguaauagauacccccugcuggaagcuccauaccuccccacucuguaccaccaacaccaaagaaggcucaaacaucugccuaacgcgcacagaccguggaugguacugugacaacgccggcuccgucuccuucuucccucaagccgaaacaugcaaaguccaauccaacagagucuucugcgauaccaugaacucccugacacucccaagcgaagucaaccuuugcaacgucgauaucuuuaaccccaaauacgacugcaagaucaugacaucaaaaaccgacguauccuccucuguaauaaccucccuaggcgcaaucguaucaugcuacggcaaaaccaaauguaccgccuccaacaaaaaucgcggcaucaucaaaaccuucucgaacggcugcgacuacgucuccaacaaaggcguagacacaguuuccguaggcaacacccucuacuacgucaauaaacaggaaggcaagucccucuacgucaaaggcgaacccaucaucaauuucuacgacccccucguuuuccccuccgaugaguucgacgcaagcaucagccaggucaacgaaaagauaaaccagucccucgccuucauccgcaaaucagaugaacuccuucacaacguuaacgcaggcaagagcaccaccaacaucaugaucacaacuauaaucaucgucauaaucgucauccuacucucacuaaucgccgucggucuccuacuauauuguaaagcccgaucaacaccggucacacucuccaaagaccaacucuccggaaucaacaauaucgcuuucucgaacuaaggacuagucccuguucccagagcccacuuuuuuuucuuuuuuugaaauaaaauagccugucuuucagaucuaaaaaaaaaaaaaaaaaaaaaaaaaaaaaaaaaaaaaaaaaaaaaaaaaaaaaaaaaaaaaaaaugcaucccccccccccccccccccccccccccccccaaaggcucuuuucagagccaccagaauu

SEQ ID NO: 105 - RNA, 2047 nt, Artificial Sequence
  mRNA product Design a-4 comprising derived and/or modified sequence from HRSV(A2)__F0 (artificial)
gggagacuccugucgggcggaaguaggaggaguagaguuuaaaaacaguacucuuuuuccgguucgggacguaguugaagcaacgacaagccggauaaccgcucuugagacaggaagcuuaccauggaguugcuaauccucaaagcaaaugcaauuaccacaauccucacugcagucacauuuuguuuugcuucuggucaaaacaucacugaagaauuuuaucaaucaacaugcagugcaguuagcaaaggcuaucuuagugcucugagaacugguugguauaccaguguuauaacuauagaauuaaguaauaucaaggaaaauaaguguaauggaacagaugcuaagguaaaauugauaaaacaagaauuagauaaauauaaaaaugcuguaacagaauugcaguugcucaugcaaagcacaccagcaacaaacaaucgagccagaagagaacuaccaagguuuaugaauuauacacucaacaaugccaaaaaaaccaauguaacauuaagcaagaaaaggaaaagaagauuucuugguuuuuuguuagguguuggaucugcaaucgccaguggcguugcuguaucuaagguccugcaccuagaaggggaagugaacaagaucaaaagugcucuacuauccacaaacaaggcuguagucagcuuaucaaauggaguuagugucuuaaccagcaaaguguuagaccucaaaaacuauauagauaaacaauuguuaccuauugugaacaagcaaagcugcagcauaucaaauauagaaacugugauagaguuccaacaaaagaacaacagacuacuagagauuaccagggaauuuaguguuaaugcagguguaacuacaccuguaagcacuuacauguuaacuaauagugaauuauugucauuaaucaaugauaugccuauaacaaaugaucagaaaaaguuaauguccaacaauguucaaauaguuagacagcaaaguuacucuaucauguccauaauaaaagaggaagucuuagcauauguaguacaauuaccacuauaugguguuauagauacacccuguuggaaacuacacacauccccucuauguacaaccaacacaaaagaaggguccaacaucuguuuaacaagaacugacagaggaugguacugugacaaugcaggaucaguaucuuucuucccacaagcugaaacauguaaaguucaaucaaaucgaguauuuugugacacaaugaacaguuuaacauuaccaagugaaguaaaucucugcaauguugacauauucaaccccaaauaugauuguaaaauuaugacuucaaaaacagauguaagcagcuccguuaucacaucucuaggagccauugugucaugcuauggcaaaacuaaauguacagcauccaauaaaaaucguggaaucauaaagacauuuucuaacgggugcgauuauguaucaaauaaagggguggacacugugucuguagguaacacauuauauuauguaaauaagcaagaagguaaaagucucuauguaaaaggugaaccaauaauaaauuucuaugacccauuaguauuccccucugaugaauuugaugcaucaauaucucaagucaacgagaagauuaaccagagccuagcauuuauucguaaauccgaugaauuauuacauaauguaaaugcugguaaauccaccacaaauaucaugauaacuacuauaauuauagugauuauaguaauauuguuaucauuaauugcuguuggacugcucuuauacuguaaggccagaagcacaccagucacacuaagcaaagaucaacugagugguauaaauaauauugcauuuaguaacuaaggacuagucccuguucccagagcccacuuuuuuuucuuuuuuugaaauaaaauagccugucuuucagaucuaaaaaaaaaaaaaaaaaaaaaaaaaaaaaaaaaaaaaaaaaaaaaaaaaaaaaaaaaaaaaaaaugcaucccccccccccccccccccccccccccccccaaaggcucuuuucagagccaccagaauu

SEQ ID NO: 106 - RNA, 2047 nt, Artificial Sequence
  mRNA product Design a-4 comprising derived and/or modified sequence from HRSV(A2)__F0 (opt1)
gggagacuccugucgggcggaaguaggaggaguagaguuuaaaaacaguacucuuuuuccgguucgggacguaguugaagcaacgacaagccggauaaccgcucuugagacaggaagcuuaccauggagcugcucauccugaaggccaacgccaucaccaccauccugacggcggugaccuucugcuucgccagcggccagaacaucaccgaggaguucuaccaguccaccugcagcgccgucuccaagggguaccucagcgcccugcggacgggcugguacaccuccgugaucaccaucgagcugagcaacaucaaggagaacaagugcaacgggaccgacgccaaggugaagcucaucaagcaggagcuggacaaguacaagaacgcggucacggagcugcagcuccugaugcaguccaccccggcaaccaacaaccgcgcccggcgcgagcugccccgguucaugaacuacacccucaacaacgccaagaagacgaacgugacccugagcaagaagcgcaagcggcgcuuccugggcuuccuccugggggugggcuccgccaucgcgagcggcgucgccguguccaaggugcugcaccucgagggggaggucaacaagaucaagagcgcccugcuguccaccaacaaggccguggugagccucuccaacggcgucagcgugcugaccuccaaggugcuggaccucaagaacuacaucgacaagcagcugcugcccaucgucaacaagcagagcugcuccaucagcaacaucgagacggugaucgaguuccagcagaagaacaaccggcuccuggagaucacccgcgaguucagcgugaacgccggggucaccacccccguguccacguacaugcugaccaacagcgagcuccugucccugaucaacgacaugccgaucaccaacgaccagaagaagcucaugagcaacaacgugcagaucguccggcagcaguccuacagcaucauguccaucaucaaggaggaggugcuggcguacgugguccagcugccccucuacggcgugaucgacacccccugcuggaagcugcacacgagcccccugugcaccaccaacaccaaggagggguccaacaucugccucacgcgcaccgaccggggcugguacugcgacaacgccggcagcgucuccuucuucccgcaggccgagaccugcaaggugcagagcaaccgcguguucugcgacaccaugaacucccugacgcugcccagcgagguaaaccucugcaacgucgacaucuucaaccccaaguacgacugcaagaucaugaccuccaagaccgacgugagcuccagcgugaucaccucccugggggccaucgucagcugcuacggcaagacgaagugcaccgccagcaacaagaaccgggggaucaucaagaccuucuccaacggcugcgacuacgugagcaacaagggcguggacaccguguccgucgggaacacccuguacuacgugaacaagcaggagggcaagagccucuacgugaagggggagcccaucaucaacuucuacgacccgcuggucuuccccuccgacgaguucgacgcgagcaucucccaggugaacgagaagaucaaccagagccuggccuucauccgcaaguccgacgagcugcuccacaacgugaacgccggcaagagcacgaccaacaucaugaucaccaccaucaucaucgucaucaucgugauccugcugucccucaucgccguggggcugcugcucuacugcaaggcccggagcacgcccgucacccuguccaaggaccagcugagcggcaucaacaacaucgcguucuccaacugaggacuagucccuguucccagagcccacuuuuuuuucuuuuuuugaaauaaaauagccugucuuucagaucuaaaaaaaaaaaaaaaaaaaaaaaaaaaaaaaaaaaaaaaaaaaaaaaaaaaaaaaaaaaaaaaaugcaucccccccccccccccccccccccccccccccaaaggcucuuuucagagccaccagaauu

SEQ ID NO: 107 - RNA, 2047 nt, Artificial Sequence
  mRNA product Design a-4 comprising derived and/or modified sequence from HRSV(A2)__F0 (opt1)
gggagacuccugucgggcggaaguaggaggaguagaguuuaaaaacaguacucuuuuuccgguucgggacguaguugaagcaacgacaagccggauaaccgcucuugagacaggaagcuuaccauggagcugcucauccugaaggccaacgccaucaccaccauccugacggcggugaccuucugcuucgccagcggccagaacaucaccgaggaguucuaccaguccacgugcagcgccgucuccaagggguaccucagcgcccugcgcaccggcugguacaccuccgugaucaccaucgagcugagcaacaucaaggagaacaagugcaacgggaccgacgccaaggugaagcucaucaagcaggagcuggacaaguacaagaacgcggucacggagcugcagcuccugaugcaguccacccccgccaccaacaaccgggcccgccgggagcugccgcgcuucaugaacuacacccucaacaacgccaagaagacgaacgugacccugagcaagaagcggaagcgccgguuccugggcuuccuccugggggugggcuccgcgaucgccagcggcgucgccguguccaaggugcugcaccucgagggggaggucaacaagaucaagagcgcccugcuguccaccaacaaggccguggugagccucuccaacggcgucagcgugcugaccuccaaggugcuggaccucaagaacuacaucgacaagcagcugcugcccaucgucaacaagcagagcugcuccaucagcaacaucgagacggugaucgaguuccagcagaagaacaaccgccuccuggagaucacccgggaguucagcgugaacgcgggggucaccacccccguguccacguacaugcugaccaacagcgagcuccugucccugaucaacgacaugcccaucaccaacgaccagaagaagcucaugagcaacaacgugcagaucguccgccagcaguccuacagcaucauguccaucaucaaggaggaggugcuggccuacgugguccagcugccgcucuacggcgugaucgacacccccugcuggaagcugcacacgagcccccugugcaccaccaacaccaaggagggguccaacaucugccucacgcggaccgaccgcggcugguacugcgacaacgccggcagcgucuccuucuucccccaggccgagaccugcaaggugcagagcaaccggguguucugcgacaccaugaacucccugacgcugccgagcgaggucaaccucugcaacguggacaucuucaaccccaaguacgacugcaagaucaugaccuccaagaccgacgugagcuccagcgucaucaccucccugggggccaucgugagcugcuacggcaagacgaagugcaccgcgagcaacaagaaccgcgggaucaucaagaccuucuccaacggcugcgacuacgugagcaacaagggcgucgacaccguguccguggggaacacccuguacuacgucaacaagcaggagggcaagagccucuacgugaagggggagcccaucaucaacuucuacgacccccugguguucccguccgacgaguucgacgccagcaucucccaggucaacgagaagaucaaccagagccuggccuucauccggaaguccgacgagcuccugcacaacgugaacgccggcaagagcacgaccaacaucaugaucaccaccaucaucaucgugaucaucgucauccugcugucccucaucgccguggggcugcugcucuacugcaaggcgcgcagcacgcccgugacccuguccaaggaccagcugagcggcaucaacaacaucgccuucuccaacugaggacuagucccuguucccagagcccacuuuuuuuucuuuuuuugaaauaaaauagccugucuuucagaucuaaaaaaaaaaaaaaaaaaaaaaaaaaaaaaaaaaaaaaaaaaaaaaaaaaaaaaaaaaaaaaaaugcaucccccccccccccccccccccccccccccccaaaggcucuuuucagagccaccagaauu

SEQ ID NO: 108 - RNA, 2047 nt, Artificial Sequence
  mRNA product Design a-4 comprising derived and/or modified sequence from HRSV(A2)__F0 (opt2)
gggagacuccugucgggcggaaguaggaggaguagaguuuaaaaacaguacucuuuuuccgguucgggacguaguugaagcaacgacaagccggauaaccgcucuugagacaggaagcuuaccauggagcuccucauccucaaggccaacgccaucaccaccauccucaccgccgucaccuucugcuucgccuccggccagaacaucaccgaggaguucuaccaguccaccugcuccgccgucuccaagggcuaccucuccgcccuccgcaccggcugguacaccuccgucaucaccaucgagcucuccaacaucaaggagaacaagugcaacggcaccgacgccaaggucaagcucaucaagcaggagcucgacaaguacaagaacgccgucaccgagcuccagcuccucaugcaguccacccccgccaccaacaaccgcgcccgccgcgagcucccccgcuucaugaacuacacccucaacaacgccaagaagaccaacgucacccucuccaagaagcgcaagcgccgcuuccucggcuuccuccucggcgucggcuccgccaucgccuccggcgucgccgucuccaagguccuccaccucgagggcgaggucaacaagaucaaguccgcccuccucuccaccaacaaggccgucgucucccucuccaacggcgucuccguccucaccuccaagguccucgaccucaagaacuacaucgacaagcagcuccuccccaucgucaacaagcaguccugcuccaucuccaacaucgagaccgucaucgaguuccagcagaagaacaaccgccuccucgagaucacccgcgaguucuccgucaacgccggcgucaccacccccgucuccaccuacaugcucaccaacuccgagcuccucucccucaucaacgacaugcccaucaccaacgaccagaagaagcucauguccaacaacguccagaucguccgccagcaguccuacuccaucauguccaucaucaaggaggagguccucgccuacgucguccagcucccccucuacggcgucaucgacacccccugcuggaagcuccacaccuccccccucugcaccaccaacaccaaggagggcuccaacaucugccucacccgcaccgaccgcggcugguacugcgacaacgccggcuccgucuccuucuucccccaggccgagaccugcaagguccaguccaaccgcgucuucugcgacaccaugaacucccucacccuccccuccgaggucaaccucugcaacgucgacaucuucaaccccaaguacgacugcaagaucaugaccuccaagaccgacgucuccuccuccgucaucaccucccucggcgccaucgucuccugcuacggcaagaccaagugcaccgccuccaacaagaaccgcggcaucaucaagaccuucuccaacggcugcgacuacgucuccaacaagggcgucgacaccgucuccgucggcaacacccucuacuacgucaacaagcaggagggcaagucccucuacgucaagggcgagcccaucaucaacuucuacgacccccucgucuuccccuccgacgaguucgacgccuccaucucccaggucaacgagaagaucaaccagucccucgccuucauccgcaaguccgacgagcuccuccacaacgucaacgccggcaaguccaccaccaacaucaugaucaccaccaucaucaucgucaucaucgucauccuccucucccucaucgccgucggccuccuccucuacugcaaggcccgcuccacccccgucacccucuccaaggaccagcucuccggcaucaacaacaucgccuucuccaacugaggacuagucccuguucccagagcccacuuuuuuuucuuuuuuugaaauaaaauagccugucuuucagaucuaaaaaaaaaaaaaaaaaaaaaaaaaaaaaaaaaaaaaaaaaaaaaaaaaaaaaaaaaaaaaaaaugcaucccccccccccccccccccccccccccccccaaaggcucuuuucagagccaccagaauu

SEQ ID NO: 109 - RNA, 2047 nt, Artificial Sequence
  mRNA product Design a-4 comprising derived and/or modified sequence from HRSV(A2)__F0 (opt3)
gggagacuccugucgggcggaaguaggaggaguagaguuuaaaaacaguacucuuuuuccgguucgggacguaguugaagcaacgacaagccggauaaccgcucuugagacaggaagcuuaccauggagcugcucauccuuaaggccaacgcuauuaccacaauacugacugcagugacguucugcuuugccagcggccagaauaucaccgaagaguucuaccaauccacauguucugcggucucaaaaggguauuugagugcuuuaagaacuggaugguacaccagcguuauuacaaucgaacuguccaacauuaaggagaauaaaugcaacgguaccgacgccaaggugaaacuaaucaagcaggaacucgauaaguauaaaaaugcaguaacugagcugcagcuucugaugcagucuacacccgccaccaacaauagggcucggcgcgaguugccucgauuuaugaacuacacgcucaauaacgcaaagaaaacuaaugugacccugucgaagaaacguaagagaagguuccugggcuuucucuuaggggucggaucagccauagcuagcggcguggccguuaguaaggugcugcaccuugaaggugaggucaacaaaaucaaguccgcguugcugucuacaaauaaagcagugguaagccuauccaacgggguuucagugcucacuucuaagguccuggaccuuaaaaauuauauugauaagcaacuguugccaaucgugaacaaacagagcuguucuauuuccaacaucgaaaccgugauagaguuccagcagaagaauaaccggcuccuggagauuacacgcgaauuuucagucaaugccggaguuaccacgccggugagcacuuacauguuaacaaacagugagcugcucucucuuaucaaugacaugcccauuaccaacgaucaaaagaaacugauguccaauaacguacagaucgugagacagcagagcuauucgaucaugucuauuauaaaggaagaggucuuggcuuacgugguucaacuaccucuguacggcgugaucgacacuccaugcuggaaacuccauacauccccacuguguaccacgaauaccaaggaaggcucaaacauuugccuuacaaggacugaucgggggugguauugugacaaugccggaagugucagcuucuuuccucaggcagagaccugcaaagugcaguccaaccgcguauucugugauacaaugaauagucugacuuugccaagcgagguuaaccucugcaauguggacaucuuuaaccccaaguacgauuguaagauaaugaccucaaaaacagacgucaguuccagcgugauuaccucucugggugcuaucgucucaugcuauggcaagacuaaaugcacggccaguaacaagaaucgagggaucauuaaaacauucagcaacggaugugauuacguguccaauaagggcguugacaccgugucuguagguaacacuuuauauuacgucaauaagcaagaagggaaaucgcuguaugugaagggagagccuaucauuaacuuuuacgacccccuaguuuucccgagcgaugaauuugacgcguccauaucacaggugaaugagaaaaucaaccagagucucgccuucauuagaaagucugaugaacugcuucacaaugucaacgcaggcaaaagcaccacaaauaucaugaucaccacuauuauaaucgugauuaucguaauuuugcugucccucaucgcugugggccugcuucuguacugcaaggccaggucaacacccguuacguugagcaaggaccagcucucugggauaaacaauaucgcuuucuccaacugaggacuagucccuguucccagagcccacuuuuuuuucuuuuuuugaaauaaaauagccugucuuucagaucuaaaaaaaaaaaaaaaaaaaaaaaaaaaaaaaaaaaaaaaaaaaaaaaaaaaaaaaaaaaaaaaaugcaucccccccccccccccccccccccccccccccaaaggcucuuuucagagccaccagaauu

SEQ ID NO: 110 - RNA, 2047 nt, Artificial Sequence
  mRNA product Design a-4 comprising derived and/or modified sequence from HRSV(A2)__F0 (opt4)
gggagacuccugucgggcggaaguaggaggaguagaguuuaaaaacaguacucuuuuuccgguucgggacguaguugaagcaacgacaagccggauaaccgcucuugagacaggaagcuuaccauggagcugcugauccugaaggccaacgccaucaccaccauccugaccgccgugaccuucugcuucgccagcggccagaacaucaccgaggaguucuaccagagcaccugcagcgccgugagcaagggcuaccugagcgcccugagaaccggcugguacaccagcgugaucaccaucgagcugagcaacaucaaggagaacaagugcaacggcaccgacgccaaggugaagcugaucaagcaggagcuggacaaguacaagaacgccgugaccgagcugcagcugcugaugcagagcacccccgccaccaacaacagagccagaagagagcugcccagauucaugaacuacacccugaacaacgccaagaagaccaacgugacccugagcaagaagagaaagagaagauuccugggcuuccugcugggcgugggcagcgccaucgccagcggcguggccgugagcaaggugcugcaccuggagggcgaggugaacaagaucaagagcgcccugcugagcaccaacaaggccguggugagccugagcaacggcgugagcgugcugaccagcaaggugcuggaccugaagaacuacaucgacaagcagcugcugcccaucgugaacaagcagagcugcagcaucagcaacaucgagaccgugaucgaguuccagcagaagaacaacagacugcuggagaucaccagagaguucagcgugaacgccggcgugaccacccccgugagcaccuacaugcugaccaacagcgagcugcugagccugaucaacgacaugcccaucaccaacgaccagaagaagcugaugagcaacaacgugcagaucgugagacagcagagcuacagcaucaugagcaucaucaaggaggaggugcuggccuacguggugcagcugccccuguacggcgugaucgacacccccugcuggaagcugcacaccagcccccugugcaccaccaacaccaaggagggcagcaacaucugccugaccagaaccgacagaggcugguacugcgacaacgccggcagcgugagcuucuucccccaggccgagaccugcaaggugcagagcaacagaguguucugcgacaccaugaacagccugacccugcccagcgaggugaaccugugcaacguggacaucuucaaccccaaguacgacugcaagaucaugaccagcaagaccgacgugagcagcagcgugaucaccagccugggcgccaucgugagcugcuacggcaagaccaagugcaccgccagcaacaagaacagaggcaucaucaagaccuucagcaacggcugcgacuacgugagcaacaagggcguggacaccgugagcgugggcaacacccuguacuacgugaacaagcaggagggcaagagccuguacgugaagggcgagcccaucaucaacuucuacgacccccugguguuccccagcgacgaguucgacgccagcaucagccaggugaacgagaagaucaaccagagccuggccuucaucagaaagagcgacgagcugcugcacaacgugaacgccggcaagagcaccaccaacaucaugaucaccaccaucaucaucgugaucaucgugauccugcugagccugaucgccgugggccugcugcuguacugcaaggccagaagcacccccgugacccugagcaaggaccagcugagcggcaucaacaacaucgccuucagcaacugaggacuagucccuguucccagagcccacuuuuuuuucuuuuuuugaaauaaaauagccugucuuucagaucuaaaaaaaaaaaaaaaaaaaaaaaaaaaaaaaaaaaaaaaaaaaaaaaaaaaaaaaaaaaaaaaaugcaucccccccccccccccccccccccccccccccaaaggcucuuuucagagccaccagaauu

SEQ ID NO: 111 - RNA, 2047 nt, Artificial Sequence
  mRNA product Design a-4 comprising derived and/or modified sequence from HRSV(A2)__F0 (opt5)
gggagacuccugucgggcggaaguaggaggaguagaguuuaaaaacaguacucuuuuuccgguucgggacguaguugaagcaacgacaagccggauaaccgcucuugagacaggaagcuuaccauggagcugcucauccugaaggccaacgcuauuaccacaauccuuacggccgugaccuucugcuuugcgagcggccagaauauuacagaagaguucuaccaauccaccuguucugcugucagcaaaggguaucuguccgcccucagaacaggaugguacaccucuguuaucacaauugaacugagcaacaucaaggagaauaaaugcaacggcaccgacgccaaggugaaacuuaucaagcaggaacuggauaaguauaaaaaugcugugacggagcuccagcugcugaugcaguccacccccgccacaaacaaucgggcucgcagagagcucccucgguuuaugaacuacacccugaauaacgccaagaaaacaaaugucacccuuucuaagaaacgcaagagacgguuccugggguuucuccugggagugggcagcgcgauugccuccgggguugcugugagcaagguccuucaccuggaaggagaggugaacaaaaucaagucugcccuccuguccacgaauaaagcuguugugagccugucuaacggcgucuccgugcucacaagcaaggugcuggaccuuaaaaauuauauugauaagcaacugcucccgaucgucaacaaacagucuuguuccauuagcaacaucgaaaccguuauugaguuccagcagaagaauaaccgccugcuugagaucacaagagaauuuuccgugaaugccggcgugaccacccccgucucuacauacaugcugacgaacagcgagcuccugucccugaucaaugacaugccuauuaccaacgaucaaaagaaacucaugagcaauaacgugcagaucguucggcagcagucuuauuccauuaugagcaucauuaaggaagaggugcuggcguacgucgugcaacuuccccuguacgggguuaucgacacaccuugcuggaaacuccauaccucuccccuguguacaaccaauacgaaggaaggaagcaacaucugccuuacacgcaccgauagaggcugguauugugacaaugccggguccgugucuuucuuuccucaggcugagaccugcaaaguccagagcaaccggguguucugugauacaaugaacucccugacccucccgagcgaggucaaucugugcaauguggacauuuuuaaccccaaguacgauuguaagaucaugacaucuaaaacggacguuuccagcucugugauuaccucccugggagccaucgucagcugcuauggcaagacaaaaugcaccgcuuccaacaagaaucgcgggauuaucaaaacauucucuaacggaugugauuacgugagcaauaagggcguugacaccguguccgucggcaacacgcucuauuacgugaauaagcaagaagggaaaucucuguaugugaagggagagccuaucauuaacuuuuacgacccccuuguuuucccuagcgaugaauuugacgccuccaucagccaggucaaugagaaaauuaaccagucucuggccuucaucagaaaguccgaugaacuccugcacaaugugaacgcuggcaaaagcaccacaaauauuaugaucaccacaauuaucaucgugauuaucgucauucugcuuucucucaucgcgguggggcugcugcucuacugcaaggcccgguccacccccguuacgcugagcaaggaccagcuuucuggaauuaacaauaucgcuuucagcaacugaggacuagucccuguucccagagcccacuuuuuuuucuuuuuuugaaauaaaauagccugucuuucagaucuaaaaaaaaaaaaaaaaaaaaaaaaaaaaaaaaaaaaaaaaaaaaaaaaaaaaaaaaaaaaaaaaugcaucccccccccccccccccccccccccccccccaaaggcucuuuucagagccaccagaauu

SEQ ID NO: 112 - RNA, 2047 nt, Artificial Sequence
  mRNA product Design a-4 comprising derived and/or modified sequence from HRSV(A2)__F0 (opt6)
gggagacuccugucgggcggaaguaggaggaguagaguuuaaaaacaguacucuuuuuccgguucgggacguaguugaagcaacgacaagccggauaaccgcucuugagacaggaagcuuaccauggaacuucuaauauuaaaagcuaacgcaaucacuacuaucuuaaccgcaguaacauucuguuuugcauccggccaaaacauaacagaagaauuuuaccaaucaacuugcucugcagucucaaaagguuaucuaucugcauuaagaacaggcugguacaccucaguaauaacgaucgaacuaucaaacaucaaagaaaacaaauguaauggaacagacgcaaaaguaaaacuaaucaaacaagaacuagacaaauacaaaaacgcaguaaccgaacuccaacuccucaugcaaaguacaccagcaacaaauaacagagcaagacgugaacuaccacguuuuaugaauuacacgcucaauaacgcaaaaaaaacaaauguuacccuaucaaaaaaacgaaaaagaagauuccucggauuccuacuaggcguaggcucagcaauagcuucaggaguagcaguaucaaaaguacuccaccucgaaggagaaguaaacaaaaucaaaagcgcucuccucucaacaaacaaagcaguuguuucacucucaaacggaguaucaguacuaaccucaaaaguacuugaccuaaaaaauuauauagacaaacaacuauuaccaauaguaaacaaacaaagcugcuccaucuccaacaucgagacagucauagaauuucaacaaaaaaauaaccgccuauuagaaauaaccagagaauuuucaguaaacgcaggaguaacuaccccaguaucaacauauauguuaacaaacucagaacuccuaagucuaaucaacgacaugccaauaaccaacgaccaaaaaaaacuaaugagcaacaauguacaaauaguucgucaacaaucuuacuccauaaugucuauaauaaaagaagaaguacucgccuauguaguccaacuaccacuauacggagucaucgauacaccaugcuggaaacuccacacauccccacucuguacuacuaacaccaaagaagguucaaauauaugccuaaccagaacagauagagguugguacugcgauaaugcaggaucaguauccuuuuucccccaagccgaaacaugcaaaguucaauccaauagaguauuuugugauacaaugaacucuuuaacccucccauccgaagucaaucuauguaacgucgacauauuuaacccaaaauacgauugcaaaauaaugacaucaaaaacagacgucucauccucaguuauaacguccuuaggcgcuauaguaucaugcuacggcaaaacaaaauguacagcaucaaacaaaaacagaggaaucauaaaaacuuucucuaacgguugcgacuauguauccaacaaaggugucgacacaguauccguaggcaacacccuuuacuauguuaauaaacaagaaggaaaaucucuauauguaaaaggcgaaccaauuauaaauuuuuacgacccccuugucuuucccucugacgaauuugacgcuuccauaucacaagucaacgaaaaaaucaaccaaucccucgcauucauacgcaaaucagacgaacuacuacauaacgucaacgcaggcaaauccacaacaaacauaaugauaaccacaaucauaauuguaauaauaguaauacuacuuucucuaauagcagucggauuacucuuauacuguaaagcucgaucaacaccagucacccucucuaaagaucaacuauccggaaucaacaacauagcuuucucaaacuaaggacuagucccuguucccagagcccacuuuuuuuucuuuuuuugaaauaaaauagccugucuuucagaucuaaaaaaaaaaaaaaaaaaaaaaaaaaaaaaaaaaaaaaaaaaaaaaaaaaaaaaaaaaaaaaaaugcaucccccccccccccccccccccccccccccccaaaggcucuuuucagagccaccagaauu

SEQ ID NO: 113 - RNA, 2047 nt, Artificial Sequence
  mRNA product Design a-4 comprising derived and/or modified sequence from HRSV(A2)__F0 (opt11)
gggagacuccugucgggcggaaguaggaggaguagaguuuaaaaacaguacucuuuuuccgguucgggacguaguugaagcaacgacaagccggauaaccgcucuugagacaggaagcuuaccauggaacuccucauacucaaagccaacgcaaucacaaccauacucaccgccgucaccuucugcuuugcaucuggccagaacaucacugaagaguucuaccaauccacaugcuccgccguaagcaaaggcuaccuauccgcccuacgcaccggcugguacaccagcguaaucaccauagaacucuccaauauaaaagaaaacaaaugcaacggcaccgacgcaaaagucaagcuaauaaaacaagaacucgacaaauacaaaaacgccguuaccgaacuccagcuacucaugcaaucgaccccagcaaccaacaaccgugcgagacgcgaacucccccgcuucaugaacuacacccuaaacaacgccaaaaagaccaacguaacucuauccaagaaacgcaaacgccgcuuccucggauuccuccucggcgucggcuccgcaaucgccagcggcgucgccguuagcaaaguccuucaccucgaaggagaaguaaacaaaauuaaaagcgcccucuuauccacaaacaaggccguaguaucccugucaaacggcgucuccguccuuacauccaaaguccucgaccucaagaacuacauagacaaacagcuacuacccauuguaaauaaacaaagcugcucaauuagcaacaucgaaaccguaaucgaguuccagcagaaaaacaacagacuucucgaaaucacccgcgaguucagcgucaacgccggcguaaccaccccugucucaacauacaugcuaaccaacagcgaacugcucucccucaucaacgacaugcccaucaccaacgaccaaaagaaacucaugagcaacaacguacaaaucgugcgccaacaguccuacucaauaaugucaaucaucaaagaagaagugcuagcauacgucguacaacuaccacucuacggcguaauagauacccccugcuggaagcuccauaccuccccacucuguaccaccaacaccaaagaaggcucaaacaucugccuaacgcgcacagaccguggaugguacugugacaacgccggcuccgucuccuucuucccucaagccgaaacaugcaaaguccaauccaacagagucuucugcgauaccaugaacucccugacacucccaagcgaagucaaccuuugcaacgucgauaucuuuaaccccaaauacgacugcaagaucaugacaucaaaaaccgacguauccuccucuguaauaaccucccuaggcgcaaucguaucaugcuacggcaaaaccaaauguaccgccuccaacaaaaaucgcggcaucaucaaaaccuucucgaacggcugcgacuacgucuccaacaaaggcguagacacaguuuccguaggcaacacccucuacuacgucaauaaacaggaaggcaagucccucuacgucaaaggcgaacccaucaucaauuucuacgacccccucguuuuccccuccgaugaguucgacgcaagcaucagccaggucaacgaaaagauaaaccagucccucgccuucauccgcaaaucagaugaacuccuucacaacguuaacgcaggcaagagcaccaccaacaucaugaucacaacuauaaucaucgucauaaucgucauccuacucucacuaaucgccgucggucuccuacuauauuguaaagcccgaucaacaccggucacacucuccaaagaccaacucuccggaaucaacaauaucgcuuucucgaacuaaggacuagucccuguucccagagcccacuuuuuuuucuuuuuuugaaauaaaauagccugucuuucagaucuaaaaaaaaaaaaaaaaaaaaaaaaaaaaaaaaaaaaaaaaaaaaaaaaaaaaaaaaaaaaaaaaugcaucccccccccccccccccccccccccccccccaaaggcucuuuucagagccaccagaauu

SEQ ID NO: 114 - RNA, 1993 nt, Artificial Sequence
  mRNA product Design a-5 comprising derived and/or modified sequence from HRSV(A2)__F0 (artificial)
gggagacuuucccauucuguagcagaauuugguguugccuguggucuuggucccgcggagaagcuuaccauggaguugcuaauccucaaagcaaaugcaauuaccacaauccucacugcagucacauuuuguuuugcuucuggucaaaacaucacugaagaauuuuaucaaucaacaugcagugcaguuagcaaaggcuaucuuagugcucugagaacugguugguauaccaguguuauaacuauagaauuaaguaauaucaaggaaaauaaguguaauggaacagaugcuaagguaaaauugauaaaacaagaauuagauaaauauaaaaaugcuguaacagaauugcaguugcucaugcaaagcacaccagcaacaaacaaucgagccagaagagaacuaccaagguuuaugaauuauacacucaacaaugccaaaaaaaccaauguaacauuaagcaagaaaaggaaaagaagauuucuugguuuuuuguuagguguuggaucugcaaucgccaguggcguugcuguaucuaagguccugcaccuagaaggggaagugaacaagaucaaaagugcucuacuauccacaaacaaggcuguagucagcuuaucaaauggaguuagugucuuaaccagcaaaguguuagaccucaaaaacuauauagauaaacaauuguuaccuauugugaacaagcaaagcugcagcauaucaaauauagaaacugugauagaguuccaacaaaagaacaacagacuacuagagauuaccagggaauuuaguguuaaugcagguguaacuacaccuguaagcacuuacauguuaacuaauagugaauuauugucauuaaucaaugauaugccuauaacaaaugaucagaaaaaguuaauguccaacaauguucaaauaguuagacagcaaaguuacucuaucauguccauaauaaaagaggaagucuuagcauauguaguacaauuaccacuauaugguguuauagauacacccuguuggaaacuacacacauccccucuauguacaaccaacacaaaagaaggguccaacaucuguuuaacaagaacugacagaggaugguacugugacaaugcaggaucaguaucuuucuucccacaagcugaaacauguaaaguucaaucaaaucgaguauuuugugacacaaugaacaguuuaacauuaccaagugaaguaaaucucugcaauguugacauauucaaccccaaauaugauuguaaaauuaugacuucaaaaacagauguaagcagcuccguuaucacaucucuaggagccauugugucaugcuauggcaaaacuaaauguacagcauccaauaaaaaucguggaaucauaaagacauuuucuaacgggugcgauuauguaucaaauaaagggguggacacugugucuguagguaacacauuauauuauguaaauaagcaagaagguaaaagucucuauguaaaaggugaaccaauaauaaauuucuaugacccauuaguauuccccucugaugaauuugaugcaucaauaucucaagucaacgagaagauuaaccagagccuagcauuuauucguaaauccgaugaauuauuacauaauguaaaugcugguaaauccaccacaaauaucaugauaacuacuauaauuauagugauuauaguaauauuguuaucauuaauugcuguuggacugcucuuauacuguaaggccagaagcacaccagucacacuaagcaaagaucaacugagugguauaaauaauauugcauuuaguaacuaaggacuagucccuguucccagagcccacuuuuuuuucuuuuuuugaaauaaaauagccugucuuucagaucuaaaaaaaaaaaaaaaaaaaaaaaaaaaaaaaaaaaaaaaaaaaaaaaaaaaaaaaaaaaaaaaaugcaucccccccccccccccccccccccccccccccaaaggcucuuuucagagccaccagaauu

SEQ ID NO: 115 - RNA, 1993 nt, Artificial Sequence
  mRNA product Design a-5 comprising derived and/or modified sequence from HRSV(A2)__F0 (opt1)
gggagacuuucccauucuguagcagaauuugguguugccuguggucuuggucccgcggagaagcuuaccauggagcugcucauccugaaggccaacgccaucaccaccauccugacggcggugaccuucugcuucgccagcggccagaacaucaccgaggaguucuaccaguccaccugcagcgccgucuccaagggguaccucagcgcccugcggacgggcugguacaccuccgugaucaccaucgagcugagcaacaucaaggagaacaagugcaacgggaccgacgccaaggugaagcucaucaagcaggagcuggacaaguacaagaacgcggucacggagcugcagcuccugaugcaguccaccccggcaaccaacaaccgcgcccggcgcgagcugccccgguucaugaacuacacccucaacaacgccaagaagacgaacgugacccugagcaagaagcgcaagcggcgcuuccugggcuuccuccugggggugggcuccgccaucgcgagcggcgucgccguguccaaggugcugcaccucgagggggaggucaacaagaucaagagcgcccugcuguccaccaacaaggccguggugagccucuccaacggcgucagcgugcugaccuccaaggugcuggaccucaagaacuacaucgacaagcagcugcugcccaucgucaacaagcagagcugcuccaucagcaacaucgagacggugaucgaguuccagcagaagaacaaccggcuccuggagaucacccgcgaguucagcgugaacgccggggucaccacccccguguccacguacaugcugaccaacagcgagcuccugucccugaucaacgacaugccgaucaccaacgaccagaagaagcucaugagcaacaacgugcagaucguccggcagcaguccuacagcaucauguccaucaucaaggaggaggugcuggcguacgugguccagcugccccucuacggcgugaucgacacccccugcuggaagcugcacacgagcccccugugcaccaccaacaccaaggagggguccaacaucugccucacgcgcaccgaccggggcugguacugcgacaacgccggcagcgucuccuucuucccgcaggccgagaccugcaaggugcagagcaaccgcguguucugcgacaccaugaacucccugacgcugcccagcgagguaaaccucugcaacgucgacaucuucaaccccaaguacgacugcaagaucaugaccuccaagaccgacgugagcuccagcgugaucaccucccugggggccaucgucagcugcuacggcaagacgaagugcaccgccagcaacaagaaccgggggaucaucaagaccuucuccaacggcugcgacuacgugagcaacaagggcguggacaccguguccgucgggaacacccuguacuacgugaacaagcaggagggcaagagccucuacgugaagggggagcccaucaucaacuucuacgacccgcuggucuuccccuccgacgaguucgacgcgagcaucucccaggugaacgagaagaucaaccagagccuggccuucauccgcaaguccgacgagcugcuccacaacgugaacgccggcaagagcacgaccaacaucaugaucaccaccaucaucaucgucaucaucgugauccugcugucccucaucgccguggggcugcugcucuacugcaaggcccggagcacgcccgucacccuguccaaggaccagcugagcggcaucaacaacaucgcguucuccaacugaggacuagucccuguucccagagcccacuuuuuuuucuuuuuuugaaauaaaauagccugucuuucagaucuaaaaaaaaaaaaaaaaaaaaaaaaaaaaaaaaaaaaaaaaaaaaaaaaaaaaaaaaaaaaaaaaugcaucccccccccccccccccccccccccccccccaaaggcucuuuucagagccaccagaauu

SEQ ID NO: 116 - RNA, 1993 nt, Artificial Sequence
  mRNA product Design a-5 comprising derived and/or modified sequence from HRSV(A2)__F0 (opt1)
gggagacuuucccauucuguagcagaauuugguguugccuguggucuuggucccgcggagaagcuuaccauggagcugcucauccugaaggccaacgccaucaccaccauccugacggcggugaccuucugcuucgccagcggccagaacaucaccgaggaguucuaccaguccacgugcagcgccgucuccaagggguaccucagcgcccugcgcaccggcugguacaccuccgugaucaccaucgagcugagcaacaucaaggagaacaagugcaacgggaccgacgccaaggugaagcucaucaagcaggagcuggacaaguacaagaacgcggucacggagcugcagcuccugaugcaguccacccccgccaccaacaaccgggcccgccgggagcugccgcgcuucaugaacuacacccucaacaacgccaagaagacgaacgugacccugagcaagaagcggaagcgccgguuccugggcuuccuccugggggugggcuccgcgaucgccagcggcgucgccguguccaaggugcugcaccucgagggggaggucaacaagaucaagagcgcccugcuguccaccaacaaggccguggugagccucuccaacggcgucagcgugcugaccuccaaggugcuggaccucaagaacuacaucgacaagcagcugcugcccaucgucaacaagcagagcugcuccaucagcaacaucgagacggugaucgaguuccagcagaagaacaaccgccuccuggagaucacccgggaguucagcgugaacgcgggggucaccacccccguguccacguacaugcugaccaacagcgagcuccugucccugaucaacgacaugcccaucaccaacgaccagaagaagcucaugagcaacaacgugcagaucguccgccagcaguccuacagcaucauguccaucaucaaggaggaggugcuggccuacgugguccagcugccgcucuacggcgugaucgacacccccugcuggaagcugcacacgagcccccugugcaccaccaacaccaaggagggguccaacaucugccucacgcggaccgaccgcggcugguacugcgacaacgccggcagcgucuccuucuucccccaggccgagaccugcaaggugcagagcaaccggguguucugcgacaccaugaacucccugacgcugccgagcgaggucaaccucugcaacguggacaucuucaaccccaaguacgacugcaagaucaugaccuccaagaccgacgugagcuccagcgucaucaccucccugggggccaucgugagcugcuacggcaagacgaagugcaccgcgagcaacaagaaccgcgggaucaucaagaccuucuccaacggcugcgacuacgugagcaacaagggcgucgacaccguguccguggggaacacccuguacuacgucaacaagcaggagggcaagagccucuacgugaagggggagcccaucaucaacuucuacgacccccugguguucccguccgacgaguucgacgccagcaucucccaggucaacgagaagaucaaccagagccuggccuucauccggaaguccgacgagcuccugcacaacgugaacgccggcaagagcacgaccaacaucaugaucaccaccaucaucaucgugaucaucgucauccugcugucccucaucgccguggggcugcugcucuacugcaaggcgcgcagcacgcccgugacccuguccaaggaccagcugagcggcaucaacaacaucgccuucuccaacugaggacuagucccuguucccagagcccacuuuuuuuucuuuuuuugaaauaaaauagccugucuuucagaucuaaaaaaaaaaaaaaaaaaaaaaaaaaaaaaaaaaaaaaaaaaaaaaaaaaaaaaaaaaaaaaaaugcaucccccccccccccccccccccccccccccccaaaggcucuuuucagagccaccagaauu

SEQ ID NO: 117 - RNA, 1993 nt, Artificial Sequence
  mRNA product Design a-5 comprising derived and/or modified sequence from HRSV(A2)__F0 (opt2)
gggagacuuucccauucuguagcagaauuugguguugccuguggucuuggucccgcggagaagcuuaccauggagcuccucauccucaaggccaacgccaucaccaccauccucaccgccgucaccuucugcuucgccuccggccagaacaucaccgaggaguucuaccaguccaccugcuccgccgucuccaagggcuaccucuccgcccuccgcaccggcugguacaccuccgucaucaccaucgagcucuccaacaucaaggagaacaagugcaacggcaccgacgccaaggucaagcucaucaagcaggagcucgacaaguacaagaacgccgucaccgagcuccagcuccucaugcaguccacccccgccaccaacaaccgcgcccgccgcgagcucccccgcuucaugaacuacacccucaacaacgccaagaagaccaacgucacccucuccaagaagcgcaagcgccgcuuccucggcuuccuccucggcgucggcuccgccaucgccuccggcgucgccgucuccaagguccuccaccucgagggcgaggucaacaagaucaaguccgcccuccucuccaccaacaaggccgucgucucccucuccaacggcgucuccguccucaccuccaagguccucgaccucaagaacuacaucgacaagcagcuccuccccaucgucaacaagcaguccugcuccaucuccaacaucgagaccgucaucgaguuccagcagaagaacaaccgccuccucgagaucacccgcgaguucuccgucaacgccggcgucaccacccccgucuccaccuacaugcucaccaacuccgagcuccucucccucaucaacgacaugcccaucaccaacgaccagaagaagcucauguccaacaacguccagaucguccgccagcaguccuacuccaucauguccaucaucaaggaggagguccucgccuacgucguccagcucccccucuacggcgucaucgacacccccugcuggaagcuccacaccuccccccucugcaccaccaacaccaaggagggcuccaacaucugccucacccgcaccgaccgcggcugguacugcgacaacgccggcuccgucuccuucuucccccaggccgagaccugcaagguccaguccaaccgcgucuucugcgacaccaugaacucccucacccuccccuccgaggucaaccucugcaacgucgacaucuucaaccccaaguacgacugcaagaucaugaccuccaagaccgacgucuccuccuccgucaucaccucccucggcgccaucgucuccugcuacggcaagaccaagugcaccgccuccaacaagaaccgcggcaucaucaagaccuucuccaacggcugcgacuacgucuccaacaagggcgucgacaccgucuccgucggcaacacccucuacuacgucaacaagcaggagggcaagucccucuacgucaagggcgagcccaucaucaacuucuacgacccccucgucuuccccuccgacgaguucgacgccuccaucucccaggucaacgagaagaucaaccagucccucgccuucauccgcaaguccgacgagcuccuccacaacgucaacgccggcaaguccaccaccaacaucaugaucaccaccaucaucaucgucaucaucgucauccuccucucccucaucgccgucggccuccuccucuacugcaaggcccgcuccacccccgucacccucuccaaggaccagcucuccggcaucaacaacaucgccuucuccaacugaggacuagucccuguucccagagcccacuuuuuuuucuuuuuuugaaauaaaauagccugucuuucagaucuaaaaaaaaaaaaaaaaaaaaaaaaaaaaaaaaaaaaaaaaaaaaaaaaaaaaaaaaaaaaaaaaugcaucccccccccccccccccccccccccccccccaaaggcucuuuucagagccaccagaauu

SEQ ID NO: 118 - RNA, 1993 nt, Artificial Sequence
  mRNA product Design a-5 comprising derived and/or modified sequence from HRSV(A2)__F0 (opt3)
gggagacuuucccauucuguagcagaauuugguguugccuguggucuuggucccgcggagaagcuuaccauggagcugcucauccuuaaggccaacgcuauuaccacaauacugacugcagugacguucugcuuugccagcggccagaauaucaccgaagaguucuaccaauccacauguucugcggucucaaaaggguauuugagugcuuuaagaacuggaugguacaccagcguuauuacaaucgaacuguccaacauuaaggagaauaaaugcaacgguaccgacgccaaggugaaacuaaucaagcaggaacucgauaaguauaaaaaugcaguaacugagcugcagcuucugaugcagucuacacccgccaccaacaauagggcucggcgcgaguugccucgauuuaugaacuacacgcucaauaacgcaaagaaaacuaaugugacccugucgaagaaacguaagagaagguuccugggcuuucucuuaggggucggaucagccauagcuagcggcguggccguuaguaaggugcugcaccuugaaggugaggucaacaaaaucaaguccgcguugcugucuacaaauaaagcagugguaagccuauccaacgggguuucagugcucacuucuaagguccuggaccuuaaaaauuauauugauaagcaacuguugccaaucgugaacaaacagagcuguucuauuuccaacaucgaaaccgugauagaguuccagcagaagaauaaccggcuccuggagauuacacgcgaauuuucagucaaugccggaguuaccacgccggugagcacuuacauguuaacaaacagugagcugcucucucuuaucaaugacaugcccauuaccaacgaucaaaagaaacugauguccaauaacguacagaucgugagacagcagagcuauucgaucaugucuauuauaaaggaagaggucuuggcuuacgugguucaacuaccucuguacggcgugaucgacacuccaugcuggaaacuccauacauccccacuguguaccacgaauaccaaggaaggcucaaacauuugccuuacaaggacugaucgggggugguauugugacaaugccggaagugucagcuucuuuccucaggcagagaccugcaaagugcaguccaaccgcguauucugugauacaaugaauagucugacuuugccaagcgagguuaaccucugcaauguggacaucuuuaaccccaaguacgauuguaagauaaugaccucaaaaacagacgucaguuccagcgugauuaccucucugggugcuaucgucucaugcuauggcaagacuaaaugcacggccaguaacaagaaucgagggaucauuaaaacauucagcaacggaugugauuacguguccaauaagggcguugacaccgugucuguagguaacacuuuauauuacgucaauaagcaagaagggaaaucgcuguaugugaagggagagccuaucauuaacuuuuacgacccccuaguuuucccgagcgaugaauuugacgcguccauaucacaggugaaugagaaaaucaaccagagucucgccuucauuagaaagucugaugaacugcuucacaaugucaacgcaggcaaaagcaccacaaauaucaugaucaccacuauuauaaucgugauuaucguaauuuugcugucccucaucgcugugggccugcuucuguacugcaaggccaggucaacacccguuacguugagcaaggaccagcucucugggauaaacaauaucgcuuucuccaacugaggacuagucccuguucccagagcccacuuuuuuuucuuuuuuugaaauaaaauagccugucuuucagaucuaaaaaaaaaaaaaaaaaaaaaaaaaaaaaaaaaaaaaaaaaaaaaaaaaaaaaaaaaaaaaaaaugcaucccccccccccccccccccccccccccccccaaaggcucuuuucagagccaccagaauu

SEQ ID NO: 119 - RNA, 1993 nt, Artificial Sequence
  mRNA product Design a-5 comprising derived and/or modified sequence from HRSV(A2)__F0 (opt4)
gggagacuuucccauucuguagcagaauuugguguugccuguggucuuggucccgcggagaagcuuaccauggagcugcugauccugaaggccaacgccaucaccaccauccugaccgccgugaccuucugcuucgccagcggccagaacaucaccgaggaguucuaccagagcaccugcagcgccgugagcaagggcuaccugagcgcccugagaaccggcugguacaccagcgugaucaccaucgagcugagcaacaucaaggagaacaagugcaacggcaccgacgccaaggugaagcugaucaagcaggagcuggacaaguacaagaacgccgugaccgagcugcagcugcugaugcagagcacccccgccaccaacaacagagccagaagagagcugcccagauucaugaacuacacccugaacaacgccaagaagaccaacgugacccugagcaagaagagaaagagaagauuccugggcuuccugcugggcgugggcagcgccaucgccagcggcguggccgugagcaaggugcugcaccuggagggcgaggugaacaagaucaagagcgcccugcugagcaccaacaaggccguggugagccugagcaacggcgugagcgugcugaccagcaaggugcuggaccugaagaacuacaucgacaagcagcugcugcccaucgugaacaagcagagcugcagcaucagcaacaucgagaccgugaucgaguuccagcagaagaacaacagacugcuggagaucaccagagaguucagcgugaacgccggcgugaccacccccgugagcaccuacaugcugaccaacagcgagcugcugagccugaucaacgacaugcccaucaccaacgaccagaagaagcugaugagcaacaacgugcagaucgugagacagcagagcuacagcaucaugagcaucaucaaggaggaggugcuggccuacguggugcagcugccccuguacggcgugaucgacacccccugcuggaagcugcacaccagcccccugugcaccaccaacaccaaggagggcagcaacaucugccugaccagaaccgacagaggcugguacugcgacaacgccggcagcgugagcuucuucccccaggccgagaccugcaaggugcagagcaacagaguguucugcgacaccaugaacagccugacccugcccagcgaggugaaccugugcaacguggacaucuucaaccccaaguacgacugcaagaucaugaccagcaagaccgacgugagcagcagcgugaucaccagccugggcgccaucgugagcugcuacggcaagaccaagugcaccgccagcaacaagaacagaggcaucaucaagaccuucagcaacggcugcgacuacgugagcaacaagggcguggacaccgugagcgugggcaacacccuguacuacgugaacaagcaggagggcaagagccuguacgugaagggcgagcccaucaucaacuucuacgacccccugguguuccccagcgacgaguucgacgccagcaucagccaggugaacgagaagaucaaccagagccuggccuucaucagaaagagcgacgagcugcugcacaacgugaacgccggcaagagcaccaccaacaucaugaucaccaccaucaucaucgugaucaucgugauccugcugagccugaucgccgugggccugcugcuguacugcaaggccagaagcacccccgugacccugagcaaggaccagcugagcggcaucaacaacaucgccuucagcaacugaggacuagucccuguucccagagcccacuuuuuuuucuuuuuuugaaauaaaauagccugucuuucagaucuaaaaaaaaaaaaaaaaaaaaaaaaaaaaaaaaaaaaaaaaaaaaaaaaaaaaaaaaaaaaaaaaugcaucccccccccccccccccccccccccccccccaaaggcucuuuucagagccaccagaauu

SEQ ID NO: 120 - RNA, 1993 nt, Artificial Sequence
  mRNA product Design a-5 comprising derived and/or modified sequence from HRSV(A2)__F0 (opt5)
gggagacuuucccauucuguagcagaauuugguguugccuguggucuuggucccgcggagaagcuuaccauggagcugcucauccugaaggccaacgcuauuaccacaauccuuacggccgugaccuucugcuuugcgagcggccagaauauuacagaagaguucuaccaauccaccuguucugcugucagcaaaggguaucuguccgcccucagaacaggaugguacaccucuguuaucacaauugaacugagcaacaucaaggagaauaaaugcaacggcaccgacgccaaggugaaacuuaucaagcaggaacuggauaaguauaaaaaugcugugacggagcuccagcugcugaugcaguccacccccgccacaaacaaucgggcucgcagagagcucccucgguuuaugaacuacacccugaauaacgccaagaaaacaaaugucacccuuucuaagaaacgcaagagacgguuccugggguuucuccugggagugggcagcgcgauugccuccgggguugcugugagcaagguccuucaccuggaaggagaggugaacaaaaucaagucugcccuccuguccacgaauaaagcuguugugagccugucuaacggcgucuccgugcucacaagcaaggugcuggaccuuaaaaauuauauugauaagcaacugcucccgaucgucaacaaacagucuuguuccauuagcaacaucgaaaccguuauugaguuccagcagaagaauaaccgccugcuugagaucacaagagaauuuuccgugaaugccggcgugaccacccccgucucuacauacaugcugacgaacagcgagcuccugucccugaucaaugacaugccuauuaccaacgaucaaaagaaacucaugagcaauaacgugcagaucguucggcagcagucuuauuccauuaugagcaucauuaaggaagaggugcuggcguacgucgugcaacuuccccuguacgggguuaucgacacaccuugcuggaaacuccauaccucuccccuguguacaaccaauacgaaggaaggaagcaacaucugccuuacacgcaccgauagaggcugguauugugacaaugccggguccgugucuuucuuuccucaggcugagaccugcaaaguccagagcaaccggguguucugugauacaaugaacucccugacccucccgagcgaggucaaucugugcaauguggacauuuuuaaccccaaguacgauuguaagaucaugacaucuaaaacggacguuuccagcucugugauuaccucccugggagccaucgucagcugcuauggcaagacaaaaugcaccgcuuccaacaagaaucgcgggauuaucaaaacauucucuaacggaugugauuacgugagcaauaagggcguugacaccguguccgucggcaacacgcucuauuacgugaauaagcaagaagggaaaucucuguaugugaagggagagccuaucauuaacuuuuacgacccccuuguuuucccuagcgaugaauuugacgccuccaucagccaggucaaugagaaaauuaaccagucucuggccuucaucagaaaguccgaugaacuccugcacaaugugaacgcuggcaaaagcaccacaaauauuaugaucaccacaauuaucaucgugauuaucgucauucugcuuucucucaucgcgguggggcugcugcucuacugcaaggcccgguccacccccguuacgcugagcaaggaccagcuuucuggaauuaacaauaucgcuuucagcaacugaggacuagucccuguucccagagcccacuuuuuuuucuuuuuuugaaauaaaauagccugucuuucagaucuaaaaaaaaaaaaaaaaaaaaaaaaaaaaaaaaaaaaaaaaaaaaaaaaaaaaaaaaaaaaaaaaugcaucccccccccccccccccccccccccccccccaaaggcucuuuucagagccaccagaauu

SEQ ID NO: 121 - RNA, 1993 nt, Artificial Sequence
  mRNA product Design a-5 comprising derived and/or modified sequence from HRSV(A2)__F0 (opt6)
gggagacuuucccauucuguagcagaauuugguguugccuguggucuuggucccgcggagaagcuuaccauggaacuucuaauauuaaaagcuaacgcaaucacuacuaucuuaaccgcaguaacauucuguuuugcauccggccaaaacauaacagaagaauuuuaccaaucaacuugcucugcagucucaaaagguuaucuaucugcauuaagaacaggcugguacaccucaguaauaacgaucgaacuaucaaacaucaaagaaaacaaauguaauggaacagacgcaaaaguaaaacuaaucaaacaagaacuagacaaauacaaaaacgcaguaaccgaacuccaacuccucaugcaaaguacaccagcaacaaauaacagagcaagacgugaacuaccacguuuuaugaauuacacgcucaauaacgcaaaaaaaacaaauguuacccuaucaaaaaaacgaaaaagaagauuccucggauuccuacuaggcguaggcucagcaauagcuucaggaguagcaguaucaaaaguacuccaccucgaaggagaaguaaacaaaaucaaaagcgcucuccucucaacaaacaaagcaguuguuucacucucaaacggaguaucaguacuaaccucaaaaguacuugaccuaaaaaauuauauagacaaacaacuauuaccaauaguaaacaaacaaagcugcuccaucuccaacaucgagacagucauagaauuucaacaaaaaaauaaccgccuauuagaaauaaccagagaauuuucaguaaacgcaggaguaacuaccccaguaucaacauauauguuaacaaacucagaacuccuaagucuaaucaacgacaugccaauaaccaacgaccaaaaaaaacuaaugagcaacaauguacaaauaguucgucaacaaucuuacuccauaaugucuauaauaaaagaagaaguacucgccuauguaguccaacuaccacuauacggagucaucgauacaccaugcuggaaacuccacacauccccacucuguacuacuaacaccaaagaagguucaaauauaugccuaaccagaacagauagagguugguacugcgauaaugcaggaucaguauccuuuuucccccaagccgaaacaugcaaaguucaauccaauagaguauuuugugauacaaugaacucuuuaacccucccauccgaagucaaucuauguaacgucgacauauuuaacccaaaauacgauugcaaaauaaugacaucaaaaacagacgucucauccucaguuauaacguccuuaggcgcuauaguaucaugcuacggcaaaacaaaauguacagcaucaaacaaaaacagaggaaucauaaaaacuuucucuaacgguugcgacuauguauccaacaaaggugucgacacaguauccguaggcaacacccuuuacuauguuaauaaacaagaaggaaaaucucuauauguaaaaggcgaaccaauuauaaauuuuuacgacccccuugucuuucccucugacgaauuugacgcuuccauaucacaagucaacgaaaaaaucaaccaaucccucgcauucauacgcaaaucagacgaacuacuacauaacgucaacgcaggcaaauccacaacaaacauaaugauaaccacaaucauaauuguaauaauaguaauacuacuuucucuaauagcagucggauuacucuuauacuguaaagcucgaucaacaccagucacccucucuaaagaucaacuauccggaaucaacaacauagcuuucucaaacuaaggacuagucccuguucccagagcccacuuuuuuuucuuuuuuugaaauaaaauagccugucuuucagaucuaaaaaaaaaaaaaaaaaaaaaaaaaaaaaaaaaaaaaaaaaaaaaaaaaaaaaaaaaaaaaaaaugcaucccccccccccccccccccccccccccccccaaaggcucuuuucagagccaccagaauu

SEQ ID NO: 122 - RNA, 1993 nt, Artificial Sequence
  mRNA product Design a-5 comprising derived and/or modified sequence from HRSV(A2)__F0 (opt11)
gggagacuuucccauucuguagcagaauuugguguugccuguggucuuggucccgcggagaagcuuaccauggaacuccucauacucaaagccaacgcaaucacaaccauacucaccgccgucaccuucugcuuugcaucuggccagaacaucacugaagaguucuaccaauccacaugcuccgccguaagcaaaggcuaccuauccgcccuacgcaccggcugguacaccagcguaaucaccauagaacucuccaauauaaaagaaaacaaaugcaacggcaccgacgcaaaagucaagcuaauaaaacaagaacucgacaaauacaaaaacgccguuaccgaacuccagcuacucaugcaaucgaccccagcaaccaacaaccgugcgagacgcgaacucccccgcuucaugaacuacacccuaaacaacgccaaaaagaccaacguaacucuauccaagaaacgcaaacgccgcuuccucggauuccuccucggcgucggcuccgcaaucgccagcggcgucgccguuagcaaaguccuucaccucgaaggagaaguaaacaaaauuaaaagcgcccucuuauccacaaacaaggccguaguaucccugucaaacggcgucuccguccuuacauccaaaguccucgaccucaagaacuacauagacaaacagcuacuacccauuguaaauaaacaaagcugcucaauuagcaacaucgaaaccguaaucgaguuccagcagaaaaacaacagacuucucgaaaucacccgcgaguucagcgucaacgccggcguaaccaccccugucucaacauacaugcuaaccaacagcgaacugcucucccucaucaacgacaugcccaucaccaacgaccaaaagaaacucaugagcaacaacguacaaaucgugcgccaacaguccuacucaauaaugucaaucaucaaagaagaagugcuagcauacgucguacaacuaccacucuacggcguaauagauacccccugcuggaagcuccauaccuccccacucuguaccaccaacaccaaagaaggcucaaacaucugccuaacgcgcacagaccguggaugguacugugacaacgccggcuccgucuccuucuucccucaagccgaaacaugcaaaguccaauccaacagagucuucugcgauaccaugaacucccugacacucccaagcgaagucaaccuuugcaacgucgauaucuuuaaccccaaauacgacugcaagaucaugacaucaaaaaccgacguauccuccucuguaauaaccucccuaggcgcaaucguaucaugcuacggcaaaaccaaauguaccgccuccaacaaaaaucgcggcaucaucaaaaccuucucgaacggcugcgacuacgucuccaacaaaggcguagacacaguuuccguaggcaacacccucuacuacgucaauaaacaggaaggcaagucccucuacgucaaaggcgaacccaucaucaauuucuacgacccccucguuuuccccuccgaugaguucgacgcaagcaucagccaggucaacgaaaagauaaaccagucccucgccuucauccgcaaaucagaugaacuccuucacaacguuaacgcaggcaagagcaccaccaacaucaugaucacaacuauaaucaucgucauaaucgucauccuacucucacuaaucgccgucggucuccuacuauauuguaaagcccgaucaacaccggucacacucuccaaagaccaacucuccggaaucaacaauaucgcuuucucgaacuaaggacuagucccuguucccagagcccacuuuuuuuucuuuuuuugaaauaaaauagccugucuuucagaucuaaaaaaaaaaaaaaaaaaaaaaaaaaaaaaaaaaaaaaaaaaaaaaaaaaaaaaaaaaaaaaaaugcaucccccccccccccccccccccccccccccccaaaggcucuuuucagagccaccagaauu

SEQ ID NO: 123 - RNA, 2174 nt, Artificial Sequence
  mRNA product Design b-1 comprising derived and/or modified sequence from HRSV(A2)__F0 (artificial)
gggagacggagacggccugcaggaccugcucucucagcccucagccgaggccuacgccgagccgagugcgcagccgacgaccgggaggagccgcagccuucaacucugagguacugugauccgcgcugcccgccgggccgccccaguccgcugcugcggcaccuccuucccucgcgcccucuucgcucgccagcgccuucccugugagccugcgucaccgcggccgccaagcuuaccauggaguugcuaauccucaaagcaaaugcaauuaccacaauccucacugcagucacauuuuguuuugcuucuggucaaaacaucacugaagaauuuuaucaaucaacaugcagugcaguuagcaaaggcuaucuuagugcucugagaacugguugguauaccaguguuauaacuauagaauuaaguaauaucaaggaaaauaaguguaauggaacagaugcuaagguaaaauugauaaaacaagaauuagauaaauauaaaaaugcuguaacagaauugcaguugcucaugcaaagcacaccagcaacaaacaaucgagccagaagagaacuaccaagguuuaugaauuauacacucaacaaugccaaaaaaaccaauguaacauuaagcaagaaaaggaaaagaagauuucuugguuuuuuguuagguguuggaucugcaaucgccaguggcguugcuguaucuaagguccugcaccuagaaggggaagugaacaagaucaaaagugcucuacuauccacaaacaaggcuguagucagcuuaucaaauggaguuagugucuuaaccagcaaaguguuagaccucaaaaacuauauagauaaacaauuguuaccuauugugaacaagcaaagcugcagcauaucaaauauagaaacugugauagaguuccaacaaaagaacaacagacuacuagagauuaccagggaauuuaguguuaaugcagguguaacuacaccuguaagcacuuacauguuaacuaauagugaauuauugucauuaaucaaugauaugccuauaacaaaugaucagaaaaaguuaauguccaacaauguucaaauaguuagacagcaaaguuacucuaucauguccauaauaaaagaggaagucuuagcauauguaguacaauuaccacuauaugguguuauagauacacccuguuggaaacuacacacauccccucuauguacaaccaacacaaaagaaggguccaacaucuguuuaacaagaacugacagaggaugguacugugacaaugcaggaucaguaucuuucuucccacaagcugaaacauguaaaguucaaucaaaucgaguauuuugugacacaaugaacaguuuaacauuaccaagugaaguaaaucucugcaauguugacauauucaaccccaaauaugauuguaaaauuaugacuucaaaaacagauguaagcagcuccguuaucacaucucuaggagccauugugucaugcuauggcaaaacuaaauguacagcauccaauaaaaaucguggaaucauaaagacauuuucuaacgggugcgauuauguaucaaauaaagggguggacacugugucuguagguaacacauuauauuauguaaauaagcaagaagguaaaagucucuauguaaaaggugaaccaauaauaaauuucuaugacccauuaguauuccccucugaugaauuugaugcaucaauaucucaagucaacgagaagauuaaccagagccuagcauuuauucguaaauccgaugaauuauuacauaauguaaaugcugguaaauccaccacaaauaucaugauaacuacuauaauuauagugauuauaguaauauuguuaucauuaauugcuguuggacugcucuuauacuguaaggccagaagcacaccagucacacuaagcaaagaucaacugagugguauaaauaauauugcauuuaguaacuaaggacuaguguccaccugucccuccugggcugcuggauugucucguuuuccugccaaauaaacaggaucagcgcuuuacagaucuaaaaaaaaaaaaaaaaaaaaaaaaaaaaaaaaaaaaaaaaaaaaaaaaaaaaaaaaaaaaaaaaugcaucccccccccccccccccccccccccccccccaaaggcucuuuucagagccaccagaauu

SEQ ID NO: 124 - RNA, 2174 nt, Artificial Sequence
  mRNA product Design b-1 comprising derived and/or modified sequence from HRSV(A2)__F0 (opt1)
gggagacggagacggccugcaggaccugcucucucagcccucagccgaggccuacgccgagccgagugcgcagccgacgaccgggaggagccgcagccuucaacucugagguacugugauccgcgcugcccgccgggccgccccaguccgcugcugcggcaccuccuucccucgcgcccucuucgcucgccagcgccuucccugugagccugcgucaccgcggccgccaagcuuaccauggagcugcucauccugaaggccaacgccaucaccaccauccugacggcggugaccuucugcuucgccagcggccagaacaucaccgaggaguucuaccaguccaccugcagcgccgucuccaagggguaccucagcgcccugcggacgggcugguacaccuccgugaucaccaucgagcugagcaacaucaaggagaacaagugcaacgggaccgacgccaaggugaagcucaucaagcaggagcuggacaaguacaagaacgcggucacggagcugcagcuccugaugcaguccaccccggcaaccaacaaccgcgcccggcgcgagcugccccgguucaugaacuacacccucaacaacgccaagaagacgaacgugacccugagcaagaagcgcaagcggcgcuuccugggcuuccuccugggggugggcuccgccaucgcgagcggcgucgccguguccaaggugcugcaccucgagggggaggucaacaagaucaagagcgcccugcuguccaccaacaaggccguggugagccucuccaacggcgucagcgugcugaccuccaaggugcuggaccucaagaacuacaucgacaagcagcugcugcccaucgucaacaagcagagcugcuccaucagcaacaucgagacggugaucgaguuccagcagaagaacaaccggcuccuggagaucacccgcgaguucagcgugaacgccggggucaccacccccguguccacguacaugcugaccaacagcgagcuccugucccugaucaacgacaugccgaucaccaacgaccagaagaagcucaugagcaacaacgugcagaucguccggcagcaguccuacagcaucauguccaucaucaaggaggaggugcuggcguacgugguccagcugccccucuacggcgugaucgacacccccugcuggaagcugcacacgagcccccugugcaccaccaacaccaaggagggguccaacaucugccucacgcgcaccgaccggggcugguacugcgacaacgccggcagcgucuccuucuucccgcaggccgagaccugcaaggugcagagcaaccgcguguucugcgacaccaugaacucccugacgcugcccagcgagguaaaccucugcaacgucgacaucuucaaccccaaguacgacugcaagaucaugaccuccaagaccgacgugagcuccagcgugaucaccucccugggggccaucgucagcugcuacggcaagacgaagugcaccgccagcaacaagaaccgggggaucaucaagaccuucuccaacggcugcgacuacgugagcaacaagggcguggacaccguguccgucgggaacacccuguacuacgugaacaagcaggagggcaagagccucuacgugaagggggagcccaucaucaacuucuacgacccgcuggucuuccccuccgacgaguucgacgcgagcaucucccaggugaacgagaagaucaaccagagccuggccuucauccgcaaguccgacgagcugcuccacaacgugaacgccggcaagagcacgaccaacaucaugaucaccaccaucaucaucgucaucaucgugauccugcugucccucaucgccguggggcugcugcucuacugcaaggcccggagcacgcccgucacccuguccaaggaccagcugagcggcaucaacaacaucgcguucuccaacugaggacuaguguccaccugucccuccugggcugcuggauugucucguuuuccugccaaauaaacaggaucagcgcuuuacagaucuaaaaaaaaaaaaaaaaaaaaaaaaaaaaaaaaaaaaaaaaaaaaaaaaaaaaaaaaaaaaaaaaugcaucccccccccccccccccccccccccccccccaaaggcucuuuucagagccaccagaauu

SEQ ID NO: 125 - RNA, 2174 nt, Artificial Sequence
  mRNA product Design b-1 comprising derived and/or modified sequence from HRSV(A2)__F0 (opt1)
gggagacggagacggccugcaggaccugcucucucagcccucagccgaggccuacgccgagccgagugcgcagccgacgaccgggaggagccgcagccuucaacucugagguacugugauccgcgcugcccgccgggccgccccaguccgcugcugcggcaccuccuucccucgcgcccucuucgcucgccagcgccuucccugugagccugcgucaccgcggccgccaagcuuaccauggagcugcucauccugaaggccaacgccaucaccaccauccugacggcggugaccuucugcuucgccagcggccagaacaucaccgaggaguucuaccaguccacgugcagcgccgucuccaagggguaccucagcgcccugcgcaccggcugguacaccuccgugaucaccaucgagcugagcaacaucaaggagaacaagugcaacgggaccgacgccaaggugaagcucaucaagcaggagcuggacaaguacaagaacgcggucacggagcugcagcuccugaugcaguccacccccgccaccaacaaccgggcccgccgggagcugccgcgcuucaugaacuacacccucaacaacgccaagaagacgaacgugacccugagcaagaagcggaagcgccgguuccugggcuuccuccugggggugggcuccgcgaucgccagcggcgucgccguguccaaggugcugcaccucgagggggaggucaacaagaucaagagcgcccugcuguccaccaacaaggccguggugagccucuccaacggcgucagcgugcugaccuccaaggugcuggaccucaagaacuacaucgacaagcagcugcugcccaucgucaacaagcagagcugcuccaucagcaacaucgagacggugaucgaguuccagcagaagaacaaccgccuccuggagaucacccgggaguucagcgugaacgcgggggucaccacccccguguccacguacaugcugaccaacagcgagcuccugucccugaucaacgacaugcccaucaccaacgaccagaagaagcucaugagcaacaacgugcagaucguccgccagcaguccuacagcaucauguccaucaucaaggaggaggugcuggccuacgugguccagcugccgcucuacggcgugaucgacacccccugcuggaagcugcacacgagcccccugugcaccaccaacaccaaggagggguccaacaucugccucacgcggaccgaccgcggcugguacugcgacaacgccggcagcgucuccuucuucccccaggccgagaccugcaaggugcagagcaaccggguguucugcgacaccaugaacucccugacgcugccgagcgaggucaaccucugcaacguggacaucuucaaccccaaguacgacugcaagaucaugaccuccaagaccgacgugagcuccagcgucaucaccucccugggggccaucgugagcugcuacggcaagacgaagugcaccgcgagcaacaagaaccgcgggaucaucaagaccuucuccaacggcugcgacuacgugagcaacaagggcgucgacaccguguccguggggaacacccuguacuacgucaacaagcaggagggcaagagccucuacgugaagggggagcccaucaucaacuucuacgacccccugguguucccguccgacgaguucgacgccagcaucucccaggucaacgagaagaucaaccagagccuggccuucauccggaaguccgacgagcuccugcacaacgugaacgccggcaagagcacgaccaacaucaugaucaccaccaucaucaucgugaucaucgucauccugcugucccucaucgccguggggcugcugcucuacugcaaggcgcgcagcacgcccgugacccuguccaaggaccagcugagcggcaucaacaacaucgccuucuccaacugaggacuaguguccaccugucccuccugggcugcuggauugucucguuuuccugccaaauaaacaggaucagcgcuuuacagaucuaaaaaaaaaaaaaaaaaaaaaaaaaaaaaaaaaaaaaaaaaaaaaaaaaaaaaaaaaaaaaaaaugcaucccccccccccccccccccccccccccccccaaaggcucuuuucagagccaccagaauu

SEQ ID NO: 126 - RNA, 2174 nt, Artificial Sequence
  mRNA product Design b-1 comprising derived and/or modified sequence from HRSV(A2)__F0 (opt2)
gggagacggagacggccugcaggaccugcucucucagcccucagccgaggccuacgccgagccgagugcgcagccgacgaccgggaggagccgcagccuucaacucugagguacugugauccgcgcugcccgccgggccgccccaguccgcugcugcggcaccuccuucccucgcgcccucuucgcucgccagcgccuucccugugagccugcgucaccgcggccgccaagcuuaccauggagcuccucauccucaaggccaacgccaucaccaccauccucaccgccgucaccuucugcuucgccuccggccagaacaucaccgaggaguucuaccaguccaccugcuccgccgucuccaagggcuaccucuccgcccuccgcaccggcugguacaccuccgucaucaccaucgagcucuccaacaucaaggagaacaagugcaacggcaccgacgccaaggucaagcucaucaagcaggagcucgacaaguacaagaacgccgucaccgagcuccagcuccucaugcaguccacccccgccaccaacaaccgcgcccgccgcgagcucccccgcuucaugaacuacacccucaacaacgccaagaagaccaacgucacccucuccaagaagcgcaagcgccgcuuccucggcuuccuccucggcgucggcuccgccaucgccuccggcgucgccgucuccaagguccuccaccucgagggcgaggucaacaagaucaaguccgcccuccucuccaccaacaaggccgucgucucccucuccaacggcgucuccguccucaccuccaagguccucgaccucaagaacuacaucgacaagcagcuccuccccaucgucaacaagcaguccugcuccaucuccaacaucgagaccgucaucgaguuccagcagaagaacaaccgccuccucgagaucacccgcgaguucuccgucaacgccggcgucaccacccccgucuccaccuacaugcucaccaacuccgagcuccucucccucaucaacgacaugcccaucaccaacgaccagaagaagcucauguccaacaacguccagaucguccgccagcaguccuacuccaucauguccaucaucaaggaggagguccucgccuacgucguccagcucccccucuacggcgucaucgacacccccugcuggaagcuccacaccuccccccucugcaccaccaacaccaaggagggcuccaacaucugccucacccgcaccgaccgcggcugguacugcgacaacgccggcuccgucuccuucuucccccaggccgagaccugcaagguccaguccaaccgcgucuucugcgacaccaugaacucccucacccuccccuccgaggucaaccucugcaacgucgacaucuucaaccccaaguacgacugcaagaucaugaccuccaagaccgacgucuccuccuccgucaucaccucccucggcgccaucgucuccugcuacggcaagaccaagugcaccgccuccaacaagaaccgcggcaucaucaagaccuucuccaacggcugcgacuacgucuccaacaagggcgucgacaccgucuccgucggcaacacccucuacuacgucaacaagcaggagggcaagucccucuacgucaagggcgagcccaucaucaacuucuacgacccccucgucuuccccuccgacgaguucgacgccuccaucucccaggucaacgagaagaucaaccagucccucgccuucauccgcaaguccgacgagcuccuccacaacgucaacgccggcaaguccaccaccaacaucaugaucaccaccaucaucaucgucaucaucgucauccuccucucccucaucgccgucggccuccuccucuacugcaaggcccgcuccacccccgucacccucuccaaggaccagcucuccggcaucaacaacaucgccuucuccaacugaggacuaguguccaccugucccuccugggcugcuggauugucucguuuuccugccaaauaaacaggaucagcgcuuuacagaucuaaaaaaaaaaaaaaaaaaaaaaaaaaaaaaaaaaaaaaaaaaaaaaaaaaaaaaaaaaaaaaaaugcaucccccccccccccccccccccccccccccccaaaggcucuuuucagagccaccagaauu

SEQ ID NO: 127 - RNA, 2174 nt, Artificial Sequence
  mRNA product Design b-1 comprising derived and/or modified sequence from HRSV(A2)__F0 (opt3)
gggagacggagacggccugcaggaccugcucucucagcccucagccgaggccuacgccgagccgagugcgcagccgacgaccgggaggagccgcagccuucaacucugagguacugugauccgcgcugcccgccgggccgccccaguccgcugcugcggcaccuccuucccucgcgcccucuucgcucgccagcgccuucccugugagccugcgucaccgcggccgccaagcuuaccauggagcugcucauccuuaaggccaacgcuauuaccacaauacugacugcagugacguucugcuuugccagcggccagaauaucaccgaagaguucuaccaauccacauguucugcggucucaaaaggguauuugagugcuuuaagaacuggaugguacaccagcguuauuacaaucgaacuguccaacauuaaggagaauaaaugcaacgguaccgacgccaaggugaaacuaaucaagcaggaacucgauaaguauaaaaaugcaguaacugagcugcagcuucugaugcagucuacacccgccaccaacaauagggcucggcgcgaguugccucgauuuaugaacuacacgcucaauaacgcaaagaaaacuaaugugacccugucgaagaaacguaagagaagguuccugggcuuucucuuaggggucggaucagccauagcuagcggcguggccguuaguaaggugcugcaccuugaaggugaggucaacaaaaucaaguccgcguugcugucuacaaauaaagcagugguaagccuauccaacgggguuucagugcucacuucuaagguccuggaccuuaaaaauuauauugauaagcaacuguugccaaucgugaacaaacagagcuguucuauuuccaacaucgaaaccgugauagaguuccagcagaagaauaaccggcuccuggagauuacacgcgaauuuucagucaaugccggaguuaccacgccggugagcacuuacauguuaacaaacagugagcugcucucucuuaucaaugacaugcccauuaccaacgaucaaaagaaacugauguccaauaacguacagaucgugagacagcagagcuauucgaucaugucuauuauaaaggaagaggucuuggcuuacgugguucaacuaccucuguacggcgugaucgacacuccaugcuggaaacuccauacauccccacuguguaccacgaauaccaaggaaggcucaaacauuugccuuacaaggacugaucgggggugguauugugacaaugccggaagugucagcuucuuuccucaggcagagaccugcaaagugcaguccaaccgcguauucugugauacaaugaauagucugacuuugccaagcgagguuaaccucugcaauguggacaucuuuaaccccaaguacgauuguaagauaaugaccucaaaaacagacgucaguuccagcgugauuaccucucugggugcuaucgucucaugcuauggcaagacuaaaugcacggccaguaacaagaaucgagggaucauuaaaacauucagcaacggaugugauuacguguccaauaagggcguugacaccgugucuguagguaacacuuuauauuacgucaauaagcaagaagggaaaucgcuguaugugaagggagagccuaucauuaacuuuuacgacccccuaguuuucccgagcgaugaauuugacgcguccauaucacaggugaaugagaaaaucaaccagagucucgccuucauuagaaagucugaugaacugcuucacaaugucaacgcaggcaaaagcaccacaaauaucaugaucaccacuauuauaaucgugauuaucguaauuuugcugucccucaucgcugugggccugcuucuguacugcaaggccaggucaacacccguuacguugagcaaggaccagcucucugggauaaacaauaucgcuuucuccaacugaggacuaguguccaccugucccuccugggcugcuggauugucucguuuuccugccaaauaaacaggaucagcgcuuuacagaucuaaaaaaaaaaaaaaaaaaaaaaaaaaaaaaaaaaaaaaaaaaaaaaaaaaaaaaaaaaaaaaaaugcaucccccccccccccccccccccccccccccccaaaggcucuuuucagagccaccagaauu

SEQ ID NO: 128 - RNA, 2174 nt, Artificial Sequence
  mRNA product Design b-1 comprising derived and/or modified sequence from HRSV(A2)__F0 (opt4)
gggagacggagacggccugcaggaccugcucucucagcccucagccgaggccuacgccgagccgagugcgcagccgacgaccgggaggagccgcagccuucaacucugagguacugugauccgcgcugcccgccgggccgccccaguccgcugcugcggcaccuccuucccucgcgcccucuucgcucgccagcgccuucccugugagccugcgucaccgcggccgccaagcuuaccauggagcugcugauccugaaggccaacgccaucaccaccauccugaccgccgugaccuucugcuucgccagcggccagaacaucaccgaggaguucuaccagagcaccugcagcgccgugagcaagggcuaccugagcgcccugagaaccggcugguacaccagcgugaucaccaucgagcugagcaacaucaaggagaacaagugcaacggcaccgacgccaaggugaagcugaucaagcaggagcuggacaaguacaagaacgccgugaccgagcugcagcugcugaugcagagcacccccgccaccaacaacagagccagaagagagcugcccagauucaugaacuacacccugaacaacgccaagaagaccaacgugacccugagcaagaagagaaagagaagauuccugggcuuccugcugggcgugggcagcgccaucgccagcggcguggccgugagcaaggugcugcaccuggagggcgaggugaacaagaucaagagcgcccugcugagcaccaacaaggccguggugagccugagcaacggcgugagcgugcugaccagcaaggugcuggaccugaagaacuacaucgacaagcagcugcugcccaucgugaacaagcagagcugcagcaucagcaacaucgagaccgugaucgaguuccagcagaagaacaacagacugcuggagaucaccagagaguucagcgugaacgccggcgugaccacccccgugagcaccuacaugcugaccaacagcgagcugcugagccugaucaacgacaugcccaucaccaacgaccagaagaagcugaugagcaacaacgugcagaucgugagacagcagagcuacagcaucaugagcaucaucaaggaggaggugcuggccuacguggugcagcugccccuguacggcgugaucgacacccccugcuggaagcugcacaccagcccccugugcaccaccaacaccaaggagggcagcaacaucugccugaccagaaccgacagaggcugguacugcgacaacgccggcagcgugagcuucuucccccaggccgagaccugcaaggugcagagcaacagaguguucugcgacaccaugaacagccugacccugcccagcgaggugaaccugugcaacguggacaucuucaaccccaaguacgacugcaagaucaugaccagcaagaccgacgugagcagcagcgugaucaccagccugggcgccaucgugagcugcuacggcaagaccaagugcaccgccagcaacaagaacagaggcaucaucaagaccuucagcaacggcugcgacuacgugagcaacaagggcguggacaccgugagcgugggcaacacccuguacuacgugaacaagcaggagggcaagagccuguacgugaagggcgagcccaucaucaacuucuacgacccccugguguuccccagcgacgaguucgacgccagcaucagccaggugaacgagaagaucaaccagagccuggccuucaucagaaagagcgacgagcugcugcacaacgugaacgccggcaagagcaccaccaacaucaugaucaccaccaucaucaucgugaucaucgugauccugcugagccugaucgccgugggccugcugcuguacugcaaggccagaagcacccccgugacccugagcaaggaccagcugagcggcaucaacaacaucgccuucagcaacugaggacuaguguccaccugucccuccugggcugcuggauugucucguuuuccugccaaauaaacaggaucagcgcuuuacagaucuaaaaaaaaaaaaaaaaaaaaaaaaaaaaaaaaaaaaaaaaaaaaaaaaaaaaaaaaaaaaaaaaugcaucccccccccccccccccccccccccccccccaaaggcucuuuucagagccaccagaauu

SEQ ID NO: 129 - RNA, 2174 nt, Artificial Sequence
  mRNA product Design b-1 comprising derived and/or modified sequence from HRSV(A2)__F0 (opt5)
gggagacggagacggccugcaggaccugcucucucagcccucagccgaggccuacgccgagccgagugcgcagccgacgaccgggaggagccgcagccuucaacucugagguacugugauccgcgcugcccgccgggccgccccaguccgcugcugcggcaccuccuucccucgcgcccucuucgcucgccagcgccuucccugugagccugcgucaccgcggccgccaagcuuaccauggagcugcucauccugaaggccaacgcuauuaccacaauccuuacggccgugaccuucugcuuugcgagcggccagaauauuacagaagaguucuaccaauccaccuguucugcugucagcaaaggguaucuguccgcccucagaacaggaugguacaccucuguuaucacaauugaacugagcaacaucaaggagaauaaaugcaacggcaccgacgccaaggugaaacuuaucaagcaggaacuggauaaguauaaaaaugcugugacggagcuccagcugcugaugcaguccacccccgccacaaacaaucgggcucgcagagagcucccucgguuuaugaacuacacccugaauaacgccaagaaaacaaaugucacccuuucuaagaaacgcaagagacgguuccugggguuucuccugggagugggcagcgcgauugccuccgggguugcugugagcaagguccuucaccuggaaggagaggugaacaaaaucaagucugcccuccuguccacgaauaaagcuguugugagccugucuaacggcgucuccgugcucacaagcaaggugcuggaccuuaaaaauuauauugauaagcaacugcucccgaucgucaacaaacagucuuguuccauuagcaacaucgaaaccguuauugaguuccagcagaagaauaaccgccugcuugagaucacaagagaauuuuccgugaaugccggcgugaccacccccgucucuacauacaugcugacgaacagcgagcuccugucccugaucaaugacaugccuauuaccaacgaucaaaagaaacucaugagcaauaacgugcagaucguucggcagcagucuuauuccauuaugagcaucauuaaggaagaggugcuggcguacgucgugcaacuuccccuguacgggguuaucgacacaccuugcuggaaacuccauaccucuccccuguguacaaccaauacgaaggaaggaagcaacaucugccuuacacgcaccgauagaggcugguauugugacaaugccggguccgugucuuucuuuccucaggcugagaccugcaaaguccagagcaaccggguguucugugauacaaugaacucccugacccucccgagcgaggucaaucugugcaauguggacauuuuuaaccccaaguacgauuguaagaucaugacaucuaaaacggacguuuccagcucugugauuaccucccugggagccaucgucagcugcuauggcaagacaaaaugcaccgcuuccaacaagaaucgcgggauuaucaaaacauucucuaacggaugugauuacgugagcaauaagggcguugacaccguguccgucggcaacacgcucuauuacgugaauaagcaagaagggaaaucucuguaugugaagggagagccuaucauuaacuuuuacgacccccuuguuuucccuagcgaugaauuugacgccuccaucagccaggucaaugagaaaauuaaccagucucuggccuucaucagaaaguccgaugaacuccugcacaaugugaacgcuggcaaaagcaccacaaauauuaugaucaccacaauuaucaucgugauuaucgucauucugcuuucucucaucgcgguggggcugcugcucuacugcaaggcccgguccacccccguuacgcugagcaaggaccagcuuucuggaauuaacaauaucgcuuucagcaacugaggacuaguguccaccugucccuccugggcugcuggauugucucguuuuccugccaaauaaacaggaucagcgcuuuacagaucuaaaaaaaaaaaaaaaaaaaaaaaaaaaaaaaaaaaaaaaaaaaaaaaaaaaaaaaaaaaaaaaaugcaucccccccccccccccccccccccccccccccaaaggcucuuuucagagccaccagaauu

SEQ ID NO: 130 - RNA, 2174 nt, Artificial Sequence
  mRNA product Design b-1 comprising derived and/or modified sequence from HRSV(A2)__F0 (opt6)
gggagacggagacggccugcaggaccugcucucucagcccucagccgaggccuacgccgagccgagugcgcagccgacgaccgggaggagccgcagccuucaacucugagguacugugauccgcgcugcccgccgggccgccccaguccgcugcugcggcaccuccuucccucgcgcccucuucgcucgccagcgccuucccugugagccugcgucaccgcggccgccaagcuuaccauggaacuucuaauauuaaaagcuaacgcaaucacuacuaucuuaaccgcaguaacauucuguuuugcauccggccaaaacauaacagaagaauuuuaccaaucaacuugcucugcagucucaaaagguuaucuaucugcauuaagaacaggcugguacaccucaguaauaacgaucgaacuaucaaacaucaaagaaaacaaauguaauggaacagacgcaaaaguaaaacuaaucaaacaagaacuagacaaauacaaaaacgcaguaaccgaacuccaacuccucaugcaaaguacaccagcaacaaauaacagagcaagacgugaacuaccacguuuuaugaauuacacgcucaauaacgcaaaaaaaacaaauguuacccuaucaaaaaaacgaaaaagaagauuccucggauuccuacuaggcguaggcucagcaauagcuucaggaguagcaguaucaaaaguacuccaccucgaaggagaaguaaacaaaaucaaaagcgcucuccucucaacaaacaaagcaguuguuucacucucaaacggaguaucaguacuaaccucaaaaguacuugaccuaaaaaauuauauagacaaacaacuauuaccaauaguaaacaaacaaagcugcuccaucuccaacaucgagacagucauagaauuucaacaaaaaaauaaccgccuauuagaaauaaccagagaauuuucaguaaacgcaggaguaacuaccccaguaucaacauauauguuaacaaacucagaacuccuaagucuaaucaacgacaugccaauaaccaacgaccaaaaaaaacuaaugagcaacaauguacaaauaguucgucaacaaucuuacuccauaaugucuauaauaaaagaagaaguacucgccuauguaguccaacuaccacuauacggagucaucgauacaccaugcuggaaacuccacacauccccacucuguacuacuaacaccaaagaagguucaaauauaugccuaaccagaacagauagagguugguacugcgauaaugcaggaucaguauccuuuuucccccaagccgaaacaugcaaaguucaauccaauagaguauuuugugauacaaugaacucuuuaacccucccauccgaagucaaucuauguaacgucgacauauuuaacccaaaauacgauugcaaaauaaugacaucaaaaacagacgucucauccucaguuauaacguccuuaggcgcuauaguaucaugcuacggcaaaacaaaauguacagcaucaaacaaaaacagaggaaucauaaaaacuuucucuaacgguugcgacuauguauccaacaaaggugucgacacaguauccguaggcaacacccuuuacuauguuaauaaacaagaaggaaaaucucuauauguaaaaggcgaaccaauuauaaauuuuuacgacccccuugucuuucccucugacgaauuugacgcuuccauaucacaagucaacgaaaaaaucaaccaaucccucgcauucauacgcaaaucagacgaacuacuacauaacgucaacgcaggcaaauccacaacaaacauaaugauaaccacaaucauaauuguaauaauaguaauacuacuuucucuaauagcagucggauuacucuuauacuguaaagcucgaucaacaccagucacccucucuaaagaucaacuauccggaaucaacaacauagcuuucucaaacuaaggacuaguguccaccugucccuccugggcugcuggauugucucguuuuccugccaaauaaacaggaucagcgcuuuacagaucuaaaaaaaaaaaaaaaaaaaaaaaaaaaaaaaaaaaaaaaaaaaaaaaaaaaaaaaaaaaaaaaaugcaucccccccccccccccccccccccccccccccaaaggcucuuuucagagccaccagaauu

SEQ ID NO: 131 - RNA, 2174 nt, Artificial Sequence
  mRNA product Design b-1 comprising derived and/or modified sequence from HRSV(A2)__F0 (opt11)
gggagacggagacggccugcaggaccugcucucucagcccucagccgaggccuacgccgagccgagugcgcagccgacgaccgggaggagccgcagccuucaacucugagguacugugauccgcgcugcccgccgggccgccccaguccgcugcugcggcaccuccuucccucgcgcccucuucgcucgccagcgccuucccugugagccugcgucaccgcggccgccaagcuuaccauggaacuccucauacucaaagccaacgcaaucacaaccauacucaccgccgucaccuucugcuuugcaucuggccagaacaucacugaagaguucuaccaauccacaugcuccgccguaagcaaaggcuaccuauccgcccuacgcaccggcugguacaccagcguaaucaccauagaacucuccaauauaaaagaaaacaaaugcaacggcaccgacgcaaaagucaagcuaauaaaacaagaacucgacaaauacaaaaacgccguuaccgaacuccagcuacucaugcaaucgaccccagcaaccaacaaccgugcgagacgcgaacucccccgcuucaugaacuacacccuaaacaacgccaaaaagaccaacguaacucuauccaagaaacgcaaacgccgcuuccucggauuccuccucggcgucggcuccgcaaucgccagcggcgucgccguuagcaaaguccuucaccucgaaggagaaguaaacaaaauuaaaagcgcccucuuauccacaaacaaggccguaguaucccugucaaacggcgucuccguccuuacauccaaaguccucgaccucaagaacuacauagacaaacagcuacuacccauuguaaauaaacaaagcugcucaauuagcaacaucgaaaccguaaucgaguuccagcagaaaaacaacagacuucucgaaaucacccgcgaguucagcgucaacgccggcguaaccaccccugucucaacauacaugcuaaccaacagcgaacugcucucccucaucaacgacaugcccaucaccaacgaccaaaagaaacucaugagcaacaacguacaaaucgugcgccaacaguccuacucaauaaugucaaucaucaaagaagaagugcuagcauacgucguacaacuaccacucuacggcguaauagauacccccugcuggaagcuccauaccuccccacucuguaccaccaacaccaaagaaggcucaaacaucugccuaacgcgcacagaccguggaugguacugugacaacgccggcuccgucuccuucuucccucaagccgaaacaugcaaaguccaauccaacagagucuucugcgauaccaugaacucccugacacucccaagcgaagucaaccuuugcaacgucgauaucuuuaaccccaaauacgacugcaagaucaugacaucaaaaaccgacguauccuccucuguaauaaccucccuaggcgcaaucguaucaugcuacggcaaaaccaaauguaccgccuccaacaaaaaucgcggcaucaucaaaaccuucucgaacggcugcgacuacgucuccaacaaaggcguagacacaguuuccguaggcaacacccucuacuacgucaauaaacaggaaggcaagucccucuacgucaaaggcgaacccaucaucaauuucuacgacccccucguuuuccccuccgaugaguucgacgcaagcaucagccaggucaacgaaaagauaaaccagucccucgccuucauccgcaaaucagaugaacuccuucacaacguuaacgcaggcaagagcaccaccaacaucaugaucacaacuauaaucaucgucauaaucgucauccuacucucacuaaucgccgucggucuccuacuauauuguaaagcccgaucaacaccggucacacucuccaaagaccaacucuccggaaucaacaauaucgcuuucucgaacuaaggacuaguguccaccugucccuccugggcugcuggauugucucguuuuccugccaaauaaacaggaucagcgcuuuacagaucuaaaaaaaaaaaaaaaaaaaaaaaaaaaaaaaaaaaaaaaaaaaaaaaaaaaaaaaaaaaaaaaaugcaucccccccccccccccccccccccccccccccaaaggcucuuuucagagccaccagaauu

SEQ ID NO: 132 - RNA, 1994 nt, Artificial Sequence
  mRNA product Design b-2 comprising derived and/or modified sequence from HRSV(A2)__F0 (artificial)
gggagagccucugcuggaguccggggaguggcguuggcugcuagagcgaagcuuaccauggaguugcuaauccucaaagcaaaugcaauuaccacaauccucacugcagucacauuuuguuuugcuucuggucaaaacaucacugaagaauuuuaucaaucaacaugcagugcaguuagcaaaggcuaucuuagugcucugagaacugguugguauaccaguguuauaacuauagaauuaaguaauaucaaggaaaauaaguguaauggaacagaugcuaagguaaaauugauaaaacaagaauuagauaaauauaaaaaugcuguaacagaauugcaguugcucaugcaaagcacaccagcaacaaacaaucgagccagaagagaacuaccaagguuuaugaauuauacacucaacaaugccaaaaaaaccaauguaacauuaagcaagaaaaggaaaagaagauuucuugguuuuuuguuagguguuggaucugcaaucgccaguggcguugcuguaucuaagguccugcaccuagaaggggaagugaacaagaucaaaagugcucuacuauccacaaacaaggcuguagucagcuuaucaaauggaguuagugucuuaaccagcaaaguguuagaccucaaaaacuauauagauaaacaauuguuaccuauugugaacaagcaaagcugcagcauaucaaauauagaaacugugauagaguuccaacaaaagaacaacagacuacuagagauuaccagggaauuuaguguuaaugcagguguaacuacaccuguaagcacuuacauguuaacuaauagugaauuauugucauuaaucaaugauaugccuauaacaaaugaucagaaaaaguuaauguccaacaauguucaaauaguuagacagcaaaguuacucuaucauguccauaauaaaagaggaagucuuagcauauguaguacaauuaccacuauaugguguuauagauacacccuguuggaaacuacacacauccccucuauguacaaccaacacaaaagaaggguccaacaucuguuuaacaagaacugacagaggaugguacugugacaaugcaggaucaguaucuuucuucccacaagcugaaacauguaaaguucaaucaaaucgaguauuuugugacacaaugaacaguuuaacauuaccaagugaaguaaaucucugcaauguugacauauucaaccccaaauaugauuguaaaauuaugacuucaaaaacagauguaagcagcuccguuaucacaucucuaggagccauugugucaugcuauggcaaaacuaaauguacagcauccaauaaaaaucguggaaucauaaagacauuuucuaacgggugcgauuauguaucaaauaaagggguggacacugugucuguagguaacacauuauauuauguaaauaagcaagaagguaaaagucucuauguaaaaggugaaccaauaauaaauuucuaugacccauuaguauuccccucugaugaauuugaugcaucaauaucucaagucaacgagaagauuaaccagagccuagcauuuauucguaaauccgaugaauuauuacauaauguaaaugcugguaaauccaccacaaauaucaugauaacuacuauaauuauagugauuauaguaauauuguuaucauuaauugcuguuggacugcucuuauacuguaaggccagaagcacaccagucacacuaagcaaagaucaacugagugguauaaauaauauugcauuuaguaacuaaggacuaguguccaccugucccuccugggcugcuggauugucucguuuuccugccaaauaaacaggaucagcgcuuuacagaucuaaaaaaaaaaaaaaaaaaaaaaaaaaaaaaaaaaaaaaaaaaaaaaaaaaaaaaaaaaaaaaaaugcaucccccccccccccccccccccccccccccccaaaggcucuuuucagagccaccagaauu

SEQ ID NO: 133 - RNA, 1994 nt, Artificial Sequence
  mRNA product Design b-2 comprising derived and/or modified sequence from HRSV(A2)__F0 (opt1)
gggagagccucugcuggaguccggggaguggcguuggcugcuagagcgaagcuuaccauggagcugcucauccugaaggccaacgccaucaccaccauccugacggcggugaccuucugcuucgccagcggccagaacaucaccgaggaguucuaccaguccaccugcagcgccgucuccaagggguaccucagcgcccugcggacgggcugguacaccuccgugaucaccaucgagcugagcaacaucaaggagaacaagugcaacgggaccgacgccaaggugaagcucaucaagcaggagcuggacaaguacaagaacgcggucacggagcugcagcuccugaugcaguccaccccggcaaccaacaaccgcgcccggcgcgagcugccccgguucaugaacuacacccucaacaacgccaagaagacgaacgugacccugagcaagaagcgcaagcggcgcuuccugggcuuccuccugggggugggcuccgccaucgcgagcggcgucgccguguccaaggugcugcaccucgagggggaggucaacaagaucaagagcgcccugcuguccaccaacaaggccguggugagccucuccaacggcgucagcgugcugaccuccaaggugcuggaccucaagaacuacaucgacaagcagcugcugcccaucgucaacaagcagagcugcuccaucagcaacaucgagacggugaucgaguuccagcagaagaacaaccggcuccuggagaucacccgcgaguucagcgugaacgccggggucaccacccccguguccacguacaugcugaccaacagcgagcuccugucccugaucaacgacaugccgaucaccaacgaccagaagaagcucaugagcaacaacgugcagaucguccggcagcaguccuacagcaucauguccaucaucaaggaggaggugcuggcguacgugguccagcugccccucuacggcgugaucgacacccccugcuggaagcugcacacgagcccccugugcaccaccaacaccaaggagggguccaacaucugccucacgcgcaccgaccggggcugguacugcgacaacgccggcagcgucuccuucuucccgcaggccgagaccugcaaggugcagagcaaccgcguguucugcgacaccaugaacucccugacgcugcccagcgagguaaaccucugcaacgucgacaucuucaaccccaaguacgacugcaagaucaugaccuccaagaccgacgugagcuccagcgugaucaccucccugggggccaucgucagcugcuacggcaagacgaagugcaccgccagcaacaagaaccgggggaucaucaagaccuucuccaacggcugcgacuacgugagcaacaagggcguggacaccguguccgucgggaacacccuguacuacgugaacaagcaggagggcaagagccucuacgugaagggggagcccaucaucaacuucuacgacccgcuggucuuccccuccgacgaguucgacgcgagcaucucccaggugaacgagaagaucaaccagagccuggccuucauccgcaaguccgacgagcugcuccacaacgugaacgccggcaagagcacgaccaacaucaugaucaccaccaucaucaucgucaucaucgugauccugcugucccucaucgccguggggcugcugcucuacugcaaggcccggagcacgcccgucacccuguccaaggaccagcugagcggcaucaacaacaucgcguucuccaacugaggacuaguguccaccugucccuccugggcugcuggauugucucguuuuccugccaaauaaacaggaucagcgcuuuacagaucuaaaaaaaaaaaaaaaaaaaaaaaaaaaaaaaaaaaaaaaaaaaaaaaaaaaaaaaaaaaaaaaaugcaucccccccccccccccccccccccccccccccaaaggcucuuuucagagccaccagaauu

SEQ ID NO: 134 - RNA, 1994 nt, Artificial Sequence
  mRNA product Design b-2 comprising derived and/or modified sequence from HRSV(A2)__F0 (opt1)
gggagagccucugcuggaguccggggaguggcguuggcugcuagagcgaagcuuaccauggagcugcucauccugaaggccaacgccaucaccaccauccugacggcggugaccuucugcuucgccagcggccagaacaucaccgaggaguucuaccaguccacgugcagcgccgucuccaagggguaccucagcgcccugcgcaccggcugguacaccuccgugaucaccaucgagcugagcaacaucaaggagaacaagugcaacgggaccgacgccaaggugaagcucaucaagcaggagcuggacaaguacaagaacgcggucacggagcugcagcuccugaugcaguccacccccgccaccaacaaccgggcccgccgggagcugccgcgcuucaugaacuacacccucaacaacgccaagaagacgaacgugacccugagcaagaagcggaagcgccgguuccugggcuuccuccugggggugggcuccgcgaucgccagcggcgucgccguguccaaggugcugcaccucgagggggaggucaacaagaucaagagcgcccugcuguccaccaacaaggccguggugagccucuccaacggcgucagcgugcugaccuccaaggugcuggaccucaagaacuacaucgacaagcagcugcugcccaucgucaacaagcagagcugcuccaucagcaacaucgagacggugaucgaguuccagcagaagaacaaccgccuccuggagaucacccgggaguucagcgugaacgcgggggucaccacccccguguccacguacaugcugaccaacagcgagcuccugucccugaucaacgacaugcccaucaccaacgaccagaagaagcucaugagcaacaacgugcagaucguccgccagcaguccuacagcaucauguccaucaucaaggaggaggugcuggccuacgugguccagcugccgcucuacggcgugaucgacacccccugcuggaagcugcacacgagcccccugugcaccaccaacaccaaggagggguccaacaucugccucacgcggaccgaccgcggcugguacugcgacaacgccggcagcgucuccuucuucccccaggccgagaccugcaaggugcagagcaaccggguguucugcgacaccaugaacucccugacgcugccgagcgaggucaaccucugcaacguggacaucuucaaccccaaguacgacugcaagaucaugaccuccaagaccgacgugagcuccagcgucaucaccucccugggggccaucgugagcugcuacggcaagacgaagugcaccgcgagcaacaagaaccgcgggaucaucaagaccuucuccaacggcugcgacuacgugagcaacaagggcgucgacaccguguccguggggaacacccuguacuacgucaacaagcaggagggcaagagccucuacgugaagggggagcccaucaucaacuucuacgacccccugguguucccguccgacgaguucgacgccagcaucucccaggucaacgagaagaucaaccagagccuggccuucauccggaaguccgacgagcuccugcacaacgugaacgccggcaagagcacgaccaacaucaugaucaccaccaucaucaucgugaucaucgucauccugcugucccucaucgccguggggcugcugcucuacugcaaggcgcgcagcacgcccgugacccuguccaaggaccagcugagcggcaucaacaacaucgccuucuccaacugaggacuaguguccaccugucccuccugggcugcuggauugucucguuuuccugccaaauaaacaggaucagcgcuuuacagaucuaaaaaaaaaaaaaaaaaaaaaaaaaaaaaaaaaaaaaaaaaaaaaaaaaaaaaaaaaaaaaaaaugcaucccccccccccccccccccccccccccccccaaaggcucuuuucagagccaccagaauu

SEQ ID NO: 135 - RNA, 1994 nt, Artificial Sequence
  mRNA product Design b-2 comprising derived and/or modified sequence from HRSV(A2)__F0 (opt2)
gggagagccucugcuggaguccggggaguggcguuggcugcuagagcgaagcuuaccauggagcuccucauccucaaggccaacgccaucaccaccauccucaccgccgucaccuucugcuucgccuccggccagaacaucaccgaggaguucuaccaguccaccugcuccgccgucuccaagggcuaccucuccgcccuccgcaccggcugguacaccuccgucaucaccaucgagcucuccaacaucaaggagaacaagugcaacggcaccgacgccaaggucaagcucaucaagcaggagcucgacaaguacaagaacgccgucaccgagcuccagcuccucaugcaguccacccccgccaccaacaaccgcgcccgccgcgagcucccccgcuucaugaacuacacccucaacaacgccaagaagaccaacgucacccucuccaagaagcgcaagcgccgcuuccucggcuuccuccucggcgucggcuccgccaucgccuccggcgucgccgucuccaagguccuccaccucgagggcgaggucaacaagaucaaguccgcccuccucuccaccaacaaggccgucgucucccucuccaacggcgucuccguccucaccuccaagguccucgaccucaagaacuacaucgacaagcagcuccuccccaucgucaacaagcaguccugcuccaucuccaacaucgagaccgucaucgaguuccagcagaagaacaaccgccuccucgagaucacccgcgaguucuccgucaacgccggcgucaccacccccgucuccaccuacaugcucaccaacuccgagcuccucucccucaucaacgacaugcccaucaccaacgaccagaagaagcucauguccaacaacguccagaucguccgccagcaguccuacuccaucauguccaucaucaaggaggagguccucgccuacgucguccagcucccccucuacggcgucaucgacacccccugcuggaagcuccacaccuccccccucugcaccaccaacaccaaggagggcuccaacaucugccucacccgcaccgaccgcggcugguacugcgacaacgccggcuccgucuccuucuucccccaggccgagaccugcaagguccaguccaaccgcgucuucugcgacaccaugaacucccucacccuccccuccgaggucaaccucugcaacgucgacaucuucaaccccaaguacgacugcaagaucaugaccuccaagaccgacgucuccuccuccgucaucaccucccucggcgccaucgucuccugcuacggcaagaccaagugcaccgccuccaacaagaaccgcggcaucaucaagaccuucuccaacggcugcgacuacgucuccaacaagggcgucgacaccgucuccgucggcaacacccucuacuacgucaacaagcaggagggcaagucccucuacgucaagggcgagcccaucaucaacuucuacgacccccucgucuuccccuccgacgaguucgacgccuccaucucccaggucaacgagaagaucaaccagucccucgccuucauccgcaaguccgacgagcuccuccacaacgucaacgccggcaaguccaccaccaacaucaugaucaccaccaucaucaucgucaucaucgucauccuccucucccucaucgccgucggccuccuccucuacugcaaggcccgcuccacccccgucacccucuccaaggaccagcucuccggcaucaacaacaucgccuucuccaacugaggacuaguguccaccugucccuccugggcugcuggauugucucguuuuccugccaaauaaacaggaucagcgcuuuacagaucuaaaaaaaaaaaaaaaaaaaaaaaaaaaaaaaaaaaaaaaaaaaaaaaaaaaaaaaaaaaaaaaaugcaucccccccccccccccccccccccccccccccaaaggcucuuuucagagccaccagaauu

SEQ ID NO: 136 - RNA, 1994 nt, Artificial Sequence
  mRNA product Design b-2 comprising derived and/or modified sequence from HRSV(A2)__F0 (opt3)
gggagagccucugcuggaguccggggaguggcguuggcugcuagagcgaagcuuaccauggagcugcucauccuuaaggccaacgcuauuaccacaauacugacugcagugacguucugcuuugccagcggccagaauaucaccgaagaguucuaccaauccacauguucugcggucucaaaaggguauuugagugcuuuaagaacuggaugguacaccagcguuauuacaaucgaacuguccaacauuaaggagaauaaaugcaacgguaccgacgccaaggugaaacuaaucaagcaggaacucgauaaguauaaaaaugcaguaacugagcugcagcuucugaugcagucuacacccgccaccaacaauagggcucggcgcgaguugccucgauuuaugaacuacacgcucaauaacgcaaagaaaacuaaugugacccugucgaagaaacguaagagaagguuccugggcuuucucuuaggggucggaucagccauagcuagcggcguggccguuaguaaggugcugcaccuugaaggugaggucaacaaaaucaaguccgcguugcugucuacaaauaaagcagugguaagccuauccaacgggguuucagugcucacuucuaagguccuggaccuuaaaaauuauauugauaagcaacuguugccaaucgugaacaaacagagcuguucuauuuccaacaucgaaaccgugauagaguuccagcagaagaauaaccggcuccuggagauuacacgcgaauuuucagucaaugccggaguuaccacgccggugagcacuuacauguuaacaaacagugagcugcucucucuuaucaaugacaugcccauuaccaacgaucaaaagaaacugauguccaauaacguacagaucgugagacagcagagcuauucgaucaugucuauuauaaaggaagaggucuuggcuuacgugguucaacuaccucuguacggcgugaucgacacuccaugcuggaaacuccauacauccccacuguguaccacgaauaccaaggaaggcucaaacauuugccuuacaaggacugaucgggggugguauugugacaaugccggaagugucagcuucuuuccucaggcagagaccugcaaagugcaguccaaccgcguauucugugauacaaugaauagucugacuuugccaagcgagguuaaccucugcaauguggacaucuuuaaccccaaguacgauuguaagauaaugaccucaaaaacagacgucaguuccagcgugauuaccucucugggugcuaucgucucaugcuauggcaagacuaaaugcacggccaguaacaagaaucgagggaucauuaaaacauucagcaacggaugugauuacguguccaauaagggcguugacaccgugucuguagguaacacuuuauauuacgucaauaagcaagaagggaaaucgcuguaugugaagggagagccuaucauuaacuuuuacgacccccuaguuuucccgagcgaugaauuugacgcguccauaucacaggugaaugagaaaaucaaccagagucucgccuucauuagaaagucugaugaacugcuucacaaugucaacgcaggcaaaagcaccacaaauaucaugaucaccacuauuauaaucgugauuaucguaauuuugcugucccucaucgcugugggccugcuucuguacugcaaggccaggucaacacccguuacguugagcaaggaccagcucucugggauaaacaauaucgcuuucuccaacugaggacuaguguccaccugucccuccugggcugcuggauugucucguuuuccugccaaauaaacaggaucagcgcuuuacagaucuaaaaaaaaaaaaaaaaaaaaaaaaaaaaaaaaaaaaaaaaaaaaaaaaaaaaaaaaaaaaaaaaugcaucccccccccccccccccccccccccccccccaaaggcucuuuucagagccaccagaauu

SEQ ID NO: 137 - RNA, 1994 nt, Artificial Sequence
  mRNA product Design b-2 comprising derived and/or modified sequence from HRSV(A2)__F0 (opt4)
gggagagccucugcuggaguccggggaguggcguuggcugcuagagcgaagcuuaccauggagcugcugauccugaaggccaacgccaucaccaccauccugaccgccgugaccuucugcuucgccagcggccagaacaucaccgaggaguucuaccagagcaccugcagcgccgugagcaagggcuaccugagcgcccugagaaccggcugguacaccagcgugaucaccaucgagcugagcaacaucaaggagaacaagugcaacggcaccgacgccaaggugaagcugaucaagcaggagcuggacaaguacaagaacgccgugaccgagcugcagcugcugaugcagagcacccccgccaccaacaacagagccagaagagagcugcccagauucaugaacuacacccugaacaacgccaagaagaccaacgugacccugagcaagaagagaaagagaagauuccugggcuuccugcugggcgugggcagcgccaucgccagcggcguggccgugagcaaggugcugcaccuggagggcgaggugaacaagaucaagagcgcccugcugagcaccaacaaggccguggugagccugagcaacggcgugagcgugcugaccagcaaggugcuggaccugaagaacuacaucgacaagcagcugcugcccaucgugaacaagcagagcugcagcaucagcaacaucgagaccgugaucgaguuccagcagaagaacaacagacugcuggagaucaccagagaguucagcgugaacgccggcgugaccacccccgugagcaccuacaugcugaccaacagcgagcugcugagccugaucaacgacaugcccaucaccaacgaccagaagaagcugaugagcaacaacgugcagaucgugagacagcagagcuacagcaucaugagcaucaucaaggaggaggugcuggccuacguggugcagcugccccuguacggcgugaucgacacccccugcuggaagcugcacaccagcccccugugcaccaccaacaccaaggagggcagcaacaucugccugaccagaaccgacagaggcugguacugcgacaacgccggcagcgugagcuucuucccccaggccgagaccugcaaggugcagagcaacagaguguucugcgacaccaugaacagccugacccugcccagcgaggugaaccugugcaacguggacaucuucaaccccaaguacgacugcaagaucaugaccagcaagaccgacgugagcagcagcgugaucaccagccugggcgccaucgugagcugcuacggcaagaccaagugcaccgccagcaacaagaacagaggcaucaucaagaccuucagcaacggcugcgacuacgugagcaacaagggcguggacaccgugagcgugggcaacacccuguacuacgugaacaagcaggagggcaagagccuguacgugaagggcgagcccaucaucaacuucuacgacccccugguguuccccagcgacgaguucgacgccagcaucagccaggugaacgagaagaucaaccagagccuggccuucaucagaaagagcgacgagcugcugcacaacgugaacgccggcaagagcaccaccaacaucaugaucaccaccaucaucaucgugaucaucgugauccugcugagccugaucgccgugggccugcugcuguacugcaaggccagaagcacccccgugacccugagcaaggaccagcugagcggcaucaacaacaucgccuucagcaacugaggacuaguguccaccugucccuccugggcugcuggauugucucguuuuccugccaaauaaacaggaucagcgcuuuacagaucuaaaaaaaaaaaaaaaaaaaaaaaaaaaaaaaaaaaaaaaaaaaaaaaaaaaaaaaaaaaaaaaaugcaucccccccccccccccccccccccccccccccaaaggcucuuuucagagccaccagaauu

SEQ ID NO: 138 - RNA, 1994 nt, Artificial Sequence
  mRNA product Design b-2 comprising derived and/or modified sequence from HRSV(A2)__F0 (opt5)
gggagagccucugcuggaguccggggaguggcguuggcugcuagagcgaagcuuaccauggagcugcucauccugaaggccaacgcuauuaccacaauccuuacggccgugaccuucugcuuugcgagcggccagaauauuacagaagaguucuaccaauccaccuguucugcugucagcaaaggguaucuguccgcccucagaacaggaugguacaccucuguuaucacaauugaacugagcaacaucaaggagaauaaaugcaacggcaccgacgccaaggugaaacuuaucaagcaggaacuggauaaguauaaaaaugcugugacggagcuccagcugcugaugcaguccacccccgccacaaacaaucgggcucgcagagagcucccucgguuuaugaacuacacccugaauaacgccaagaaaacaaaugucacccuuucuaagaaacgcaagagacgguuccugggguuucuccugggagugggcagcgcgauugccuccgggguugcugugagcaagguccuucaccuggaaggagaggugaacaaaaucaagucugcccuccuguccacgaauaaagcuguugugagccugucuaacggcgucuccgugcucacaagcaaggugcuggaccuuaaaaauuauauugauaagcaacugcucccgaucgucaacaaacagucuuguuccauuagcaacaucgaaaccguuauugaguuccagcagaagaauaaccgccugcuugagaucacaagagaauuuuccgugaaugccggcgugaccacccccgucucuacauacaugcugacgaacagcgagcuccugucccugaucaaugacaugccuauuaccaacgaucaaaagaaacucaugagcaauaacgugcagaucguucggcagcagucuuauuccauuaugagcaucauuaaggaagaggugcuggcguacgucgugcaacuuccccuguacgggguuaucgacacaccuugcuggaaacuccauaccucuccccuguguacaaccaauacgaaggaaggaagcaacaucugccuuacacgcaccgauagaggcugguauugugacaaugccggguccgugucuuucuuuccucaggcugagaccugcaaaguccagagcaaccggguguucugugauacaaugaacucccugacccucccgagcgaggucaaucugugcaauguggacauuuuuaaccccaaguacgauuguaagaucaugacaucuaaaacggacguuuccagcucugugauuaccucccugggagccaucgucagcugcuauggcaagacaaaaugcaccgcuuccaacaagaaucgcgggauuaucaaaacauucucuaacggaugugauuacgugagcaauaagggcguugacaccguguccgucggcaacacgcucuauuacgugaauaagcaagaagggaaaucucuguaugugaagggagagccuaucauuaacuuuuacgacccccuuguuuucccuagcgaugaauuugacgccuccaucagccaggucaaugagaaaauuaaccagucucuggccuucaucagaaaguccgaugaacuccugcacaaugugaacgcuggcaaaagcaccacaaauauuaugaucaccacaauuaucaucgugauuaucgucauucugcuuucucucaucgcgguggggcugcugcucuacugcaaggcccgguccacccccguuacgcugagcaaggaccagcuuucuggaauuaacaauaucgcuuucagcaacugaggacuaguguccaccugucccuccugggcugcuggauugucucguuuuccugccaaauaaacaggaucagcgcuuuacagaucuaaaaaaaaaaaaaaaaaaaaaaaaaaaaaaaaaaaaaaaaaaaaaaaaaaaaaaaaaaaaaaaaugcaucccccccccccccccccccccccccccccccaaaggcucuuuucagagccaccagaauu

SEQ ID NO: 139 - RNA, 1994 nt, Artificial Sequence
  mRNA product Design b-2 comprising derived and/or modified sequence from HRSV(A2)__F0 (opt6)
gggagagccucugcuggaguccggggaguggcguuggcugcuagagcgaagcuuaccauggaacuucuaauauuaaaagcuaacgcaaucacuacuaucuuaaccgcaguaacauucuguuuugcauccggccaaaacauaacagaagaauuuuaccaaucaacuugcucugcagucucaaaagguuaucuaucugcauuaagaacaggcugguacaccucaguaauaacgaucgaacuaucaaacaucaaagaaaacaaauguaauggaacagacgcaaaaguaaaacuaaucaaacaagaacuagacaaauacaaaaacgcaguaaccgaacuccaacuccucaugcaaaguacaccagcaacaaauaacagagcaagacgugaacuaccacguuuuaugaauuacacgcucaauaacgcaaaaaaaacaaauguuacccuaucaaaaaaacgaaaaagaagauuccucggauuccuacuaggcguaggcucagcaauagcuucaggaguagcaguaucaaaaguacuccaccucgaaggagaaguaaacaaaaucaaaagcgcucuccucucaacaaacaaagcaguuguuucacucucaaacggaguaucaguacuaaccucaaaaguacuugaccuaaaaaauuauauagacaaacaacuauuaccaauaguaaacaaacaaagcugcuccaucuccaacaucgagacagucauagaauuucaacaaaaaaauaaccgccuauuagaaauaaccagagaauuuucaguaaacgcaggaguaacuaccccaguaucaacauauauguuaacaaacucagaacuccuaagucuaaucaacgacaugccaauaaccaacgaccaaaaaaaacuaaugagcaacaauguacaaauaguucgucaacaaucuuacuccauaaugucuauaauaaaagaagaaguacucgccuauguaguccaacuaccacuauacggagucaucgauacaccaugcuggaaacuccacacauccccacucuguacuacuaacaccaaagaagguucaaauauaugccuaaccagaacagauagagguugguacugcgauaaugcaggaucaguauccuuuuucccccaagccgaaacaugcaaaguucaauccaauagaguauuuugugauacaaugaacucuuuaacccucccauccgaagucaaucuauguaacgucgacauauuuaacccaaaauacgauugcaaaauaaugacaucaaaaacagacgucucauccucaguuauaacguccuuaggcgcuauaguaucaugcuacggcaaaacaaaauguacagcaucaaacaaaaacagaggaaucauaaaaacuuucucuaacgguugcgacuauguauccaacaaaggugucgacacaguauccguaggcaacacccuuuacuauguuaauaaacaagaaggaaaaucucuauauguaaaaggcgaaccaauuauaaauuuuuacgacccccuugucuuucccucugacgaauuugacgcuuccauaucacaagucaacgaaaaaaucaaccaaucccucgcauucauacgcaaaucagacgaacuacuacauaacgucaacgcaggcaaauccacaacaaacauaaugauaaccacaaucauaauuguaauaauaguaauacuacuuucucuaauagcagucggauuacucuuauacuguaaagcucgaucaacaccagucacccucucuaaagaucaacuauccggaaucaacaacauagcuuucucaaacuaaggacuaguguccaccugucccuccugggcugcuggauugucucguuuuccugccaaauaaacaggaucagcgcuuuacagaucuaaaaaaaaaaaaaaaaaaaaaaaaaaaaaaaaaaaaaaaaaaaaaaaaaaaaaaaaaaaaaaaaugcaucccccccccccccccccccccccccccccccaaaggcucuuuucagagccaccagaauu

SEQ ID NO: 140 - RNA, 1994 nt, Artificial Sequence
  mRNA product Design b-2 comprising derived and/or modified sequence from HRSV(A2)__F0 (opt11)
gggagagccucugcuggaguccggggaguggcguuggcugcuagagcgaagcuuaccauggaacuccucauacucaaagccaacgcaaucacaaccauacucaccgccgucaccuucugcuuugcaucuggccagaacaucacugaagaguucuaccaauccacaugcuccgccguaagcaaaggcuaccuauccgcccuacgcaccggcugguacaccagcguaaucaccauagaacucuccaauauaaaagaaaacaaaugcaacggcaccgacgcaaaagucaagcuaauaaaacaagaacucgacaaauacaaaaacgccguuaccgaacuccagcuacucaugcaaucgaccccagcaaccaacaaccgugcgagacgcgaacucccccgcuucaugaacuacacccuaaacaacgccaaaaagaccaacguaacucuauccaagaaacgcaaacgccgcuuccucggauuccuccucggcgucggcuccgcaaucgccagcggcgucgccguuagcaaaguccuucaccucgaaggagaaguaaacaaaauuaaaagcgcccucuuauccacaaacaaggccguaguaucccugucaaacggcgucuccguccuuacauccaaaguccucgaccucaagaacuacauagacaaacagcuacuacccauuguaaauaaacaaagcugcucaauuagcaacaucgaaaccguaaucgaguuccagcagaaaaacaacagacuucucgaaaucacccgcgaguucagcgucaacgccggcguaaccaccccugucucaacauacaugcuaaccaacagcgaacugcucucccucaucaacgacaugcccaucaccaacgaccaaaagaaacucaugagcaacaacguacaaaucgugcgccaacaguccuacucaauaaugucaaucaucaaagaagaagugcuagcauacgucguacaacuaccacucuacggcguaauagauacccccugcuggaagcuccauaccuccccacucuguaccaccaacaccaaagaaggcucaaacaucugccuaacgcgcacagaccguggaugguacugugacaacgccggcuccgucuccuucuucccucaagccgaaacaugcaaaguccaauccaacagagucuucugcgauaccaugaacucccugacacucccaagcgaagucaaccuuugcaacgucgauaucuuuaaccccaaauacgacugcaagaucaugacaucaaaaaccgacguauccuccucuguaauaaccucccuaggcgcaaucguaucaugcuacggcaaaaccaaauguaccgccuccaacaaaaaucgcggcaucaucaaaaccuucucgaacggcugcgacuacgucuccaacaaaggcguagacacaguuuccguaggcaacacccucuacuacgucaauaaacaggaaggcaagucccucuacgucaaaggcgaacccaucaucaauuucuacgacccccucguuuuccccuccgaugaguucgacgcaagcaucagccaggucaacgaaaagauaaaccagucccucgccuucauccgcaaaucagaugaacuccuucacaacguuaacgcaggcaagagcaccaccaacaucaugaucacaacuauaaucaucgucauaaucgucauccuacucucacuaaucgccgucggucuccuacuauauuguaaagcccgaucaacaccggucacacucuccaaagaccaacucuccggaaucaacaauaucgcuuucucgaacuaaggacuaguguccaccugucccuccugggcugcuggauugucucguuuuccugccaaauaaacaggaucagcgcuuuacagaucuaaaaaaaaaaaaaaaaaaaaaaaaaaaaaaaaaaaaaaaaaaaaaaaaaaaaaaaaaaaaaaaaugcaucccccccccccccccccccccccccccccccaaaggcucuuuucagagccaccagaauu

SEQ ID NO: 141 - RNA, 2014 nt, Artificial Sequence
  mRNA product Design b-3 comprising derived and/or modified sequence from HRSV(A2)__F0 (artificial)
gggagagucccgcagucggcguccagcggcucugcuuguucgugugugugucguugcaggccuuauucaagcuuaccauggaguugcuaauccucaaagcaaaugcaauuaccacaauccucacugcagucacauuuuguuuugcuucuggucaaaacaucacugaagaauuuuaucaaucaacaugcagugcaguuagcaaaggcuaucuuagugcucugagaacugguugguauaccaguguuauaacuauagaauuaaguaauaucaaggaaaauaaguguaauggaacagaugcuaagguaaaauugauaaaacaagaauuagauaaauauaaaaaugcuguaacagaauugcaguugcucaugcaaagcacaccagcaacaaacaaucgagccagaagagaacuaccaagguuuaugaauuauacacucaacaaugccaaaaaaaccaauguaacauuaagcaagaaaaggaaaagaagauuucuugguuuuuuguuagguguuggaucugcaaucgccaguggcguugcuguaucuaagguccugcaccuagaaggggaagugaacaagaucaaaagugcucuacuauccacaaacaaggcuguagucagcuuaucaaauggaguuagugucuuaaccagcaaaguguuagaccucaaaaacuauauagauaaacaauuguuaccuauugugaacaagcaaagcugcagcauaucaaauauagaaacugugauagaguuccaacaaaagaacaacagacuacuagagauuaccagggaauuuaguguuaaugcagguguaacuacaccuguaagcacuuacauguuaacuaauagugaauuauugucauuaaucaaugauaugccuauaacaaaugaucagaaaaaguuaauguccaacaauguucaaauaguuagacagcaaaguuacucuaucauguccauaauaaaagaggaagucuuagcauauguaguacaauuaccacuauaugguguuauagauacacccuguuggaaacuacacacauccccucuauguacaaccaacacaaaagaaggguccaacaucuguuuaacaagaacugacagaggaugguacugugacaaugcaggaucaguaucuuucuucccacaagcugaaacauguaaaguucaaucaaaucgaguauuuugugacacaaugaacaguuuaacauuaccaagugaaguaaaucucugcaauguugacauauucaaccccaaauaugauuguaaaauuaugacuucaaaaacagauguaagcagcuccguuaucacaucucuaggagccauugugucaugcuauggcaaaacuaaauguacagcauccaauaaaaaucguggaaucauaaagacauuuucuaacgggugcgauuauguaucaaauaaagggguggacacugugucuguagguaacacauuauauuauguaaauaagcaagaagguaaaagucucuauguaaaaggugaaccaauaauaaauuucuaugacccauuaguauuccccucugaugaauuugaugcaucaauaucucaagucaacgagaagauuaaccagagccuagcauuuauucguaaauccgaugaauuauuacauaauguaaaugcugguaaauccaccacaaauaucaugauaacuacuauaauuauagugauuauaguaauauuguuaucauuaauugcuguuggacugcucuuauacuguaaggccagaagcacaccagucacacuaagcaaagaucaacugagugguauaaauaauauugcauuuaguaacuaaggacuaguguccaccugucccuccugggcugcuggauugucucguuuuccugccaaauaaacaggaucagcgcuuuacagaucuaaaaaaaaaaaaaaaaaaaaaaaaaaaaaaaaaaaaaaaaaaaaaaaaaaaaaaaaaaaaaaaaugcaucccccccccccccccccccccccccccccccaaaggcucuuuucagagccaccagaauu

SEQ ID NO: 142 - RNA, 2014 nt, Artificial Sequence
  mRNA product Design b-3 comprising derived and/or modified sequence from HRSV(A2)__F0 (opt1)
gggagagucccgcagucggcguccagcggcucugcuuguucgugugugugucguugcaggccuuauucaagcuuaccauggagcugcucauccugaaggccaacgccaucaccaccauccugacggcggugaccuucugcuucgccagcggccagaacaucaccgaggaguucuaccaguccaccugcagcgccgucuccaagggguaccucagcgcccugcggacgggcugguacaccuccgugaucaccaucgagcugagcaacaucaaggagaacaagugcaacgggaccgacgccaaggugaagcucaucaagcaggagcuggacaaguacaagaacgcggucacggagcugcagcuccugaugcaguccaccccggcaaccaacaaccgcgcccggcgcgagcugccccgguucaugaacuacacccucaacaacgccaagaagacgaacgugacccugagcaagaagcgcaagcggcgcuuccugggcuuccuccugggggugggcuccgccaucgcgagcggcgucgccguguccaaggugcugcaccucgagggggaggucaacaagaucaagagcgcccugcuguccaccaacaaggccguggugagccucuccaacggcgucagcgugcugaccuccaaggugcuggaccucaagaacuacaucgacaagcagcugcugcccaucgucaacaagcagagcugcuccaucagcaacaucgagacggugaucgaguuccagcagaagaacaaccggcuccuggagaucacccgcgaguucagcgugaacgccggggucaccacccccguguccacguacaugcugaccaacagcgagcuccugucccugaucaacgacaugccgaucaccaacgaccagaagaagcucaugagcaacaacgugcagaucguccggcagcaguccuacagcaucauguccaucaucaaggaggaggugcuggcguacgugguccagcugccccucuacggcgugaucgacacccccugcuggaagcugcacacgagcccccugugcaccaccaacaccaaggagggguccaacaucugccucacgcgcaccgaccggggcugguacugcgacaacgccggcagcgucuccuucuucccgcaggccgagaccugcaaggugcagagcaaccgcguguucugcgacaccaugaacucccugacgcugcccagcgagguaaaccucugcaacgucgacaucuucaaccccaaguacgacugcaagaucaugaccuccaagaccgacgugagcuccagcgugaucaccucccugggggccaucgucagcugcuacggcaagacgaagugcaccgccagcaacaagaaccgggggaucaucaagaccuucuccaacggcugcgacuacgugagcaacaagggcguggacaccguguccgucgggaacacccuguacuacgugaacaagcaggagggcaagagccucuacgugaagggggagcccaucaucaacuucuacgacccgcuggucuuccccuccgacgaguucgacgcgagcaucucccaggugaacgagaagaucaaccagagccuggccuucauccgcaaguccgacgagcugcuccacaacgugaacgccggcaagagcacgaccaacaucaugaucaccaccaucaucaucgucaucaucgugauccugcugucccucaucgccguggggcugcugcucuacugcaaggcccggagcacgcccgucacccuguccaaggaccagcugagcggcaucaacaacaucgcguucuccaacugaggacuaguguccaccugucccuccugggcugcuggauugucucguuuuccugccaaauaaacaggaucagcgcuuuacagaucuaaaaaaaaaaaaaaaaaaaaaaaaaaaaaaaaaaaaaaaaaaaaaaaaaaaaaaaaaaaaaaaaugcaucccccccccccccccccccccccccccccccaaaggcucuuuucagagccaccagaauu

SEQ ID NO: 143 - RNA, 2014 nt, Artificial Sequence
  mRNA product Design b-3 comprising derived and/or modified sequence from HRSV(A2)__F0 (opt1)
gggagagucccgcagucggcguccagcggcucugcuuguucgugugugugucguugcaggccuuauucaagcuuaccauggagcugcucauccugaaggccaacgccaucaccaccauccugacggcggugaccuucugcuucgccagcggccagaacaucaccgaggaguucuaccaguccacgugcagcgccgucuccaagggguaccucagcgcccugcgcaccggcugguacaccuccgugaucaccaucgagcugagcaacaucaaggagaacaagugcaacgggaccgacgccaaggugaagcucaucaagcaggagcuggacaaguacaagaacgcggucacggagcugcagcuccugaugcaguccacccccgccaccaacaaccgggcccgccgggagcugccgcgcuucaugaacuacacccucaacaacgccaagaagacgaacgugacccugagcaagaagcggaagcgccgguuccugggcuuccuccugggggugggcuccgcgaucgccagcggcgucgccguguccaaggugcugcaccucgagggggaggucaacaagaucaagagcgcccugcuguccaccaacaaggccguggugagccucuccaacggcgucagcgugcugaccuccaaggugcuggaccucaagaacuacaucgacaagcagcugcugcccaucgucaacaagcagagcugcuccaucagcaacaucgagacggugaucgaguuccagcagaagaacaaccgccuccuggagaucacccgggaguucagcgugaacgcgggggucaccacccccguguccacguacaugcugaccaacagcgagcuccugucccugaucaacgacaugcccaucaccaacgaccagaagaagcucaugagcaacaacgugcagaucguccgccagcaguccuacagcaucauguccaucaucaaggaggaggugcuggccuacgugguccagcugccgcucuacggcgugaucgacacccccugcuggaagcugcacacgagcccccugugcaccaccaacaccaaggagggguccaacaucugccucacgcggaccgaccgcggcugguacugcgacaacgccggcagcgucuccuucuucccccaggccgagaccugcaaggugcagagcaaccggguguucugcgacaccaugaacucccugacgcugccgagcgaggucaaccucugcaacguggacaucuucaaccccaaguacgacugcaagaucaugaccuccaagaccgacgugagcuccagcgucaucaccucccugggggccaucgugagcugcuacggcaagacgaagugcaccgcgagcaacaagaaccgcgggaucaucaagaccuucuccaacggcugcgacuacgugagcaacaagggcgucgacaccguguccguggggaacacccuguacuacgucaacaagcaggagggcaagagccucuacgugaagggggagcccaucaucaacuucuacgacccccugguguucccguccgacgaguucgacgccagcaucucccaggucaacgagaagaucaaccagagccuggccuucauccggaaguccgacgagcuccugcacaacgugaacgccggcaagagcacgaccaacaucaugaucaccaccaucaucaucgugaucaucgucauccugcugucccucaucgccguggggcugcugcucuacugcaaggcgcgcagcacgcccgugacccuguccaaggaccagcugagcggcaucaacaacaucgccuucuccaacugaggacuaguguccaccugucccuccugggcugcuggauugucucguuuuccugccaaauaaacaggaucagcgcuuuacagaucuaaaaaaaaaaaaaaaaaaaaaaaaaaaaaaaaaaaaaaaaaaaaaaaaaaaaaaaaaaaaaaaaugcaucccccccccccccccccccccccccccccccaaaggcucuuuucagagccaccagaauu

SEQ ID NO: 144 - RNA, 2014 nt, Artificial Sequence
  mRNA product Design b-3 comprising derived and/or modified sequence from HRSV(A2)__F0 (opt2)
gggagagucccgcagucggcguccagcggcucugcuuguucgugugugugucguugcaggccuuauucaagcuuaccauggagcuccucauccucaaggccaacgccaucaccaccauccucaccgccgucaccuucugcuucgccuccggccagaacaucaccgaggaguucuaccaguccaccugcuccgccgucuccaagggcuaccucuccgcccuccgcaccggcugguacaccuccgucaucaccaucgagcucuccaacaucaaggagaacaagugcaacggcaccgacgccaaggucaagcucaucaagcaggagcucgacaaguacaagaacgccgucaccgagcuccagcuccucaugcaguccacccccgccaccaacaaccgcgcccgccgcgagcucccccgcuucaugaacuacacccucaacaacgccaagaagaccaacgucacccucuccaagaagcgcaagcgccgcuuccucggcuuccuccucggcgucggcuccgccaucgccuccggcgucgccgucuccaagguccuccaccucgagggcgaggucaacaagaucaaguccgcccuccucuccaccaacaaggccgucgucucccucuccaacggcgucuccguccucaccuccaagguccucgaccucaagaacuacaucgacaagcagcuccuccccaucgucaacaagcaguccugcuccaucuccaacaucgagaccgucaucgaguuccagcagaagaacaaccgccuccucgagaucacccgcgaguucuccgucaacgccggcgucaccacccccgucuccaccuacaugcucaccaacuccgagcuccucucccucaucaacgacaugcccaucaccaacgaccagaagaagcucauguccaacaacguccagaucguccgccagcaguccuacuccaucauguccaucaucaaggaggagguccucgccuacgucguccagcucccccucuacggcgucaucgacacccccugcuggaagcuccacaccuccccccucugcaccaccaacaccaaggagggcuccaacaucugccucacccgcaccgaccgcggcugguacugcgacaacgccggcuccgucuccuucuucccccaggccgagaccugcaagguccaguccaaccgcgucuucugcgacaccaugaacucccucacccuccccuccgaggucaaccucugcaacgucgacaucuucaaccccaaguacgacugcaagaucaugaccuccaagaccgacgucuccuccuccgucaucaccucccucggcgccaucgucuccugcuacggcaagaccaagugcaccgccuccaacaagaaccgcggcaucaucaagaccuucuccaacggcugcgacuacgucuccaacaagggcgucgacaccgucuccgucggcaacacccucuacuacgucaacaagcaggagggcaagucccucuacgucaagggcgagcccaucaucaacuucuacgacccccucgucuuccccuccgacgaguucgacgccuccaucucccaggucaacgagaagaucaaccagucccucgccuucauccgcaaguccgacgagcuccuccacaacgucaacgccggcaaguccaccaccaacaucaugaucaccaccaucaucaucgucaucaucgucauccuccucucccucaucgccgucggccuccuccucuacugcaaggcccgcuccacccccgucacccucuccaaggaccagcucuccggcaucaacaacaucgccuucuccaacugaggacuaguguccaccugucccuccugggcugcuggauugucucguuuuccugccaaauaaacaggaucagcgcuuuacagaucuaaaaaaaaaaaaaaaaaaaaaaaaaaaaaaaaaaaaaaaaaaaaaaaaaaaaaaaaaaaaaaaaugcaucccccccccccccccccccccccccccccccaaaggcucuuuucagagccaccagaauu

SEQ ID NO: 145 - RNA, 2014 nt, Artificial Sequence
  mRNA product Design b-3 comprising derived and/or modified sequence from HRSV(A2)__F0 (opt3)
gggagagucccgcagucggcguccagcggcucugcuuguucgugugugugucguugcaggccuuauucaagcuuaccauggagcugcucauccuuaaggccaacgcuauuaccacaauacugacugcagugacguucugcuuugccagcggccagaauaucaccgaagaguucuaccaauccacauguucugcggucucaaaaggguauuugagugcuuuaagaacuggaugguacaccagcguuauuacaaucgaacuguccaacauuaaggagaauaaaugcaacgguaccgacgccaaggugaaacuaaucaagcaggaacucgauaaguauaaaaaugcaguaacugagcugcagcuucugaugcagucuacacccgccaccaacaauagggcucggcgcgaguugccucgauuuaugaacuacacgcucaauaacgcaaagaaaacuaaugugacccugucgaagaaacguaagagaagguuccugggcuuucucuuaggggucggaucagccauagcuagcggcguggccguuaguaaggugcugcaccuugaaggugaggucaacaaaaucaaguccgcguugcugucuacaaauaaagcagugguaagccuauccaacgggguuucagugcucacuucuaagguccuggaccuuaaaaauuauauugauaagcaacuguugccaaucgugaacaaacagagcuguucuauuuccaacaucgaaaccgugauagaguuccagcagaagaauaaccggcuccuggagauuacacgcgaauuuucagucaaugccggaguuaccacgccggugagcacuuacauguuaacaaacagugagcugcucucucuuaucaaugacaugcccauuaccaacgaucaaaagaaacugauguccaauaacguacagaucgugagacagcagagcuauucgaucaugucuauuauaaaggaagaggucuuggcuuacgugguucaacuaccucuguacggcgugaucgacacuccaugcuggaaacuccauacauccccacuguguaccacgaauaccaaggaaggcucaaacauuugccuuacaaggacugaucgggggugguauugugacaaugccggaagugucagcuucuuuccucaggcagagaccugcaaagugcaguccaaccgcguauucugugauacaaugaauagucugacuuugccaagcgagguuaaccucugcaauguggacaucuuuaaccccaaguacgauuguaagauaaugaccucaaaaacagacgucaguuccagcgugauuaccucucugggugcuaucgucucaugcuauggcaagacuaaaugcacggccaguaacaagaaucgagggaucauuaaaacauucagcaacggaugugauuacguguccaauaagggcguugacaccgugucuguagguaacacuuuauauuacgucaauaagcaagaagggaaaucgcuguaugugaagggagagccuaucauuaacuuuuacgacccccuaguuuucccgagcgaugaauuugacgcguccauaucacaggugaaugagaaaaucaaccagagucucgccuucauuagaaagucugaugaacugcuucacaaugucaacgcaggcaaaagcaccacaaauaucaugaucaccacuauuauaaucgugauuaucguaauuuugcugucccucaucgcugugggccugcuucuguacugcaaggccaggucaacacccguuacguugagcaaggaccagcucucugggauaaacaauaucgcuuucuccaacugaggacuaguguccaccugucccuccugggcugcuggauugucucguuuuccugccaaauaaacaggaucagcgcuuuacagaucuaaaaaaaaaaaaaaaaaaaaaaaaaaaaaaaaaaaaaaaaaaaaaaaaaaaaaaaaaaaaaaaaugcaucccccccccccccccccccccccccccccccaaaggcucuuuucagagccaccagaauu

SEQ ID NO: 146 - RNA, 2014 nt, Artificial Sequence
  mRNA product Design b-3 comprising derived and/or modified sequence from HRSV(A2)__F0 (opt4)
gggagagucccgcagucggcguccagcggcucugcuuguucgugugugugucguugcaggccuuauucaagcuuaccauggagcugcugauccugaaggccaacgccaucaccaccauccugaccgccgugaccuucugcuucgccagcggccagaacaucaccgaggaguucuaccagagcaccugcagcgccgugagcaagggcuaccugagcgcccugagaaccggcugguacaccagcgugaucaccaucgagcugagcaacaucaaggagaacaagugcaacggcaccgacgccaaggugaagcugaucaagcaggagcuggacaaguacaagaacgccgugaccgagcugcagcugcugaugcagagcacccccgccaccaacaacagagccagaagagagcugcccagauucaugaacuacacccugaacaacgccaagaagaccaacgugacccugagcaagaagagaaagagaagauuccugggcuuccugcugggcgugggcagcgccaucgccagcggcguggccgugagcaaggugcugcaccuggagggcgaggugaacaagaucaagagcgcccugcugagcaccaacaaggccguggugagccugagcaacggcgugagcgugcugaccagcaaggugcuggaccugaagaacuacaucgacaagcagcugcugcccaucgugaacaagcagagcugcagcaucagcaacaucgagaccgugaucgaguuccagcagaagaacaacagacugcuggagaucaccagagaguucagcgugaacgccggcgugaccacccccgugagcaccuacaugcugaccaacagcgagcugcugagccugaucaacgacaugcccaucaccaacgaccagaagaagcugaugagcaacaacgugcagaucgugagacagcagagcuacagcaucaugagcaucaucaaggaggaggugcuggccuacguggugcagcugccccuguacggcgugaucgacacccccugcuggaagcugcacaccagcccccugugcaccaccaacaccaaggagggcagcaacaucugccugaccagaaccgacagaggcugguacugcgacaacgccggcagcgugagcuucuucccccaggccgagaccugcaaggugcagagcaacagaguguucugcgacaccaugaacagccugacccugcccagcgaggugaaccugugcaacguggacaucuucaaccccaaguacgacugcaagaucaugaccagcaagaccgacgugagcagcagcgugaucaccagccugggcgccaucgugagcugcuacggcaagaccaagugcaccgccagcaacaagaacagaggcaucaucaagaccuucagcaacggcugcgacuacgugagcaacaagggcguggacaccgugagcgugggcaacacccuguacuacgugaacaagcaggagggcaagagccuguacgugaagggcgagcccaucaucaacuucuacgacccccugguguuccccagcgacgaguucgacgccagcaucagccaggugaacgagaagaucaaccagagccuggccuucaucagaaagagcgacgagcugcugcacaacgugaacgccggcaagagcaccaccaacaucaugaucaccaccaucaucaucgugaucaucgugauccugcugagccugaucgccgugggccugcugcuguacugcaaggccagaagcacccccgugacccugagcaaggaccagcugagcggcaucaacaacaucgccuucagcaacugaggacuaguguccaccugucccuccugggcugcuggauugucucguuuuccugccaaauaaacaggaucagcgcuuuacagaucuaaaaaaaaaaaaaaaaaaaaaaaaaaaaaaaaaaaaaaaaaaaaaaaaaaaaaaaaaaaaaaaaugcaucccccccccccccccccccccccccccccccaaaggcucuuuucagagccaccagaauu

SEQ ID NO: 147 - RNA, 2014 nt, Artificial Sequence
  mRNA product Design b-3 comprising derived and/or modified sequence from HRSV(A2)__F0 (opt5)
gggagagucccgcagucggcguccagcggcucugcuuguucgugugugugucguugcaggccuuauucaagcuuaccauggagcugcucauccugaaggccaacgcuauuaccacaauccuuacggccgugaccuucugcuuugcgagcggccagaauauuacagaagaguucuaccaauccaccuguucugcugucagcaaaggguaucuguccgcccucagaacaggaugguacaccucuguuaucacaauugaacugagcaacaucaaggagaauaaaugcaacggcaccgacgccaaggugaaacuuaucaagcaggaacuggauaaguauaaaaaugcugugacggagcuccagcugcugaugcaguccacccccgccacaaacaaucgggcucgcagagagcucccucgguuuaugaacuacacccugaauaacgccaagaaaacaaaugucacccuuucuaagaaacgcaagagacgguuccugggguuucuccugggagugggcagcgcgauugccuccgggguugcugugagcaagguccuucaccuggaaggagaggugaacaaaaucaagucugcccuccuguccacgaauaaagcuguugugagccugucuaacggcgucuccgugcucacaagcaaggugcuggaccuuaaaaauuauauugauaagcaacugcucccgaucgucaacaaacagucuuguuccauuagcaacaucgaaaccguuauugaguuccagcagaagaauaaccgccugcuugagaucacaagagaauuuuccgugaaugccggcgugaccacccccgucucuacauacaugcugacgaacagcgagcuccugucccugaucaaugacaugccuauuaccaacgaucaaaagaaacucaugagcaauaacgugcagaucguucggcagcagucuuauuccauuaugagcaucauuaaggaagaggugcuggcguacgucgugcaacuuccccuguacgggguuaucgacacaccuugcuggaaacuccauaccucuccccuguguacaaccaauacgaaggaaggaagcaacaucugccuuacacgcaccgauagaggcugguauugugacaaugccggguccgugucuuucuuuccucaggcugagaccugcaaaguccagagcaaccggguguucugugauacaaugaacucccugacccucccgagcgaggucaaucugugcaauguggacauuuuuaaccccaaguacgauuguaagaucaugacaucuaaaacggacguuuccagcucugugauuaccucccugggagccaucgucagcugcuauggcaagacaaaaugcaccgcuuccaacaagaaucgcgggauuaucaaaacauucucuaacggaugugauuacgugagcaauaagggcguugacaccguguccgucggcaacacgcucuauuacgugaauaagcaagaagggaaaucucuguaugugaagggagagccuaucauuaacuuuuacgacccccuuguuuucccuagcgaugaauuugacgccuccaucagccaggucaaugagaaaauuaaccagucucuggccuucaucagaaaguccgaugaacuccugcacaaugugaacgcuggcaaaagcaccacaaauauuaugaucaccacaauuaucaucgugauuaucgucauucugcuuucucucaucgcgguggggcugcugcucuacugcaaggcccgguccacccccguuacgcugagcaaggaccagcuuucuggaauuaacaauaucgcuuucagcaacugaggacuaguguccaccugucccuccugggcugcuggauugucucguuuuccugccaaauaaacaggaucagcgcuuuacagaucuaaaaaaaaaaaaaaaaaaaaaaaaaaaaaaaaaaaaaaaaaaaaaaaaaaaaaaaaaaaaaaaaugcaucccccccccccccccccccccccccccccccaaaggcucuuuucagagccaccagaauu

SEQ ID NO: 148 - RNA, 2014 nt, Artificial Sequence
  mRNA product Design b-3 comprising derived and/or modified sequence from HRSV(A2)__F0 (opt6)
gggagagucccgcagucggcguccagcggcucugcuuguucgugugugugucguugcaggccuuauucaagcuuaccauggaacuucuaauauuaaaagcuaacgcaaucacuacuaucuuaaccgcaguaacauucuguuuugcauccggccaaaacauaacagaagaauuuuaccaaucaacuugcucugcagucucaaaagguuaucuaucugcauuaagaacaggcugguacaccucaguaauaacgaucgaacuaucaaacaucaaagaaaacaaauguaauggaacagacgcaaaaguaaaacuaaucaaacaagaacuagacaaauacaaaaacgcaguaaccgaacuccaacuccucaugcaaaguacaccagcaacaaauaacagagcaagacgugaacuaccacguuuuaugaauuacacgcucaauaacgcaaaaaaaacaaauguuacccuaucaaaaaaacgaaaaagaagauuccucggauuccuacuaggcguaggcucagcaauagcuucaggaguagcaguaucaaaaguacuccaccucgaaggagaaguaaacaaaaucaaaagcgcucuccucucaacaaacaaagcaguuguuucacucucaaacggaguaucaguacuaaccucaaaaguacuugaccuaaaaaauuauauagacaaacaacuauuaccaauaguaaacaaacaaagcugcuccaucuccaacaucgagacagucauagaauuucaacaaaaaaauaaccgccuauuagaaauaaccagagaauuuucaguaaacgcaggaguaacuaccccaguaucaacauauauguuaacaaacucagaacuccuaagucuaaucaacgacaugccaauaaccaacgaccaaaaaaaacuaaugagcaacaauguacaaauaguucgucaacaaucuuacuccauaaugucuauaauaaaagaagaaguacucgccuauguaguccaacuaccacuauacggagucaucgauacaccaugcuggaaacuccacacauccccacucuguacuacuaacaccaaagaagguucaaauauaugccuaaccagaacagauagagguugguacugcgauaaugcaggaucaguauccuuuuucccccaagccgaaacaugcaaaguucaauccaauagaguauuuugugauacaaugaacucuuuaacccucccauccgaagucaaucuauguaacgucgacauauuuaacccaaaauacgauugcaaaauaaugacaucaaaaacagacgucucauccucaguuauaacguccuuaggcgcuauaguaucaugcuacggcaaaacaaaauguacagcaucaaacaaaaacagaggaaucauaaaaacuuucucuaacgguugcgacuauguauccaacaaaggugucgacacaguauccguaggcaacacccuuuacuauguuaauaaacaagaaggaaaaucucuauauguaaaaggcgaaccaauuauaaauuuuuacgacccccuugucuuucccucugacgaauuugacgcuuccauaucacaagucaacgaaaaaaucaaccaaucccucgcauucauacgcaaaucagacgaacuacuacauaacgucaacgcaggcaaauccacaacaaacauaaugauaaccacaaucauaauuguaauaauaguaauacuacuuucucuaauagcagucggauuacucuuauacuguaaagcucgaucaacaccagucacccucucuaaagaucaacuauccggaaucaacaacauagcuuucucaaacuaaggacuaguguccaccugucccuccugggcugcuggauugucucguuuuccugccaaauaaacaggaucagcgcuuuacagaucuaaaaaaaaaaaaaaaaaaaaaaaaaaaaaaaaaaaaaaaaaaaaaaaaaaaaaaaaaaaaaaaaugcaucccccccccccccccccccccccccccccccaaaggcucuuuucagagccaccagaauu

SEQ ID NO: 149 - RNA, 2014 nt, Artificial Sequence
  mRNA product Design b-3 comprising derived and/or modified sequence from HRSV(A2)__F0 (opt11)
gggagagucccgcagucggcguccagcggcucugcuuguucgugugugugucguugcaggccuuauucaagcuuaccauggaacuccucauacucaaagccaacgcaaucacaaccauacucaccgccgucaccuucugcuuugcaucuggccagaacaucacugaagaguucuaccaauccacaugcuccgccguaagcaaaggcuaccuauccgcccuacgcaccggcugguacaccagcguaaucaccauagaacucuccaauauaaaagaaaacaaaugcaacggcaccgacgcaaaagucaagcuaauaaaacaagaacucgacaaauacaaaaacgccguuaccgaacuccagcuacucaugcaaucgaccccagcaaccaacaaccgugcgagacgcgaacucccccgcuucaugaacuacacccuaaacaacgccaaaaagaccaacguaacucuauccaagaaacgcaaacgccgcuuccucggauuccuccucggcgucggcuccgcaaucgccagcggcgucgccguuagcaaaguccuucaccucgaaggagaaguaaacaaaauuaaaagcgcccucuuauccacaaacaaggccguaguaucccugucaaacggcgucuccguccuuacauccaaaguccucgaccucaagaacuacauagacaaacagcuacuacccauuguaaauaaacaaagcugcucaauuagcaacaucgaaaccguaaucgaguuccagcagaaaaacaacagacuucucgaaaucacccgcgaguucagcgucaacgccggcguaaccaccccugucucaacauacaugcuaaccaacagcgaacugcucucccucaucaacgacaugcccaucaccaacgaccaaaagaaacucaugagcaacaacguacaaaucgugcgccaacaguccuacucaauaaugucaaucaucaaagaagaagugcuagcauacgucguacaacuaccacucuacggcguaauagauacccccugcuggaagcuccauaccuccccacucuguaccaccaacaccaaagaaggcucaaacaucugccuaacgcgcacagaccguggaugguacugugacaacgccggcuccgucuccuucuucccucaagccgaaacaugcaaaguccaauccaacagagucuucugcgauaccaugaacucccugacacucccaagcgaagucaaccuuugcaacgucgauaucuuuaaccccaaauacgacugcaagaucaugacaucaaaaaccgacguauccuccucuguaauaaccucccuaggcgcaaucguaucaugcuacggcaaaaccaaauguaccgccuccaacaaaaaucgcggcaucaucaaaaccuucucgaacggcugcgacuacgucuccaacaaaggcguagacacaguuuccguaggcaacacccucuacuacgucaauaaacaggaaggcaagucccucuacgucaaaggcgaacccaucaucaauuucuacgacccccucguuuuccccuccgaugaguucgacgcaagcaucagccaggucaacgaaaagauaaaccagucccucgccuucauccgcaaaucagaugaacuccuucacaacguuaacgcaggcaagagcaccaccaacaucaugaucacaacuauaaucaucgucauaaucgucauccuacucucacuaaucgccgucggucuccuacuauauuguaaagcccgaucaacaccggucacacucuccaaagaccaacucuccggaaucaacaauaucgcuuucucgaacuaaggacuaguguccaccugucccuccugggcugcuggauugucucguuuuccugccaaauaaacaggaucagcgcuuuacagaucuaaaaaaaaaaaaaaaaaaaaaaaaaaaaaaaaaaaaaaaaaaaaaaaaaaaaaaaaaaaaaaaaugcaucccccccccccccccccccccccccccccccaaaggcucuuuucagagccaccagaauu

SEQ ID NO: 150 - RNA, 2065 nt, Artificial Sequence
  mRNA product Design b-4 comprising derived and/or modified sequence from HRSV(A2)__F0 (artificial)
gggagagucccgcagucggcguccagcggcucugcuuguucgugugugugucguugcaggccuuauucaagcuuaccauggaguugcuaauccucaaagcaaaugcaauuaccacaauccucacugcagucacauuuuguuuugcuucuggucaaaacaucacugaagaauuuuaucaaucaacaugcagugcaguuagcaaaggcuaucuuagugcucugagaacugguugguauaccaguguuauaacuauagaauuaaguaauaucaaggaaaauaaguguaauggaacagaugcuaagguaaaauugauaaaacaagaauuagauaaauauaaaaaugcuguaacagaauugcaguugcucaugcaaagcacaccagcaacaaacaaucgagccagaagagaacuaccaagguuuaugaauuauacacucaacaaugccaaaaaaaccaauguaacauuaagcaagaaaaggaaaagaagauuucuugguuuuuuguuagguguuggaucugcaaucgccaguggcguugcuguaucuaagguccugcaccuagaaggggaagugaacaagaucaaaagugcucuacuauccacaaacaaggcuguagucagcuuaucaaauggaguuagugucuuaaccagcaaaguguuagaccucaaaaacuauauagauaaacaauuguuaccuauugugaacaagcaaagcugcagcauaucaaauauagaaacugugauagaguuccaacaaaagaacaacagacuacuagagauuaccagggaauuuaguguuaaugcagguguaacuacaccuguaagcacuuacauguuaacuaauagugaauuauugucauuaaucaaugauaugccuauaacaaaugaucagaaaaaguuaauguccaacaauguucaaauaguuagacagcaaaguuacucuaucauguccauaauaaaagaggaagucuuagcauauguaguacaauuaccacuauaugguguuauagauacacccuguuggaaacuacacacauccccucuauguacaaccaacacaaaagaaggguccaacaucuguuuaacaagaacugacagaggaugguacugugacaaugcaggaucaguaucuuucuucccacaagcugaaacauguaaaguucaaucaaaucgaguauuuugugacacaaugaacaguuuaacauuaccaagugaaguaaaucucugcaauguugacauauucaaccccaaauaugauuguaaaauuaugacuucaaaaacagauguaagcagcuccguuaucacaucucuaggagccauugugucaugcuauggcaaaacuaaauguacagcauccaauaaaaaucguggaaucauaaagacauuuucuaacgggugcgauuauguaucaaauaaagggguggacacugugucuguagguaacacauuauauuauguaaauaagcaagaagguaaaagucucuauguaaaaggugaaccaauaauaaauuucuaugacccauuaguauuccccucugaugaauuugaugcaucaauaucucaagucaacgagaagauuaaccagagccuagcauuuauucguaaauccgaugaauuauuacauaauguaaaugcugguaaauccaccacaaauaucaugauaacuacuauaauuauagugauuauaguaauauuguuaucauuaauugcuguuggacugcucuuauacuguaaggccagaagcacaccagucacacuaagcaaagaucaacugagugguauaaauaauauugcauuuaguaacuaaggacuaguaauaaggaaacuguaugaaugucugugggcaggaagugaagagauccuucuguaaagguuuuuggaauuaugucugcugaauaauaaacuuuuuugaaauaauaaaucugguagaaaaaugagaucuaaaaaaaaaaaaaaaaaaaaaaaaaaaaaaaaaaaaaaaaaaaaaaaaaaaaaaaaaaaaaaaaugcaucccccccccccccccccccccccccccccccaaaggcucuuuucagagccaccagaauu

SEQ ID NO: 151 - RNA, 2065 nt, Artificial Sequence
  mRNA product Design b-4 comprising derived and/or modified sequence from HRSV(A2)__F0 (opt1)
gggagagucccgcagucggcguccagcggcucugcuuguucgugugugugucguugcaggccuuauucaagcuuaccauggagcugcucauccugaaggccaacgccaucaccaccauccugacggcggugaccuucugcuucgccagcggccagaacaucaccgaggaguucuaccaguccaccugcagcgccgucuccaagggguaccucagcgcccugcggacgggcugguacaccuccgugaucaccaucgagcugagcaacaucaaggagaacaagugcaacgggaccgacgccaaggugaagcucaucaagcaggagcuggacaaguacaagaacgcggucacggagcugcagcuccugaugcaguccaccccggcaaccaacaaccgcgcccggcgcgagcugccccgguucaugaacuacacccucaacaacgccaagaagacgaacgugacccugagcaagaagcgcaagcggcgcuuccugggcuuccuccugggggugggcuccgccaucgcgagcggcgucgccguguccaaggugcugcaccucgagggggaggucaacaagaucaagagcgcccugcuguccaccaacaaggccguggugagccucuccaacggcgucagcgugcugaccuccaaggugcuggaccucaagaacuacaucgacaagcagcugcugcccaucgucaacaagcagagcugcuccaucagcaacaucgagacggugaucgaguuccagcagaagaacaaccggcuccuggagaucacccgcgaguucagcgugaacgccggggucaccacccccguguccacguacaugcugaccaacagcgagcuccugucccugaucaacgacaugccgaucaccaacgaccagaagaagcucaugagcaacaacgugcagaucguccggcagcaguccuacagcaucauguccaucaucaaggaggaggugcuggcguacgugguccagcugccccucuacggcgugaucgacacccccugcuggaagcugcacacgagcccccugugcaccaccaacaccaaggagggguccaacaucugccucacgcgcaccgaccggggcugguacugcgacaacgccggcagcgucuccuucuucccgcaggccgagaccugcaaggugcagagcaaccgcguguucugcgacaccaugaacucccugacgcugcccagcgagguaaaccucugcaacgucgacaucuucaaccccaaguacgacugcaagaucaugaccuccaagaccgacgugagcuccagcgugaucaccucccugggggccaucgucagcugcuacggcaagacgaagugcaccgccagcaacaagaaccgggggaucaucaagaccuucuccaacggcugcgacuacgugagcaacaagggcguggacaccguguccgucgggaacacccuguacuacgugaacaagcaggagggcaagagccucuacgugaagggggagcccaucaucaacuucuacgacccgcuggucuuccccuccgacgaguucgacgcgagcaucucccaggugaacgagaagaucaaccagagccuggccuucauccgcaaguccgacgagcugcuccacaacgugaacgccggcaagagcacgaccaacaucaugaucaccaccaucaucaucgucaucaucgugauccugcugucccucaucgccguggggcugcugcucuacugcaaggcccggagcacgcccgucacccuguccaaggaccagcugagcggcaucaacaacaucgcguucuccaacugaggacuaguaauaaggaaacuguaugaaugucugugggcaggaagugaagagauccuucuguaaagguuuuuggaauuaugucugcugaauaauaaacuuuuuugaaauaauaaaucugguagaaaaaugagaucuaaaaaaaaaaaaaaaaaaaaaaaaaaaaaaaaaaaaaaaaaaaaaaaaaaaaaaaaaaaaaaaaugcaucccccccccccccccccccccccccccccccaaaggcucuuuucagagccaccagaauu

SEQ ID NO: 152 - RNA, 2065 nt, Artificial Sequence
  mRNA product Design b-4 comprising derived and/or modified sequence from HRSV(A2)__F0 (opt1)
gggagagucccgcagucggcguccagcggcucugcuuguucgugugugugucguugcaggccuuauucaagcuuaccauggagcugcucauccugaaggccaacgccaucaccaccauccugacggcggugaccuucugcuucgccagcggccagaacaucaccgaggaguucuaccaguccacgugcagcgccgucuccaagggguaccucagcgcccugcgcaccggcugguacaccuccgugaucaccaucgagcugagcaacaucaaggagaacaagugcaacgggaccgacgccaaggugaagcucaucaagcaggagcuggacaaguacaagaacgcggucacggagcugcagcuccugaugcaguccacccccgccaccaacaaccgggcccgccgggagcugccgcgcuucaugaacuacacccucaacaacgccaagaagacgaacgugacccugagcaagaagcggaagcgccgguuccugggcuuccuccugggggugggcuccgcgaucgccagcggcgucgccguguccaaggugcugcaccucgagggggaggucaacaagaucaagagcgcccugcuguccaccaacaaggccguggugagccucuccaacggcgucagcgugcugaccuccaaggugcuggaccucaagaacuacaucgacaagcagcugcugcccaucgucaacaagcagagcugcuccaucagcaacaucgagacggugaucgaguuccagcagaagaacaaccgccuccuggagaucacccgggaguucagcgugaacgcgggggucaccacccccguguccacguacaugcugaccaacagcgagcuccugucccugaucaacgacaugcccaucaccaacgaccagaagaagcucaugagcaacaacgugcagaucguccgccagcaguccuacagcaucauguccaucaucaaggaggaggugcuggccuacgugguccagcugccgcucuacggcgugaucgacacccccugcuggaagcugcacacgagcccccugugcaccaccaacaccaaggagggguccaacaucugccucacgcggaccgaccgcggcugguacugcgacaacgccggcagcgucuccuucuucccccaggccgagaccugcaaggugcagagcaaccggguguucugcgacaccaugaacucccugacgcugccgagcgaggucaaccucugcaacguggacaucuucaaccccaaguacgacugcaagaucaugaccuccaagaccgacgugagcuccagcgucaucaccucccugggggccaucgugagcugcuacggcaagacgaagugcaccgcgagcaacaagaaccgcgggaucaucaagaccuucuccaacggcugcgacuacgugagcaacaagggcgucgacaccguguccguggggaacacccuguacuacgucaacaagcaggagggcaagagccucuacgugaagggggagcccaucaucaacuucuacgacccccugguguucccguccgacgaguucgacgccagcaucucccaggucaacgagaagaucaaccagagccuggccuucauccggaaguccgacgagcuccugcacaacgugaacgccggcaagagcacgaccaacaucaugaucaccaccaucaucaucgugaucaucgucauccugcugucccucaucgccguggggcugcugcucuacugcaaggcgcgcagcacgcccgugacccuguccaaggaccagcugagcggcaucaacaacaucgccuucuccaacugaggacuaguaauaaggaaacuguaugaaugucugugggcaggaagugaagagauccuucuguaaagguuuuuggaauuaugucugcugaauaauaaacuuuuuugaaauaauaaaucugguagaaaaaugagaucuaaaaaaaaaaaaaaaaaaaaaaaaaaaaaaaaaaaaaaaaaaaaaaaaaaaaaaaaaaaaaaaaugcaucccccccccccccccccccccccccccccccaaaggcucuuuucagagccaccagaauu

SEQ ID NO: 153 - RNA, 2065 nt, Artificial Sequence
  mRNA product Design b-4 comprising derived and/or modified sequence from HRSV(A2)__F0 (opt2)
gggagagucccgcagucggcguccagcggcucugcuuguucgugugugugucguugcaggccuuauucaagcuuaccauggagcuccucauccucaaggccaacgccaucaccaccauccucaccgccgucaccuucugcuucgccuccggccagaacaucaccgaggaguucuaccaguccaccugcuccgccgucuccaagggcuaccucuccgcccuccgcaccggcugguacaccuccgucaucaccaucgagcucuccaacaucaaggagaacaagugcaacggcaccgacgccaaggucaagcucaucaagcaggagcucgacaaguacaagaacgccgucaccgagcuccagcuccucaugcaguccacccccgccaccaacaaccgcgcccgccgcgagcucccccgcuucaugaacuacacccucaacaacgccaagaagaccaacgucacccucuccaagaagcgcaagcgccgcuuccucggcuuccuccucggcgucggcuccgccaucgccuccggcgucgccgucuccaagguccuccaccucgagggcgaggucaacaagaucaaguccgcccuccucuccaccaacaaggccgucgucucccucuccaacggcgucuccguccucaccuccaagguccucgaccucaagaacuacaucgacaagcagcuccuccccaucgucaacaagcaguccugcuccaucuccaacaucgagaccgucaucgaguuccagcagaagaacaaccgccuccucgagaucacccgcgaguucuccgucaacgccggcgucaccacccccgucuccaccuacaugcucaccaacuccgagcuccucucccucaucaacgacaugcccaucaccaacgaccagaagaagcucauguccaacaacguccagaucguccgccagcaguccuacuccaucauguccaucaucaaggaggagguccucgccuacgucguccagcucccccucuacggcgucaucgacacccccugcuggaagcuccacaccuccccccucugcaccaccaacaccaaggagggcuccaacaucugccucacccgcaccgaccgcggcugguacugcgacaacgccggcuccgucuccuucuucccccaggccgagaccugcaagguccaguccaaccgcgucuucugcgacaccaugaacucccucacccuccccuccgaggucaaccucugcaacgucgacaucuucaaccccaaguacgacugcaagaucaugaccuccaagaccgacgucuccuccuccgucaucaccucccucggcgccaucgucuccugcuacggcaagaccaagugcaccgccuccaacaagaaccgcggcaucaucaagaccuucuccaacggcugcgacuacgucuccaacaagggcgucgacaccgucuccgucggcaacacccucuacuacgucaacaagcaggagggcaagucccucuacgucaagggcgagcccaucaucaacuucuacgacccccucgucuuccccuccgacgaguucgacgccuccaucucccaggucaacgagaagaucaaccagucccucgccuucauccgcaaguccgacgagcuccuccacaacgucaacgccggcaaguccaccaccaacaucaugaucaccaccaucaucaucgucaucaucgucauccuccucucccucaucgccgucggccuccuccucuacugcaaggcccgcuccacccccgucacccucuccaaggaccagcucuccggcaucaacaacaucgccuucuccaacugaggacuaguaauaaggaaacuguaugaaugucugugggcaggaagugaagagauccuucuguaaagguuuuuggaauuaugucugcugaauaauaaacuuuuuugaaauaauaaaucugguagaaaaaugagaucuaaaaaaaaaaaaaaaaaaaaaaaaaaaaaaaaaaaaaaaaaaaaaaaaaaaaaaaaaaaaaaaaugcaucccccccccccccccccccccccccccccccaaaggcucuuuucagagccaccagaauu

SEQ ID NO: 154 - RNA, 2065 nt, Artificial Sequence
  mRNA product Design b-4 comprising derived and/or modified sequence from HRSV(A2)__F0 (opt3)
gggagagucccgcagucggcguccagcggcucugcuuguucgugugugugucguugcaggccuuauucaagcuuaccauggagcugcucauccuuaaggccaacgcuauuaccacaauacugacugcagugacguucugcuuugccagcggccagaauaucaccgaagaguucuaccaauccacauguucugcggucucaaaaggguauuugagugcuuuaagaacuggaugguacaccagcguuauuacaaucgaacuguccaacauuaaggagaauaaaugcaacgguaccgacgccaaggugaaacuaaucaagcaggaacucgauaaguauaaaaaugcaguaacugagcugcagcuucugaugcagucuacacccgccaccaacaauagggcucggcgcgaguugccucgauuuaugaacuacacgcucaauaacgcaaagaaaacuaaugugacccugucgaagaaacguaagagaagguuccugggcuuucucuuaggggucggaucagccauagcuagcggcguggccguuaguaaggugcugcaccuugaaggugaggucaacaaaaucaaguccgcguugcugucuacaaauaaagcagugguaagccuauccaacgggguuucagugcucacuucuaagguccuggaccuuaaaaauuauauugauaagcaacuguugccaaucgugaacaaacagagcuguucuauuuccaacaucgaaaccgugauagaguuccagcagaagaauaaccggcuccuggagauuacacgcgaauuuucagucaaugccggaguuaccacgccggugagcacuuacauguuaacaaacagugagcugcucucucuuaucaaugacaugcccauuaccaacgaucaaaagaaacugauguccaauaacguacagaucgugagacagcagagcuauucgaucaugucuauuauaaaggaagaggucuuggcuuacgugguucaacuaccucuguacggcgugaucgacacuccaugcuggaaacuccauacauccccacuguguaccacgaauaccaaggaaggcucaaacauuugccuuacaaggacugaucgggggugguauugugacaaugccggaagugucagcuucuuuccucaggcagagaccugcaaagugcaguccaaccgcguauucugugauacaaugaauagucugacuuugccaagcgagguuaaccucugcaauguggacaucuuuaaccccaaguacgauuguaagauaaugaccucaaaaacagacgucaguuccagcgugauuaccucucugggugcuaucgucucaugcuauggcaagacuaaaugcacggccaguaacaagaaucgagggaucauuaaaacauucagcaacggaugugauuacguguccaauaagggcguugacaccgugucuguagguaacacuuuauauuacgucaauaagcaagaagggaaaucgcuguaugugaagggagagccuaucauuaacuuuuacgacccccuaguuuucccgagcgaugaauuugacgcguccauaucacaggugaaugagaaaaucaaccagagucucgccuucauuagaaagucugaugaacugcuucacaaugucaacgcaggcaaaagcaccacaaauaucaugaucaccacuauuauaaucgugauuaucguaauuuugcugucccucaucgcugugggccugcuucuguacugcaaggccaggucaacacccguuacguugagcaaggaccagcucucugggauaaacaauaucgcuuucuccaacugaggacuaguaauaaggaaacuguaugaaugucugugggcaggaagugaagagauccuucuguaaagguuuuuggaauuaugucugcugaauaauaaacuuuuuugaaauaauaaaucugguagaaaaaugagaucuaaaaaaaaaaaaaaaaaaaaaaaaaaaaaaaaaaaaaaaaaaaaaaaaaaaaaaaaaaaaaaaaugcaucccccccccccccccccccccccccccccccaaaggcucuuuucagagccaccagaauu

SEQ ID NO: 155 - RNA, 2065 nt, Artificial Sequence
  mRNA product Design b-4 comprising derived and/or modified sequence from HRSV(A2)__F0 (opt4)
gggagagucccgcagucggcguccagcggcucugcuuguucgugugugugucguugcaggccuuauucaagcuuaccauggagcugcugauccugaaggccaacgccaucaccaccauccugaccgccgugaccuucugcuucgccagcggccagaacaucaccgaggaguucuaccagagcaccugcagcgccgugagcaagggcuaccugagcgcccugagaaccggcugguacaccagcgugaucaccaucgagcugagcaacaucaaggagaacaagugcaacggcaccgacgccaaggugaagcugaucaagcaggagcuggacaaguacaagaacgccgugaccgagcugcagcugcugaugcagagcacccccgccaccaacaacagagccagaagagagcugcccagauucaugaacuacacccugaacaacgccaagaagaccaacgugacccugagcaagaagagaaagagaagauuccugggcuuccugcugggcgugggcagcgccaucgccagcggcguggccgugagcaaggugcugcaccuggagggcgaggugaacaagaucaagagcgcccugcugagcaccaacaaggccguggugagccugagcaacggcgugagcgugcugaccagcaaggugcuggaccugaagaacuacaucgacaagcagcugcugcccaucgugaacaagcagagcugcagcaucagcaacaucgagaccgugaucgaguuccagcagaagaacaacagacugcuggagaucaccagagaguucagcgugaacgccggcgugaccacccccgugagcaccuacaugcugaccaacagcgagcugcugagccugaucaacgacaugcccaucaccaacgaccagaagaagcugaugagcaacaacgugcagaucgugagacagcagagcuacagcaucaugagcaucaucaaggaggaggugcuggccuacguggugcagcugccccuguacggcgugaucgacacccccugcuggaagcugcacaccagcccccugugcaccaccaacaccaaggagggcagcaacaucugccugaccagaaccgacagaggcugguacugcgacaacgccggcagcgugagcuucuucccccaggccgagaccugcaaggugcagagcaacagaguguucugcgacaccaugaacagccugacccugcccagcgaggugaaccugugcaacguggacaucuucaaccccaaguacgacugcaagaucaugaccagcaagaccgacgugagcagcagcgugaucaccagccugggcgccaucgugagcugcuacggcaagaccaagugcaccgccagcaacaagaacagaggcaucaucaagaccuucagcaacggcugcgacuacgugagcaacaagggcguggacaccgugagcgugggcaacacccuguacuacgugaacaagcaggagggcaagagccuguacgugaagggcgagcccaucaucaacuucuacgacccccugguguuccccagcgacgaguucgacgccagcaucagccaggugaacgagaagaucaaccagagccuggccuucaucagaaagagcgacgagcugcugcacaacgugaacgccggcaagagcaccaccaacaucaugaucaccaccaucaucaucgugaucaucgugauccugcugagccugaucgccgugggccugcugcuguacugcaaggccagaagcacccccgugacccugagcaaggaccagcugagcggcaucaacaacaucgccuucagcaacugaggacuaguaauaaggaaacuguaugaaugucugugggcaggaagugaagagauccuucuguaaagguuuuuggaauuaugucugcugaauaauaaacuuuuuugaaauaauaaaucugguagaaaaaugagaucuaaaaaaaaaaaaaaaaaaaaaaaaaaaaaaaaaaaaaaaaaaaaaaaaaaaaaaaaaaaaaaaaugcaucccccccccccccccccccccccccccccccaaaggcucuuuucagagccaccagaauu

SEQ ID NO: 156 - RNA, 2065 nt, Artificial Sequence
  mRNA product Design b-4 comprising derived and/or modified sequence from HRSV(A2)__F0 (opt5)
gggagagucccgcagucggcguccagcggcucugcuuguucgugugugugucguugcaggccuuauucaagcuuaccauggagcugcucauccugaaggccaacgcuauuaccacaauccuuacggccgugaccuucugcuuugcgagcggccagaauauuacagaagaguucuaccaauccaccuguucugcugucagcaaaggguaucuguccgcccucagaacaggaugguacaccucuguuaucacaauugaacugagcaacaucaaggagaauaaaugcaacggcaccgacgccaaggugaaacuuaucaagcaggaacuggauaaguauaaaaaugcugugacggagcuccagcugcugaugcaguccacccccgccacaaacaaucgggcucgcagagagcucccucgguuuaugaacuacacccugaauaacgccaagaaaacaaaugucacccuuucuaagaaacgcaagagacgguuccugggguuucuccugggagugggcagcgcgauugccuccgggguugcugugagcaagguccuucaccuggaaggagaggugaacaaaaucaagucugcccuccuguccacgaauaaagcuguugugagccugucuaacggcgucuccgugcucacaagcaaggugcuggaccuuaaaaauuauauugauaagcaacugcucccgaucgucaacaaacagucuuguuccauuagcaacaucgaaaccguuauugaguuccagcagaagaauaaccgccugcuugagaucacaagagaauuuuccgugaaugccggcgugaccacccccgucucuacauacaugcugacgaacagcgagcuccugucccugaucaaugacaugccuauuaccaacgaucaaaagaaacucaugagcaauaacgugcagaucguucggcagcagucuuauuccauuaugagcaucauuaaggaagaggugcuggcguacgucgugcaacuuccccuguacgggguuaucgacacaccuugcuggaaacuccauaccucuccccuguguacaaccaauacgaaggaaggaagcaacaucugccuuacacgcaccgauagaggcugguauugugacaaugccggguccgugucuuucuuuccucaggcugagaccugcaaaguccagagcaaccggguguucugugauacaaugaacucccugacccucccgagcgaggucaaucugugcaauguggacauuuuuaaccccaaguacgauuguaagaucaugacaucuaaaacggacguuuccagcucugugauuaccucccugggagccaucgucagcugcuauggcaagacaaaaugcaccgcuuccaacaagaaucgcgggauuaucaaaacauucucuaacggaugugauuacgugagcaauaagggcguugacaccguguccgucggcaacacgcucuauuacgugaauaagcaagaagggaaaucucuguaugugaagggagagccuaucauuaacuuuuacgacccccuuguuuucccuagcgaugaauuugacgccuccaucagccaggucaaugagaaaauuaaccagucucuggccuucaucagaaaguccgaugaacuccugcacaaugugaacgcuggcaaaagcaccacaaauauuaugaucaccacaauuaucaucgugauuaucgucauucugcuuucucucaucgcgguggggcugcugcucuacugcaaggcccgguccacccccguuacgcugagcaaggaccagcuuucuggaauuaacaauaucgcuuucagcaacugaggacuaguaauaaggaaacuguaugaaugucugugggcaggaagugaagagauccuucuguaaagguuuuuggaauuaugucugcugaauaauaaacuuuuuugaaauaauaaaucugguagaaaaaugagaucuaaaaaaaaaaaaaaaaaaaaaaaaaaaaaaaaaaaaaaaaaaaaaaaaaaaaaaaaaaaaaaaaugcaucccccccccccccccccccccccccccccccaaaggcucuuuucagagccaccagaauu

SEQ ID NO: 157 - RNA, 2065 nt, Artificial Sequence
  mRNA product Design b-4 comprising derived and/or modified sequence from HRSV(A2)__F0 (opt6)
gggagagucccgcagucggcguccagcggcucugcuuguucgugugugugucguugcaggccuuauucaagcuuaccauggaacuucuaauauuaaaagcuaacgcaaucacuacuaucuuaaccgcaguaacauucuguuuugcauccggccaaaacauaacagaagaauuuuaccaaucaacuugcucugcagucucaaaagguuaucuaucugcauuaagaacaggcugguacaccucaguaauaacgaucgaacuaucaaacaucaaagaaaacaaauguaauggaacagacgcaaaaguaaaacuaaucaaacaagaacuagacaaauacaaaaacgcaguaaccgaacuccaacuccucaugcaaaguacaccagcaacaaauaacagagcaagacgugaacuaccacguuuuaugaauuacacgcucaauaacgcaaaaaaaacaaauguuacccuaucaaaaaaacgaaaaagaagauuccucggauuccuacuaggcguaggcucagcaauagcuucaggaguagcaguaucaaaaguacuccaccucgaaggagaaguaaacaaaaucaaaagcgcucuccucucaacaaacaaagcaguuguuucacucucaaacggaguaucaguacuaaccucaaaaguacuugaccuaaaaaauuauauagacaaacaacuauuaccaauaguaaacaaacaaagcugcuccaucuccaacaucgagacagucauagaauuucaacaaaaaaauaaccgccuauuagaaauaaccagagaauuuucaguaaacgcaggaguaacuaccccaguaucaacauauauguuaacaaacucagaacuccuaagucuaaucaacgacaugccaauaaccaacgaccaaaaaaaacuaaugagcaacaauguacaaauaguucgucaacaaucuuacuccauaaugucuauaauaaaagaagaaguacucgccuauguaguccaacuaccacuauacggagucaucgauacaccaugcuggaaacuccacacauccccacucuguacuacuaacaccaaagaagguucaaauauaugccuaaccagaacagauagagguugguacugcgauaaugcaggaucaguauccuuuuucccccaagccgaaacaugcaaaguucaauccaauagaguauuuugugauacaaugaacucuuuaacccucccauccgaagucaaucuauguaacgucgacauauuuaacccaaaauacgauugcaaaauaaugacaucaaaaacagacgucucauccucaguuauaacguccuuaggcgcuauaguaucaugcuacggcaaaacaaaauguacagcaucaaacaaaaacagaggaaucauaaaaacuuucucuaacgguugcgacuauguauccaacaaaggugucgacacaguauccguaggcaacacccuuuacuauguuaauaaacaagaaggaaaaucucuauauguaaaaggcgaaccaauuauaaauuuuuacgacccccuugucuuucccucugacgaauuugacgcuuccauaucacaagucaacgaaaaaaucaaccaaucccucgcauucauacgcaaaucagacgaacuacuacauaacgucaacgcaggcaaauccacaacaaacauaaugauaaccacaaucauaauuguaauaauaguaauacuacuuucucuaauagcagucggauuacucuuauacuguaaagcucgaucaacaccagucacccucucuaaagaucaacuauccggaaucaacaacauagcuuucucaaacuaaggacuaguaauaaggaaacuguaugaaugucugugggcaggaagugaagagauccuucuguaaagguuuuuggaauuaugucugcugaauaauaaacuuuuuugaaauaauaaaucugguagaaaaaugagaucuaaaaaaaaaaaaaaaaaaaaaaaaaaaaaaaaaaaaaaaaaaaaaaaaaaaaaaaaaaaaaaaaugcaucccccccccccccccccccccccccccccccaaaggcucuuuucagagccaccagaauu

SEQ ID NO: 158 - RNA, 2065 nt, Artificial Sequence
  mRNA product Design b-4 comprising derived and/or modified sequence from HRSV(A2)__F0 (opt11)
gggagagucccgcagucggcguccagcggcucugcuuguucgugugugugucguugcaggccuuauucaagcuuaccauggaacuccucauacucaaagccaacgcaaucacaaccauacucaccgccgucaccuucugcuuugcaucuggccagaacaucacugaagaguucuaccaauccacaugcuccgccguaagcaaaggcuaccuauccgcccuacgcaccggcugguacaccagcguaaucaccauagaacucuccaauauaaaagaaaacaaaugcaacggcaccgacgcaaaagucaagcuaauaaaacaagaacucgacaaauacaaaaacgccguuaccgaacuccagcuacucaugcaaucgaccccagcaaccaacaaccgugcgagacgcgaacucccccgcuucaugaacuacacccuaaacaacgccaaaaagaccaacguaacucuauccaagaaacgcaaacgccgcuuccucggauuccuccucggcgucggcuccgcaaucgccagcggcgucgccguuagcaaaguccuucaccucgaaggagaaguaaacaaaauuaaaagcgcccucuuauccacaaacaaggccguaguaucccugucaaacggcgucuccguccuuacauccaaaguccucgaccucaagaacuacauagacaaacagcuacuacccauuguaaauaaacaaagcugcucaauuagcaacaucgaaaccguaaucgaguuccagcagaaaaacaacagacuucucgaaaucacccgcgaguucagcgucaacgccggcguaaccaccccugucucaacauacaugcuaaccaacagcgaacugcucucccucaucaacgacaugcccaucaccaacgaccaaaagaaacucaugagcaacaacguacaaaucgugcgccaacaguccuacucaauaaugucaaucaucaaagaagaagugcuagcauacgucguacaacuaccacucuacggcguaauagauacccccugcuggaagcuccauaccuccccacucuguaccaccaacaccaaagaaggcucaaacaucugccuaacgcgcacagaccguggaugguacugugacaacgccggcuccgucuccuucuucccucaagccgaaacaugcaaaguccaauccaacagagucuucugcgauaccaugaacucccugacacucccaagcgaagucaaccuuugcaacgucgauaucuuuaaccccaaauacgacugcaagaucaugacaucaaaaaccgacguauccuccucuguaauaaccucccuaggcgcaaucguaucaugcuacggcaaaaccaaauguaccgccuccaacaaaaaucgcggcaucaucaaaaccuucucgaacggcugcgacuacgucuccaacaaaggcguagacacaguuuccguaggcaacacccucuacuacgucaauaaacaggaaggcaagucccucuacgucaaaggcgaacccaucaucaauuucuacgacccccucguuuuccccuccgaugaguucgacgcaagcaucagccaggucaacgaaaagauaaaccagucccucgccuucauccgcaaaucagaugaacuccuucacaacguuaacgcaggcaagagcaccaccaacaucaugaucacaacuauaaucaucgucauaaucgucauccuacucucacuaaucgccgucggucuccuacuauauuguaaagcccgaucaacaccggucacacucuccaaagaccaacucuccggaaucaacaauaucgcuuucucgaacuaaggacuaguaauaaggaaacuguaugaaugucugugggcaggaagugaagagauccuucuguaaagguuuuuggaauuaugucugcugaauaauaaacuuuuuugaaauaauaaaucugguagaaaaaugagaucuaaaaaaaaaaaaaaaaaaaaaaaaaaaaaaaaaaaaaaaaaaaaaaaaaaaaaaaaaaaaaaaaugcaucccccccccccccccccccccccccccccccaaaggcucuuuucagagccaccagaauu

SEQ ID NO: 159 - RNA, 2127 nt, Artificial Sequence
  mRNA product Design b-5 comprising derived and/or modified sequence from HRSV(A2)__F0 (artificial)
gggagacuccugucgggcggaaguaggaggaguagaguuuaaaaacaguacucuuuuuccgguucgggacguaguugaagcaacgacaagccggauaaccgcucuugagacaggaagcuuaccauggaguugcuaauccucaaagcaaaugcaauuaccacaauccucacugcagucacauuuuguuuugcuucuggucaaaacaucacugaagaauuuuaucaaucaacaugcagugcaguuagcaaaggcuaucuuagugcucugagaacugguugguauaccaguguuauaacuauagaauuaaguaauaucaaggaaaauaaguguaauggaacagaugcuaagguaaaauugauaaaacaagaauuagauaaauauaaaaaugcuguaacagaauugcaguugcucaugcaaagcacaccagcaacaaacaaucgagccagaagagaacuaccaagguuuaugaauuauacacucaacaaugccaaaaaaaccaauguaacauuaagcaagaaaaggaaaagaagauuucuugguuuuuuguuagguguuggaucugcaaucgccaguggcguugcuguaucuaagguccugcaccuagaaggggaagugaacaagaucaaaagugcucuacuauccacaaacaaggcuguagucagcuuaucaaauggaguuagugucuuaaccagcaaaguguuagaccucaaaaacuauauagauaaacaauuguuaccuauugugaacaagcaaagcugcagcauaucaaauauagaaacugugauagaguuccaacaaaagaacaacagacuacuagagauuaccagggaauuuaguguuaaugcagguguaacuacaccuguaagcacuuacauguuaacuaauagugaauuauugucauuaaucaaugauaugccuauaacaaaugaucagaaaaaguuaauguccaacaauguucaaauaguuagacagcaaaguuacucuaucauguccauaauaaaagaggaagucuuagcauauguaguacaauuaccacuauaugguguuauagauacacccuguuggaaacuacacacauccccucuauguacaaccaacacaaaagaaggguccaacaucuguuuaacaagaacugacagaggaugguacugugacaaugcaggaucaguaucuuucuucccacaagcugaaacauguaaaguucaaucaaaucgaguauuuugugacacaaugaacaguuuaacauuaccaagugaaguaaaucucugcaauguugacauauucaaccccaaauaugauuguaaaauuaugacuucaaaaacagauguaagcagcuccguuaucacaucucuaggagccauugugucaugcuauggcaaaacuaaauguacagcauccaauaaaaaucguggaaucauaaagacauuuucuaacgggugcgauuauguaucaaauaaagggguggacacugugucuguagguaacacauuauauuauguaaauaagcaagaagguaaaagucucuauguaaaaggugaaccaauaauaaauuucuaugacccauuaguauuccccucugaugaauuugaugcaucaauaucucaagucaacgagaagauuaaccagagccuagcauuuauucguaaauccgaugaauuauuacauaauguaaaugcugguaaauccaccacaaauaucaugauaacuacuauaauuauagugauuauaguaauauuguuaucauuaauugcuguuggacugcucuuauacuguaaggccagaagcacaccagucacacuaagcaaagaucaacugagugguauaaauaauauugcauuuaguaacuaaggacuaguacuggcugcaucucccuuuccucuguccuccauccuucucccaggauggugaagggggaccugguacccagugauccccaccccaggauccuaaaucaugacuuaccugcuaauaaaaacucauuggaaaagugagaagaucuaaaaaaaaaaaaaaaaaaaaaaaaaaaaaaaaaaaaaaaaaaaaaaaaaaaaaaaaaaaaaaaaugcaucccccccccccccccccccccccccccccccaaaggcucuuuucagagccaccagaauu

SEQ ID NO: 160 - RNA, 2127 nt, Artificial Sequence
  mRNA product Design b-5 comprising derived and/or modified sequence from HRSV(A2)__F0 (opt1)
gggagacuccugucgggcggaaguaggaggaguagaguuuaaaaacaguacucuuuuuccgguucgggacguaguugaagcaacgacaagccggauaaccgcucuugagacaggaagcuuaccauggagcugcucauccugaaggccaacgccaucaccaccauccugacggcggugaccuucugcuucgccagcggccagaacaucaccgaggaguucuaccaguccaccugcagcgccgucuccaagggguaccucagcgcccugcggacgggcugguacaccuccgugaucaccaucgagcugagcaacaucaaggagaacaagugcaacgggaccgacgccaaggugaagcucaucaagcaggagcuggacaaguacaagaacgcggucacggagcugcagcuccugaugcaguccaccccggcaaccaacaaccgcgcccggcgcgagcugccccgguucaugaacuacacccucaacaacgccaagaagacgaacgugacccugagcaagaagcgcaagcggcgcuuccugggcuuccuccugggggugggcuccgccaucgcgagcggcgucgccguguccaaggugcugcaccucgagggggaggucaacaagaucaagagcgcccugcuguccaccaacaaggccguggugagccucuccaacggcgucagcgugcugaccuccaaggugcuggaccucaagaacuacaucgacaagcagcugcugcccaucgucaacaagcagagcugcuccaucagcaacaucgagacggugaucgaguuccagcagaagaacaaccggcuccuggagaucacccgcgaguucagcgugaacgccggggucaccacccccguguccacguacaugcugaccaacagcgagcuccugucccugaucaacgacaugccgaucaccaacgaccagaagaagcucaugagcaacaacgugcagaucguccggcagcaguccuacagcaucauguccaucaucaaggaggaggugcuggcguacgugguccagcugccccucuacggcgugaucgacacccccugcuggaagcugcacacgagcccccugugcaccaccaacaccaaggagggguccaacaucugccucacgcgcaccgaccggggcugguacugcgacaacgccggcagcgucuccuucuucccgcaggccgagaccugcaaggugcagagcaaccgcguguucugcgacaccaugaacucccugacgcugcccagcgagguaaaccucugcaacgucgacaucuucaaccccaaguacgacugcaagaucaugaccuccaagaccgacgugagcuccagcgugaucaccucccugggggccaucgucagcugcuacggcaagacgaagugcaccgccagcaacaagaaccgggggaucaucaagaccuucuccaacggcugcgacuacgugagcaacaagggcguggacaccguguccgucgggaacacccuguacuacgugaacaagcaggagggcaagagccucuacgugaagggggagcccaucaucaacuucuacgacccgcuggucuuccccuccgacgaguucgacgcgagcaucucccaggugaacgagaagaucaaccagagccuggccuucauccgcaaguccgacgagcugcuccacaacgugaacgccggcaagagcacgaccaacaucaugaucaccaccaucaucaucgucaucaucgugauccugcugucccucaucgccguggggcugcugcucuacugcaaggcccggagcacgcccgucacccuguccaaggaccagcugagcggcaucaacaacaucgcguucuccaacugaggacuaguacuggcugcaucucccuuuccucuguccuccauccuucucccaggauggugaagggggaccugguacccagugauccccaccccaggauccuaaaucaugacuuaccugcuaauaaaaacucauuggaaaagugagaagaucuaaaaaaaaaaaaaaaaaaaaaaaaaaaaaaaaaaaaaaaaaaaaaaaaaaaaaaaaaaaaaaaaugcaucccccccccccccccccccccccccccccccaaaggcucuuuucagagccaccagaauu

SEQ ID NO: 161 - RNA, 2127 nt, Artificial Sequence
  mRNA product Design b-5 comprising derived and/or modified sequence from HRSV(A2)__F0 (opt1)
gggagacuccugucgggcggaaguaggaggaguagaguuuaaaaacaguacucuuuuuccgguucgggacguaguugaagcaacgacaagccggauaaccgcucuugagacaggaagcuuaccauggagcugcucauccugaaggccaacgccaucaccaccauccugacggcggugaccuucugcuucgccagcggccagaacaucaccgaggaguucuaccaguccacgugcagcgccgucuccaagggguaccucagcgcccugcgcaccggcugguacaccuccgugaucaccaucgagcugagcaacaucaaggagaacaagugcaacgggaccgacgccaaggugaagcucaucaagcaggagcuggacaaguacaagaacgcggucacggagcugcagcuccugaugcaguccacccccgccaccaacaaccgggcccgccgggagcugccgcgcuucaugaacuacacccucaacaacgccaagaagacgaacgugacccugagcaagaagcggaagcgccgguuccugggcuuccuccugggggugggcuccgcgaucgccagcggcgucgccguguccaaggugcugcaccucgagggggaggucaacaagaucaagagcgcccugcuguccaccaacaaggccguggugagccucuccaacggcgucagcgugcugaccuccaaggugcuggaccucaagaacuacaucgacaagcagcugcugcccaucgucaacaagcagagcugcuccaucagcaacaucgagacggugaucgaguuccagcagaagaacaaccgccuccuggagaucacccgggaguucagcgugaacgcgggggucaccacccccguguccacguacaugcugaccaacagcgagcuccugucccugaucaacgacaugcccaucaccaacgaccagaagaagcucaugagcaacaacgugcagaucguccgccagcaguccuacagcaucauguccaucaucaaggaggaggugcuggccuacgugguccagcugccgcucuacggcgugaucgacacccccugcuggaagcugcacacgagcccccugugcaccaccaacaccaaggagggguccaacaucugccucacgcggaccgaccgcggcugguacugcgacaacgccggcagcgucuccuucuucccccaggccgagaccugcaaggugcagagcaaccggguguucugcgacaccaugaacucccugacgcugccgagcgaggucaaccucugcaacguggacaucuucaaccccaaguacgacugcaagaucaugaccuccaagaccgacgugagcuccagcgucaucaccucccugggggccaucgugagcugcuacggcaagacgaagugcaccgcgagcaacaagaaccgcgggaucaucaagaccuucuccaacggcugcgacuacgugagcaacaagggcgucgacaccguguccguggggaacacccuguacuacgucaacaagcaggagggcaagagccucuacgugaagggggagcccaucaucaacuucuacgacccccugguguucccguccgacgaguucgacgccagcaucucccaggucaacgagaagaucaaccagagccuggccuucauccggaaguccgacgagcuccugcacaacgugaacgccggcaagagcacgaccaacaucaugaucaccaccaucaucaucgugaucaucgucauccugcugucccucaucgccguggggcugcugcucuacugcaaggcgcgcagcacgcccgugacccuguccaaggaccagcugagcggcaucaacaacaucgccuucuccaacugaggacuaguacuggcugcaucucccuuuccucuguccuccauccuucucccaggauggugaagggggaccugguacccagugauccccaccccaggauccuaaaucaugacuuaccugcuaauaaaaacucauuggaaaagugagaagaucuaaaaaaaaaaaaaaaaaaaaaaaaaaaaaaaaaaaaaaaaaaaaaaaaaaaaaaaaaaaaaaaaugcaucccccccccccccccccccccccccccccccaaaggcucuuuucagagccaccagaauu

SEQ ID NO: 162 - RNA, 2127 nt, Artificial Sequence
  mRNA product Design b-5 comprising derived and/or modified sequence from HRSV(A2)__F0 (opt2)
gggagacuccugucgggcggaaguaggaggaguagaguuuaaaaacaguacucuuuuuccgguucgggacguaguugaagcaacgacaagccggauaaccgcucuugagacaggaagcuuaccauggagcuccucauccucaaggccaacgccaucaccaccauccucaccgccgucaccuucugcuucgccuccggccagaacaucaccgaggaguucuaccaguccaccugcuccgccgucuccaagggcuaccucuccgcccuccgcaccggcugguacaccuccgucaucaccaucgagcucuccaacaucaaggagaacaagugcaacggcaccgacgccaaggucaagcucaucaagcaggagcucgacaaguacaagaacgccgucaccgagcuccagcuccucaugcaguccacccccgccaccaacaaccgcgcccgccgcgagcucccccgcuucaugaacuacacccucaacaacgccaagaagaccaacgucacccucuccaagaagcgcaagcgccgcuuccucggcuuccuccucggcgucggcuccgccaucgccuccggcgucgccgucuccaagguccuccaccucgagggcgaggucaacaagaucaaguccgcccuccucuccaccaacaaggccgucgucucccucuccaacggcgucuccguccucaccuccaagguccucgaccucaagaacuacaucgacaagcagcuccuccccaucgucaacaagcaguccugcuccaucuccaacaucgagaccgucaucgaguuccagcagaagaacaaccgccuccucgagaucacccgcgaguucuccgucaacgccggcgucaccacccccgucuccaccuacaugcucaccaacuccgagcuccucucccucaucaacgacaugcccaucaccaacgaccagaagaagcucauguccaacaacguccagaucguccgccagcaguccuacuccaucauguccaucaucaaggaggagguccucgccuacgucguccagcucccccucuacggcgucaucgacacccccugcuggaagcuccacaccuccccccucugcaccaccaacaccaaggagggcuccaacaucugccucacccgcaccgaccgcggcugguacugcgacaacgccggcuccgucuccuucuucccccaggccgagaccugcaagguccaguccaaccgcgucuucugcgacaccaugaacucccucacccuccccuccgaggucaaccucugcaacgucgacaucuucaaccccaaguacgacugcaagaucaugaccuccaagaccgacgucuccuccuccgucaucaccucccucggcgccaucgucuccugcuacggcaagaccaagugcaccgccuccaacaagaaccgcggcaucaucaagaccuucuccaacggcugcgacuacgucuccaacaagggcgucgacaccgucuccgucggcaacacccucuacuacgucaacaagcaggagggcaagucccucuacgucaagggcgagcccaucaucaacuucuacgacccccucgucuuccccuccgacgaguucgacgccuccaucucccaggucaacgagaagaucaaccagucccucgccuucauccgcaaguccgacgagcuccuccacaacgucaacgccggcaaguccaccaccaacaucaugaucaccaccaucaucaucgucaucaucgucauccuccucucccucaucgccgucggccuccuccucuacugcaaggcccgcuccacccccgucacccucuccaaggaccagcucuccggcaucaacaacaucgccuucuccaacugaggacuaguacuggcugcaucucccuuuccucuguccuccauccuucucccaggauggugaagggggaccugguacccagugauccccaccccaggauccuaaaucaugacuuaccugcuaauaaaaacucauuggaaaagugagaagaucuaaaaaaaaaaaaaaaaaaaaaaaaaaaaaaaaaaaaaaaaaaaaaaaaaaaaaaaaaaaaaaaaugcaucccccccccccccccccccccccccccccccaaaggcucuuuucagagccaccagaauu

SEQ ID NO: 163 - RNA, 2127 nt, Artificial Sequence
  mRNA product Design b-5 comprising derived and/or modified sequence from HRSV(A2)__F0 (opt3)
gggagacuccugucgggcggaaguaggaggaguagaguuuaaaaacaguacucuuuuuccgguucgggacguaguugaagcaacgacaagccggauaaccgcucuugagacaggaagcuuaccauggagcugcucauccuuaaggccaacgcuauuaccacaauacugacugcagugacguucugcuuugccagcggccagaauaucaccgaagaguucuaccaauccacauguucugcggucucaaaaggguauuugagugcuuuaagaacuggaugguacaccagcguuauuacaaucgaacuguccaacauuaaggagaauaaaugcaacgguaccgacgccaaggugaaacuaaucaagcaggaacucgauaaguauaaaaaugcaguaacugagcugcagcuucugaugcagucuacacccgccaccaacaauagggcucggcgcgaguugccucgauuuaugaacuacacgcucaauaacgcaaagaaaacuaaugugacccugucgaagaaacguaagagaagguuccugggcuuucucuuaggggucggaucagccauagcuagcggcguggccguuaguaaggugcugcaccuugaaggugaggucaacaaaaucaaguccgcguugcugucuacaaauaaagcagugguaagccuauccaacgggguuucagugcucacuucuaagguccuggaccuuaaaaauuauauugauaagcaacuguugccaaucgugaacaaacagagcuguucuauuuccaacaucgaaaccgugauagaguuccagcagaagaauaaccggcuccuggagauuacacgcgaauuuucagucaaugccggaguuaccacgccggugagcacuuacauguuaacaaacagugagcugcucucucuuaucaaugacaugcccauuaccaacgaucaaaagaaacugauguccaauaacguacagaucgugagacagcagagcuauucgaucaugucuauuauaaaggaagaggucuuggcuuacgugguucaacuaccucuguacggcgugaucgacacuccaugcuggaaacuccauacauccccacuguguaccacgaauaccaaggaaggcucaaacauuugccuuacaaggacugaucgggggugguauugugacaaugccggaagugucagcuucuuuccucaggcagagaccugcaaagugcaguccaaccgcguauucugugauacaaugaauagucugacuuugccaagcgagguuaaccucugcaauguggacaucuuuaaccccaaguacgauuguaagauaaugaccucaaaaacagacgucaguuccagcgugauuaccucucugggugcuaucgucucaugcuauggcaagacuaaaugcacggccaguaacaagaaucgagggaucauuaaaacauucagcaacggaugugauuacguguccaauaagggcguugacaccgugucuguagguaacacuuuauauuacgucaauaagcaagaagggaaaucgcuguaugugaagggagagccuaucauuaacuuuuacgacccccuaguuuucccgagcgaugaauuugacgcguccauaucacaggugaaugagaaaaucaaccagagucucgccuucauuagaaagucugaugaacugcuucacaaugucaacgcaggcaaaagcaccacaaauaucaugaucaccacuauuauaaucgugauuaucguaauuuugcugucccucaucgcugugggccugcuucuguacugcaaggccaggucaacacccguuacguugagcaaggaccagcucucugggauaaacaauaucgcuuucuccaacugaggacuaguacuggcugcaucucccuuuccucuguccuccauccuucucccaggauggugaagggggaccugguacccagugauccccaccccaggauccuaaaucaugacuuaccugcuaauaaaaacucauuggaaaagugagaagaucuaaaaaaaaaaaaaaaaaaaaaaaaaaaaaaaaaaaaaaaaaaaaaaaaaaaaaaaaaaaaaaaaugcaucccccccccccccccccccccccccccccccaaaggcucuuuucagagccaccagaauu

SEQ ID NO: 164 - RNA, 2127 nt, Artificial Sequence
  mRNA product Design b-5 comprising derived and/or modified sequence from HRSV(A2)__F0 (opt4)
gggagacuccugucgggcggaaguaggaggaguagaguuuaaaaacaguacucuuuuuccgguucgggacguaguugaagcaacgacaagccggauaaccgcucuugagacaggaagcuuaccauggagcugcugauccugaaggccaacgccaucaccaccauccugaccgccgugaccuucugcuucgccagcggccagaacaucaccgaggaguucuaccagagcaccugcagcgccgugagcaagggcuaccugagcgcccugagaaccggcugguacaccagcgugaucaccaucgagcugagcaacaucaaggagaacaagugcaacggcaccgacgccaaggugaagcugaucaagcaggagcuggacaaguacaagaacgccgugaccgagcugcagcugcugaugcagagcacccccgccaccaacaacagagccagaagagagcugcccagauucaugaacuacacccugaacaacgccaagaagaccaacgugacccugagcaagaagagaaagagaagauuccugggcuuccugcugggcgugggcagcgccaucgccagcggcguggccgugagcaaggugcugcaccuggagggcgaggugaacaagaucaagagcgcccugcugagcaccaacaaggccguggugagccugagcaacggcgugagcgugcugaccagcaaggugcuggaccugaagaacuacaucgacaagcagcugcugcccaucgugaacaagcagagcugcagcaucagcaacaucgagaccgugaucgaguuccagcagaagaacaacagacugcuggagaucaccagagaguucagcgugaacgccggcgugaccacccccgugagcaccuacaugcugaccaacagcgagcugcugagccugaucaacgacaugcccaucaccaacgaccagaagaagcugaugagcaacaacgugcagaucgugagacagcagagcuacagcaucaugagcaucaucaaggaggaggugcuggccuacguggugcagcugccccuguacggcgugaucgacacccccugcuggaagcugcacaccagcccccugugcaccaccaacaccaaggagggcagcaacaucugccugaccagaaccgacagaggcugguacugcgacaacgccggcagcgugagcuucuucccccaggccgagaccugcaaggugcagagcaacagaguguucugcgacaccaugaacagccugacccugcccagcgaggugaaccugugcaacguggacaucuucaaccccaaguacgacugcaagaucaugaccagcaagaccgacgugagcagcagcgugaucaccagccugggcgccaucgugagcugcuacggcaagaccaagugcaccgccagcaacaagaacagaggcaucaucaagaccuucagcaacggcugcgacuacgugagcaacaagggcguggacaccgugagcgugggcaacacccuguacuacgugaacaagcaggagggcaagagccuguacgugaagggcgagcccaucaucaacuucuacgacccccugguguuccccagcgacgaguucgacgccagcaucagccaggugaacgagaagaucaaccagagccuggccuucaucagaaagagcgacgagcugcugcacaacgugaacgccggcaagagcaccaccaacaucaugaucaccaccaucaucaucgugaucaucgugauccugcugagccugaucgccgugggccugcugcuguacugcaaggccagaagcacccccgugacccugagcaaggaccagcugagcggcaucaacaacaucgccuucagcaacugaggacuaguacuggcugcaucucccuuuccucuguccuccauccuucucccaggauggugaagggggaccugguacccagugauccccaccccaggauccuaaaucaugacuuaccugcuaauaaaaacucauuggaaaagugagaagaucuaaaaaaaaaaaaaaaaaaaaaaaaaaaaaaaaaaaaaaaaaaaaaaaaaaaaaaaaaaaaaaaaugcaucccccccccccccccccccccccccccccccaaaggcucuuuucagagccaccagaauu

SEQ ID NO: 165 - RNA, 2127 nt, Artificial Sequence
  mRNA product Design b-5 comprising derived and/or modified sequence from HRSV(A2)__F0 (opt5)
gggagacuccugucgggcggaaguaggaggaguagaguuuaaaaacaguacucuuuuuccgguucgggacguaguugaagcaacgacaagccggauaaccgcucuugagacaggaagcuuaccauggagcugcucauccugaaggccaacgcuauuaccacaauccuuacggccgugaccuucugcuuugcgagcggccagaauauuacagaagaguucuaccaauccaccuguucugcugucagcaaaggguaucuguccgcccucagaacaggaugguacaccucuguuaucacaauugaacugagcaacaucaaggagaauaaaugcaacggcaccgacgccaaggugaaacuuaucaagcaggaacuggauaaguauaaaaaugcugugacggagcuccagcugcugaugcaguccacccccgccacaaacaaucgggcucgcagagagcucccucgguuuaugaacuacacccugaauaacgccaagaaaacaaaugucacccuuucuaagaaacgcaagagacgguuccugggguuucuccugggagugggcagcgcgauugccuccgggguugcugugagcaagguccuucaccuggaaggagaggugaacaaaaucaagucugcccuccuguccacgaauaaagcuguugugagccugucuaacggcgucuccgugcucacaagcaaggugcuggaccuuaaaaauuauauugauaagcaacugcucccgaucgucaacaaacagucuuguuccauuagcaacaucgaaaccguuauugaguuccagcagaagaauaaccgccugcuugagaucacaagagaauuuuccgugaaugccggcgugaccacccccgucucuacauacaugcugacgaacagcgagcuccugucccugaucaaugacaugccuauuaccaacgaucaaaagaaacucaugagcaauaacgugcagaucguucggcagcagucuuauuccauuaugagcaucauuaaggaagaggugcuggcguacgucgugcaacuuccccuguacgggguuaucgacacaccuugcuggaaacuccauaccucuccccuguguacaaccaauacgaaggaaggaagcaacaucugccuuacacgcaccgauagaggcugguauugugacaaugccggguccgugucuuucuuuccucaggcugagaccugcaaaguccagagcaaccggguguucugugauacaaugaacucccugacccucccgagcgaggucaaucugugcaauguggacauuuuuaaccccaaguacgauuguaagaucaugacaucuaaaacggacguuuccagcucugugauuaccucccugggagccaucgucagcugcuauggcaagacaaaaugcaccgcuuccaacaagaaucgcgggauuaucaaaacauucucuaacggaugugauuacgugagcaauaagggcguugacaccguguccgucggcaacacgcucuauuacgugaauaagcaagaagggaaaucucuguaugugaagggagagccuaucauuaacuuuuacgacccccuuguuuucccuagcgaugaauuugacgccuccaucagccaggucaaugagaaaauuaaccagucucuggccuucaucagaaaguccgaugaacuccugcacaaugugaacgcuggcaaaagcaccacaaauauuaugaucaccacaauuaucaucgugauuaucgucauucugcuuucucucaucgcgguggggcugcugcucuacugcaaggcccgguccacccccguuacgcugagcaaggaccagcuuucuggaauuaacaauaucgcuuucagcaacugaggacuaguacuggcugcaucucccuuuccucuguccuccauccuucucccaggauggugaagggggaccugguacccagugauccccaccccaggauccuaaaucaugacuuaccugcuaauaaaaacucauuggaaaagugagaagaucuaaaaaaaaaaaaaaaaaaaaaaaaaaaaaaaaaaaaaaaaaaaaaaaaaaaaaaaaaaaaaaaaugcaucccccccccccccccccccccccccccccccaaaggcucuuuucagagccaccagaauu

SEQ ID NO: 166 - RNA, 2127 nt, Artificial Sequence
  mRNA product Design b-5 comprising derived and/or modified sequence from HRSV(A2)__F0 (opt6)
gggagacuccugucgggcggaaguaggaggaguagaguuuaaaaacaguacucuuuuuccgguucgggacguaguugaagcaacgacaagccggauaaccgcucuugagacaggaagcuuaccauggaacuucuaauauuaaaagcuaacgcaaucacuacuaucuuaaccgcaguaacauucuguuuugcauccggccaaaacauaacagaagaauuuuaccaaucaacuugcucugcagucucaaaagguuaucuaucugcauuaagaacaggcugguacaccucaguaauaacgaucgaacuaucaaacaucaaagaaaacaaauguaauggaacagacgcaaaaguaaaacuaaucaaacaagaacuagacaaauacaaaaacgcaguaaccgaacuccaacuccucaugcaaaguacaccagcaacaaauaacagagcaagacgugaacuaccacguuuuaugaauuacacgcucaauaacgcaaaaaaaacaaauguuacccuaucaaaaaaacgaaaaagaagauuccucggauuccuacuaggcguaggcucagcaauagcuucaggaguagcaguaucaaaaguacuccaccucgaaggagaaguaaacaaaaucaaaagcgcucuccucucaacaaacaaagcaguuguuucacucucaaacggaguaucaguacuaaccucaaaaguacuugaccuaaaaaauuauauagacaaacaacuauuaccaauaguaaacaaacaaagcugcuccaucuccaacaucgagacagucauagaauuucaacaaaaaaauaaccgccuauuagaaauaaccagagaauuuucaguaaacgcaggaguaacuaccccaguaucaacauauauguuaacaaacucagaacuccuaagucuaaucaacgacaugccaauaaccaacgaccaaaaaaaacuaaugagcaacaauguacaaauaguucgucaacaaucuuacuccauaaugucuauaauaaaagaagaaguacucgccuauguaguccaacuaccacuauacggagucaucgauacaccaugcuggaaacuccacacauccccacucuguacuacuaacaccaaagaagguucaaauauaugccuaaccagaacagauagagguugguacugcgauaaugcaggaucaguauccuuuuucccccaagccgaaacaugcaaaguucaauccaauagaguauuuugugauacaaugaacucuuuaacccucccauccgaagucaaucuauguaacgucgacauauuuaacccaaaauacgauugcaaaauaaugacaucaaaaacagacgucucauccucaguuauaacguccuuaggcgcuauaguaucaugcuacggcaaaacaaaauguacagcaucaaacaaaaacagaggaaucauaaaaacuuucucuaacgguugcgacuauguauccaacaaaggugucgacacaguauccguaggcaacacccuuuacuauguuaauaaacaagaaggaaaaucucuauauguaaaaggcgaaccaauuauaaauuuuuacgacccccuugucuuucccucugacgaauuugacgcuuccauaucacaagucaacgaaaaaaucaaccaaucccucgcauucauacgcaaaucagacgaacuacuacauaacgucaacgcaggcaaauccacaacaaacauaaugauaaccacaaucauaauuguaauaauaguaauacuacuuucucuaauagcagucggauuacucuuauacuguaaagcucgaucaacaccagucacccucucuaaagaucaacuauccggaaucaacaacauagcuuucucaaacuaaggacuaguacuggcugcaucucccuuuccucuguccuccauccuucucccaggauggugaagggggaccugguacccagugauccccaccccaggauccuaaaucaugacuuaccugcuaauaaaaacucauuggaaaagugagaagaucuaaaaaaaaaaaaaaaaaaaaaaaaaaaaaaaaaaaaaaaaaaaaaaaaaaaaaaaaaaaaaaaaugcaucccccccccccccccccccccccccccccccaaaggcucuuuucagagccaccagaauu

SEQ ID NO: 167 - RNA, 2127 nt, Artificial Sequence
  mRNA product Design b-5 comprising derived and/or modified sequence from HRSV(A2)__F0 (opt11)
gggagacuccugucgggcggaaguaggaggaguagaguuuaaaaacaguacucuuuuuccgguucgggacguaguugaagcaacgacaagccggauaaccgcucuugagacaggaagcuuaccauggaacuccucauacucaaagccaacgcaaucacaaccauacucaccgccgucaccuucugcuuugcaucuggccagaacaucacugaagaguucuaccaauccacaugcuccgccguaagcaaaggcuaccuauccgcccuacgcaccggcugguacaccagcguaaucaccauagaacucuccaauauaaaagaaaacaaaugcaacggcaccgacgcaaaagucaagcuaauaaaacaagaacucgacaaauacaaaaacgccguuaccgaacuccagcuacucaugcaaucgaccccagcaaccaacaaccgugcgagacgcgaacucccccgcuucaugaacuacacccuaaacaacgccaaaaagaccaacguaacucuauccaagaaacgcaaacgccgcuuccucggauuccuccucggcgucggcuccgcaaucgccagcggcgucgccguuagcaaaguccuucaccucgaaggagaaguaaacaaaauuaaaagcgcccucuuauccacaaacaaggccguaguaucccugucaaacggcgucuccguccuuacauccaaaguccucgaccucaagaacuacauagacaaacagcuacuacccauuguaaauaaacaaagcugcucaauuagcaacaucgaaaccguaaucgaguuccagcagaaaaacaacagacuucucgaaaucacccgcgaguucagcgucaacgccggcguaaccaccccugucucaacauacaugcuaaccaacagcgaacugcucucccucaucaacgacaugcccaucaccaacgaccaaaagaaacucaugagcaacaacguacaaaucgugcgccaacaguccuacucaauaaugucaaucaucaaagaagaagugcuagcauacgucguacaacuaccacucuacggcguaauagauacccccugcuggaagcuccauaccuccccacucuguaccaccaacaccaaagaaggcucaaacaucugccuaacgcgcacagaccguggaugguacugugacaacgccggcuccgucuccuucuucccucaagccgaaacaugcaaaguccaauccaacagagucuucugcgauaccaugaacucccugacacucccaagcgaagucaaccuuugcaacgucgauaucuuuaaccccaaauacgacugcaagaucaugacaucaaaaaccgacguauccuccucuguaauaaccucccuaggcgcaaucguaucaugcuacggcaaaaccaaauguaccgccuccaacaaaaaucgcggcaucaucaaaaccuucucgaacggcugcgacuacgucuccaacaaaggcguagacacaguuuccguaggcaacacccucuacuacgucaauaaacaggaaggcaagucccucuacgucaaaggcgaacccaucaucaauuucuacgacccccucguuuuccccuccgaugaguucgacgcaagcaucagccaggucaacgaaaagauaaaccagucccucgccuucauccgcaaaucagaugaacuccuucacaacguuaacgcaggcaagagcaccaccaacaucaugaucacaacuauaaucaucgucauaaucgucauccuacucucacuaaucgccgucggucuccuacuauauuguaaagcccgaucaacaccggucacacucuccaaagaccaacucuccggaaucaacaauaucgcuuucucgaacuaaggacuaguacuggcugcaucucccuuuccucuguccuccauccuucucccaggauggugaagggggaccugguacccagugauccccaccccaggauccuaaaucaugacuuaccugcuaauaaaaacucauuggaaaagugagaagaucuaaaaaaaaaaaaaaaaaaaaaaaaaaaaaaaaaaaaaaaaaaaaaaaaaaaaaaaaaaaaaaaaugcaucccccccccccccccccccccccccccccccaaaggcucuuuucagagccaccagaauu

SEQ ID NO: 168 - RNA, 2033 nt, Artificial Sequence
  mRNA product Design c-1 comprising derived and/or modified sequence from HRSV(A2)__F0 (artificial)
gggagaguccgcucagccagguugcagaagcggcuuagcguguguccuaaucuucucucugcguguagguaggccugugccgcaaacaagcuuaccauggaguugcuaauccucaaagcaaaugcaauuaccacaauccucacugcagucacauuuuguuuugcuucuggucaaaacaucacugaagaauuuuaucaaucaacaugcagugcaguuagcaaaggcuaucuuagugcucugagaacugguugguauaccaguguuauaacuauagaauuaaguaauaucaaggaaaauaaguguaauggaacagaugcuaagguaaaauugauaaaacaagaauuagauaaauauaaaaaugcuguaacagaauugcaguugcucaugcaaagcacaccagcaacaaacaaucgagccagaagagaacuaccaagguuuaugaauuauacacucaacaaugccaaaaaaaccaauguaacauuaagcaagaaaaggaaaagaagauuucuugguuuuuuguuagguguuggaucugcaaucgccaguggcguugcuguaucuaagguccugcaccuagaaggggaagugaacaagaucaaaagugcucuacuauccacaaacaaggcuguagucagcuuaucaaauggaguuagugucuuaaccagcaaaguguuagaccucaaaaacuauauagauaaacaauuguuaccuauugugaacaagcaaagcugcagcauaucaaauauagaaacugugauagaguuccaacaaaagaacaacagacuacuagagauuaccagggaauuuaguguuaaugcagguguaacuacaccuguaagcacuuacauguuaacuaauagugaauuauugucauuaaucaaugauaugccuauaacaaaugaucagaaaaaguuaauguccaacaauguucaaauaguuagacagcaaaguuacucuaucauguccauaauaaaagaggaagucuuagcauauguaguacaauuaccacuauaugguguuauagauacacccuguuggaaacuacacacauccccucuauguacaaccaacacaaaagaaggguccaacaucuguuuaacaagaacugacagaggaugguacugugacaaugcaggaucaguaucuuucuucccacaagcugaaacauguaaaguucaaucaaaucgaguauuuugugacacaaugaacaguuuaacauuaccaagugaaguaaaucucugcaauguugacauauucaaccccaaauaugauuguaaaauuaugacuucaaaaacagauguaagcagcuccguuaucacaucucuaggagccauugugucaugcuauggcaaaacuaaauguacagcauccaauaaaaaucguggaaucauaaagacauuuucuaacgggugcgauuauguaucaaauaaagggguggacacugugucuguagguaacacauuauauuauguaaauaagcaagaagguaaaagucucuauguaaaaggugaaccaauaauaaauuucuaugacccauuaguauuccccucugaugaauuugaugcaucaauaucucaagucaacgagaagauuaaccagagccuagcauuuauucguaaauccgaugaauuauuacauaauguaaaugcugguaaauccaccacaaauaucaugauaacuacuauaauuauagugauuauaguaauauuguuaucauuaauugcuguuggacugcucuuauacuguaaggccagaagcacaccagucacacuaagcaaagaucaacugagugguauaaauaauauugcauuuaguaacuaaggacuaguguccaccugucccuccugggcugcuggauugucucguuuuccugccaaauaaacaggaucagcgcuuuacagaucuaaaaaaaaaaaaaaaaaaaaaaaaaaaaaaaaaaaaaaaaaaaaaaaaaaaaaaaaaaaaaaaaugcaucccccccccccccccccccccccccccccccaaaggcucuuuucagagccaccagaauu

SEQ ID NO: 169 - RNA, 2033 nt, Artificial Sequence
  mRNA product Design c-1 comprising derived and/or modified sequence from HRSV(A2)__F0 (opt1)
gggagaguccgcucagccagguugcagaagcggcuuagcguguguccuaaucuucucucugcguguagguaggccugugccgcaaacaagcuuaccauggagcugcucauccugaaggccaacgccaucaccaccauccugacggcggugaccuucugcuucgccagcggccagaacaucaccgaggaguucuaccaguccaccugcagcgccgucuccaagggguaccucagcgcccugcggacgggcugguacaccuccgugaucaccaucgagcugagcaacaucaaggagaacaagugcaacgggaccgacgccaaggugaagcucaucaagcaggagcuggacaaguacaagaacgcggucacggagcugcagcuccugaugcaguccaccccggcaaccaacaaccgcgcccggcgcgagcugccccgguucaugaacuacacccucaacaacgccaagaagacgaacgugacccugagcaagaagcgcaagcggcgcuuccugggcuuccuccugggggugggcuccgccaucgcgagcggcgucgccguguccaaggugcugcaccucgagggggaggucaacaagaucaagagcgcccugcuguccaccaacaaggccguggugagccucuccaacggcgucagcgugcugaccuccaaggugcuggaccucaagaacuacaucgacaagcagcugcugcccaucgucaacaagcagagcugcuccaucagcaacaucgagacggugaucgaguuccagcagaagaacaaccggcuccuggagaucacccgcgaguucagcgugaacgccggggucaccacccccguguccacguacaugcugaccaacagcgagcuccugucccugaucaacgacaugccgaucaccaacgaccagaagaagcucaugagcaacaacgugcagaucguccggcagcaguccuacagcaucauguccaucaucaaggaggaggugcuggcguacgugguccagcugccccucuacggcgugaucgacacccccugcuggaagcugcacacgagcccccugugcaccaccaacaccaaggagggguccaacaucugccucacgcgcaccgaccggggcugguacugcgacaacgccggcagcgucuccuucuucccgcaggccgagaccugcaaggugcagagcaaccgcguguucugcgacaccaugaacucccugacgcugcccagcgagguaaaccucugcaacgucgacaucuucaaccccaaguacgacugcaagaucaugaccuccaagaccgacgugagcuccagcgugaucaccucccugggggccaucgucagcugcuacggcaagacgaagugcaccgccagcaacaagaaccgggggaucaucaagaccuucuccaacggcugcgacuacgugagcaacaagggcguggacaccguguccgucgggaacacccuguacuacgugaacaagcaggagggcaagagccucuacgugaagggggagcccaucaucaacuucuacgacccgcuggucuuccccuccgacgaguucgacgcgagcaucucccaggugaacgagaagaucaaccagagccuggccuucauccgcaaguccgacgagcugcuccacaacgugaacgccggcaagagcacgaccaacaucaugaucaccaccaucaucaucgucaucaucgugauccugcugucccucaucgccguggggcugcugcucuacugcaaggcccggagcacgcccgucacccuguccaaggaccagcugagcggcaucaacaacaucgcguucuccaacugaggacuaguguccaccugucccuccugggcugcuggauugucucguuuuccugccaaauaaacaggaucagcgcuuuacagaucuaaaaaaaaaaaaaaaaaaaaaaaaaaaaaaaaaaaaaaaaaaaaaaaaaaaaaaaaaaaaaaaaugcaucccccccccccccccccccccccccccccccaaaggcucuuuucagagccaccagaauu

SEQ ID NO: 170 - RNA, 2033 nt, Artificial Sequence
  mRNA product Design c-1 comprising derived and/or modified sequence from HRSV(A2)__F0 (opt1)
gggagaguccgcucagccagguugcagaagcggcuuagcguguguccuaaucuucucucugcguguagguaggccugugccgcaaacaagcuuaccauggagcugcucauccugaaggccaacgccaucaccaccauccugacggcggugaccuucugcuucgccagcggccagaacaucaccgaggaguucuaccaguccacgugcagcgccgucuccaagggguaccucagcgcccugcgcaccggcugguacaccuccgugaucaccaucgagcugagcaacaucaaggagaacaagugcaacgggaccgacgccaaggugaagcucaucaagcaggagcuggacaaguacaagaacgcggucacggagcugcagcuccugaugcaguccacccccgccaccaacaaccgggcccgccgggagcugccgcgcuucaugaacuacacccucaacaacgccaagaagacgaacgugacccugagcaagaagcggaagcgccgguuccugggcuuccuccugggggugggcuccgcgaucgccagcggcgucgccguguccaaggugcugcaccucgagggggaggucaacaagaucaagagcgcccugcuguccaccaacaaggccguggugagccucuccaacggcgucagcgugcugaccuccaaggugcuggaccucaagaacuacaucgacaagcagcugcugcccaucgucaacaagcagagcugcuccaucagcaacaucgagacggugaucgaguuccagcagaagaacaaccgccuccuggagaucacccgggaguucagcgugaacgcgggggucaccacccccguguccacguacaugcugaccaacagcgagcuccugucccugaucaacgacaugcccaucaccaacgaccagaagaagcucaugagcaacaacgugcagaucguccgccagcaguccuacagcaucauguccaucaucaaggaggaggugcuggccuacgugguccagcugccgcucuacggcgugaucgacacccccugcuggaagcugcacacgagcccccugugcaccaccaacaccaaggagggguccaacaucugccucacgcggaccgaccgcggcugguacugcgacaacgccggcagcgucuccuucuucccccaggccgagaccugcaaggugcagagcaaccggguguucugcgacaccaugaacucccugacgcugccgagcgaggucaaccucugcaacguggacaucuucaaccccaaguacgacugcaagaucaugaccuccaagaccgacgugagcuccagcgucaucaccucccugggggccaucgugagcugcuacggcaagacgaagugcaccgcgagcaacaagaaccgcgggaucaucaagaccuucuccaacggcugcgacuacgugagcaacaagggcgucgacaccguguccguggggaacacccuguacuacgucaacaagcaggagggcaagagccucuacgugaagggggagcccaucaucaacuucuacgacccccugguguucccguccgacgaguucgacgccagcaucucccaggucaacgagaagaucaaccagagccuggccuucauccggaaguccgacgagcuccugcacaacgugaacgccggcaagagcacgaccaacaucaugaucaccaccaucaucaucgugaucaucgucauccugcugucccucaucgccguggggcugcugcucuacugcaaggcgcgcagcacgcccgugacccuguccaaggaccagcugagcggcaucaacaacaucgccuucuccaacugaggacuaguguccaccugucccuccugggcugcuggauugucucguuuuccugccaaauaaacaggaucagcgcuuuacagaucuaaaaaaaaaaaaaaaaaaaaaaaaaaaaaaaaaaaaaaaaaaaaaaaaaaaaaaaaaaaaaaaaugcaucccccccccccccccccccccccccccccccaaaggcucuuuucagagccaccagaauu

SEQ ID NO: 171 - RNA, 2033 nt, Artificial Sequence
  mRNA product Design c-1 comprising derived and/or modified sequence from HRSV(A2)__F0 (opt2)
gggagaguccgcucagccagguugcagaagcggcuuagcguguguccuaaucuucucucugcguguagguaggccugugccgcaaacaagcuuaccauggagcuccucauccucaaggccaacgccaucaccaccauccucaccgccgucaccuucugcuucgccuccggccagaacaucaccgaggaguucuaccaguccaccugcuccgccgucuccaagggcuaccucuccgcccuccgcaccggcugguacaccuccgucaucaccaucgagcucuccaacaucaaggagaacaagugcaacggcaccgacgccaaggucaagcucaucaagcaggagcucgacaaguacaagaacgccgucaccgagcuccagcuccucaugcaguccacccccgccaccaacaaccgcgcccgccgcgagcucccccgcuucaugaacuacacccucaacaacgccaagaagaccaacgucacccucuccaagaagcgcaagcgccgcuuccucggcuuccuccucggcgucggcuccgccaucgccuccggcgucgccgucuccaagguccuccaccucgagggcgaggucaacaagaucaaguccgcccuccucuccaccaacaaggccgucgucucccucuccaacggcgucuccguccucaccuccaagguccucgaccucaagaacuacaucgacaagcagcuccuccccaucgucaacaagcaguccugcuccaucuccaacaucgagaccgucaucgaguuccagcagaagaacaaccgccuccucgagaucacccgcgaguucuccgucaacgccggcgucaccacccccgucuccaccuacaugcucaccaacuccgagcuccucucccucaucaacgacaugcccaucaccaacgaccagaagaagcucauguccaacaacguccagaucguccgccagcaguccuacuccaucauguccaucaucaaggaggagguccucgccuacgucguccagcucccccucuacggcgucaucgacacccccugcuggaagcuccacaccuccccccucugcaccaccaacaccaaggagggcuccaacaucugccucacccgcaccgaccgcggcugguacugcgacaacgccggcuccgucuccuucuucccccaggccgagaccugcaagguccaguccaaccgcgucuucugcgacaccaugaacucccucacccuccccuccgaggucaaccucugcaacgucgacaucuucaaccccaaguacgacugcaagaucaugaccuccaagaccgacgucuccuccuccgucaucaccucccucggcgccaucgucuccugcuacggcaagaccaagugcaccgccuccaacaagaaccgcggcaucaucaagaccuucuccaacggcugcgacuacgucuccaacaagggcgucgacaccgucuccgucggcaacacccucuacuacgucaacaagcaggagggcaagucccucuacgucaagggcgagcccaucaucaacuucuacgacccccucgucuuccccuccgacgaguucgacgccuccaucucccaggucaacgagaagaucaaccagucccucgccuucauccgcaaguccgacgagcuccuccacaacgucaacgccggcaaguccaccaccaacaucaugaucaccaccaucaucaucgucaucaucgucauccuccucucccucaucgccgucggccuccuccucuacugcaaggcccgcuccacccccgucacccucuccaaggaccagcucuccggcaucaacaacaucgccuucuccaacugaggacuaguguccaccugucccuccugggcugcuggauugucucguuuuccugccaaauaaacaggaucagcgcuuuacagaucuaaaaaaaaaaaaaaaaaaaaaaaaaaaaaaaaaaaaaaaaaaaaaaaaaaaaaaaaaaaaaaaaugcaucccccccccccccccccccccccccccccccaaaggcucuuuucagagccaccagaauu

SEQ ID NO: 172 - RNA, 2033 nt, Artificial Sequence
  mRNA product Design c-1 comprising derived and/or modified sequence from HRSV(A2)__F0 (opt3)
gggagaguccgcucagccagguugcagaagcggcuuagcguguguccuaaucuucucucugcguguagguaggccugugccgcaaacaagcuuaccauggagcugcucauccuuaaggccaacgcuauuaccacaauacugacugcagugacguucugcuuugccagcggccagaauaucaccgaagaguucuaccaauccacauguucugcggucucaaaaggguauuugagugcuuuaagaacuggaugguacaccagcguuauuacaaucgaacuguccaacauuaaggagaauaaaugcaacgguaccgacgccaaggugaaacuaaucaagcaggaacucgauaaguauaaaaaugcaguaacugagcugcagcuucugaugcagucuacacccgccaccaacaauagggcucggcgcgaguugccucgauuuaugaacuacacgcucaauaacgcaaagaaaacuaaugugacccugucgaagaaacguaagagaagguuccugggcuuucucuuaggggucggaucagccauagcuagcggcguggccguuaguaaggugcugcaccuugaaggugaggucaacaaaaucaaguccgcguugcugucuacaaauaaagcagugguaagccuauccaacgggguuucagugcucacuucuaagguccuggaccuuaaaaauuauauugauaagcaacuguugccaaucgugaacaaacagagcuguucuauuuccaacaucgaaaccgugauagaguuccagcagaagaauaaccggcuccuggagauuacacgcgaauuuucagucaaugccggaguuaccacgccggugagcacuuacauguuaacaaacagugagcugcucucucuuaucaaugacaugcccauuaccaacgaucaaaagaaacugauguccaauaacguacagaucgugagacagcagagcuauucgaucaugucuauuauaaaggaagaggucuuggcuuacgugguucaacuaccucuguacggcgugaucgacacuccaugcuggaaacuccauacauccccacuguguaccacgaauaccaaggaaggcucaaacauuugccuuacaaggacugaucgggggugguauugugacaaugccggaagugucagcuucuuuccucaggcagagaccugcaaagugcaguccaaccgcguauucugugauacaaugaauagucugacuuugccaagcgagguuaaccucugcaauguggacaucuuuaaccccaaguacgauuguaagauaaugaccucaaaaacagacgucaguuccagcgugauuaccucucugggugcuaucgucucaugcuauggcaagacuaaaugcacggccaguaacaagaaucgagggaucauuaaaacauucagcaacggaugugauuacguguccaauaagggcguugacaccgugucuguagguaacacuuuauauuacgucaauaagcaagaagggaaaucgcuguaugugaagggagagccuaucauuaacuuuuacgacccccuaguuuucccgagcgaugaauuugacgcguccauaucacaggugaaugagaaaaucaaccagagucucgccuucauuagaaagucugaugaacugcuucacaaugucaacgcaggcaaaagcaccacaaauaucaugaucaccacuauuauaaucgugauuaucguaauuuugcugucccucaucgcugugggccugcuucuguacugcaaggccaggucaacacccguuacguugagcaaggaccagcucucugggauaaacaauaucgcuuucuccaacugaggacuaguguccaccugucccuccugggcugcuggauugucucguuuuccugccaaauaaacaggaucagcgcuuuacagaucuaaaaaaaaaaaaaaaaaaaaaaaaaaaaaaaaaaaaaaaaaaaaaaaaaaaaaaaaaaaaaaaaugcaucccccccccccccccccccccccccccccccaaaggcucuuuucagagccaccagaauu

SEQ ID NO: 173 - RNA, 2033 nt, Artificial Sequence
  mRNA product Design c-1 comprising derived and/or modified sequence from HRSV(A2)__F0 (opt4)
gggagaguccgcucagccagguugcagaagcggcuuagcguguguccuaaucuucucucugcguguagguaggccugugccgcaaacaagcuuaccauggagcugcugauccugaaggccaacgccaucaccaccauccugaccgccgugaccuucugcuucgccagcggccagaacaucaccgaggaguucuaccagagcaccugcagcgccgugagcaagggcuaccugagcgcccugagaaccggcugguacaccagcgugaucaccaucgagcugagcaacaucaaggagaacaagugcaacggcaccgacgccaaggugaagcugaucaagcaggagcuggacaaguacaagaacgccgugaccgagcugcagcugcugaugcagagcacccccgccaccaacaacagagccagaagagagcugcccagauucaugaacuacacccugaacaacgccaagaagaccaacgugacccugagcaagaagagaaagagaagauuccugggcuuccugcugggcgugggcagcgccaucgccagcggcguggccgugagcaaggugcugcaccuggagggcgaggugaacaagaucaagagcgcccugcugagcaccaacaaggccguggugagccugagcaacggcgugagcgugcugaccagcaaggugcuggaccugaagaacuacaucgacaagcagcugcugcccaucgugaacaagcagagcugcagcaucagcaacaucgagaccgugaucgaguuccagcagaagaacaacagacugcuggagaucaccagagaguucagcgugaacgccggcgugaccacccccgugagcaccuacaugcugaccaacagcgagcugcugagccugaucaacgacaugcccaucaccaacgaccagaagaagcugaugagcaacaacgugcagaucgugagacagcagagcuacagcaucaugagcaucaucaaggaggaggugcuggccuacguggugcagcugccccuguacggcgugaucgacacccccugcuggaagcugcacaccagcccccugugcaccaccaacaccaaggagggcagcaacaucugccugaccagaaccgacagaggcugguacugcgacaacgccggcagcgugagcuucuucccccaggccgagaccugcaaggugcagagcaacagaguguucugcgacaccaugaacagccugacccugcccagcgaggugaaccugugcaacguggacaucuucaaccccaaguacgacugcaagaucaugaccagcaagaccgacgugagcagcagcgugaucaccagccugggcgccaucgugagcugcuacggcaagaccaagugcaccgccagcaacaagaacagaggcaucaucaagaccuucagcaacggcugcgacuacgugagcaacaagggcguggacaccgugagcgugggcaacacccuguacuacgugaacaagcaggagggcaagagccuguacgugaagggcgagcccaucaucaacuucuacgacccccugguguuccccagcgacgaguucgacgccagcaucagccaggugaacgagaagaucaaccagagccuggccuucaucagaaagagcgacgagcugcugcacaacgugaacgccggcaagagcaccaccaacaucaugaucaccaccaucaucaucgugaucaucgugauccugcugagccugaucgccgugggccugcugcuguacugcaaggccagaagcacccccgugacccugagcaaggaccagcugagcggcaucaacaacaucgccuucagcaacugaggacuaguguccaccugucccuccugggcugcuggauugucucguuuuccugccaaauaaacaggaucagcgcuuuacagaucuaaaaaaaaaaaaaaaaaaaaaaaaaaaaaaaaaaaaaaaaaaaaaaaaaaaaaaaaaaaaaaaaugcaucccccccccccccccccccccccccccccccaaaggcucuuuucagagccaccagaauu

SEQ ID NO: 174 - RNA, 2033 nt, Artificial Sequence
  mRNA product Design c-1 comprising derived and/or modified sequence from HRSV(A2)__F0 (opt5)
gggagaguccgcucagccagguugcagaagcggcuuagcguguguccuaaucuucucucugcguguagguaggccugugccgcaaacaagcuuaccauggagcugcucauccugaaggccaacgcuauuaccacaauccuuacggccgugaccuucugcuuugcgagcggccagaauauuacagaagaguucuaccaauccaccuguucugcugucagcaaaggguaucuguccgcccucagaacaggaugguacaccucuguuaucacaauugaacugagcaacaucaaggagaauaaaugcaacggcaccgacgccaaggugaaacuuaucaagcaggaacuggauaaguauaaaaaugcugugacggagcuccagcugcugaugcaguccacccccgccacaaacaaucgggcucgcagagagcucccucgguuuaugaacuacacccugaauaacgccaagaaaacaaaugucacccuuucuaagaaacgcaagagacgguuccugggguuucuccugggagugggcagcgcgauugccuccgggguugcugugagcaagguccuucaccuggaaggagaggugaacaaaaucaagucugcccuccuguccacgaauaaagcuguugugagccugucuaacggcgucuccgugcucacaagcaaggugcuggaccuuaaaaauuauauugauaagcaacugcucccgaucgucaacaaacagucuuguuccauuagcaacaucgaaaccguuauugaguuccagcagaagaauaaccgccugcuugagaucacaagagaauuuuccgugaaugccggcgugaccacccccgucucuacauacaugcugacgaacagcgagcuccugucccugaucaaugacaugccuauuaccaacgaucaaaagaaacucaugagcaauaacgugcagaucguucggcagcagucuuauuccauuaugagcaucauuaaggaagaggugcuggcguacgucgugcaacuuccccuguacgggguuaucgacacaccuugcuggaaacuccauaccucuccccuguguacaaccaauacgaaggaaggaagcaacaucugccuuacacgcaccgauagaggcugguauugugacaaugccggguccgugucuuucuuuccucaggcugagaccugcaaaguccagagcaaccggguguucugugauacaaugaacucccugacccucccgagcgaggucaaucugugcaauguggacauuuuuaaccccaaguacgauuguaagaucaugacaucuaaaacggacguuuccagcucugugauuaccucccugggagccaucgucagcugcuauggcaagacaaaaugcaccgcuuccaacaagaaucgcgggauuaucaaaacauucucuaacggaugugauuacgugagcaauaagggcguugacaccguguccgucggcaacacgcucuauuacgugaauaagcaagaagggaaaucucuguaugugaagggagagccuaucauuaacuuuuacgacccccuuguuuucccuagcgaugaauuugacgccuccaucagccaggucaaugagaaaauuaaccagucucuggccuucaucagaaaguccgaugaacuccugcacaaugugaacgcuggcaaaagcaccacaaauauuaugaucaccacaauuaucaucgugauuaucgucauucugcuuucucucaucgcgguggggcugcugcucuacugcaaggcccgguccacccccguuacgcugagcaaggaccagcuuucuggaauuaacaauaucgcuuucagcaacugaggacuaguguccaccugucccuccugggcugcuggauugucucguuuuccugccaaauaaacaggaucagcgcuuuacagaucuaaaaaaaaaaaaaaaaaaaaaaaaaaaaaaaaaaaaaaaaaaaaaaaaaaaaaaaaaaaaaaaaugcaucccccccccccccccccccccccccccccccaaaggcucuuuucagagccaccagaauu

SEQ ID NO: 175 - RNA, 2033 nt, Artificial Sequence
  mRNA product Design c-1 comprising derived and/or modified sequence from HRSV(A2)__F0 (opt6)
gggagaguccgcucagccagguugcagaagcggcuuagcguguguccuaaucuucucucugcguguagguaggccugugccgcaaacaagcuuaccauggaacuucuaauauuaaaagcuaacgcaaucacuacuaucuuaaccgcaguaacauucuguuuugcauccggccaaaacauaacagaagaauuuuaccaaucaacuugcucugcagucucaaaagguuaucuaucugcauuaagaacaggcugguacaccucaguaauaacgaucgaacuaucaaacaucaaagaaaacaaauguaauggaacagacgcaaaaguaaaacuaaucaaacaagaacuagacaaauacaaaaacgcaguaaccgaacuccaacuccucaugcaaaguacaccagcaacaaauaacagagcaagacgugaacuaccacguuuuaugaauuacacgcucaauaacgcaaaaaaaacaaauguuacccuaucaaaaaaacgaaaaagaagauuccucggauuccuacuaggcguaggcucagcaauagcuucaggaguagcaguaucaaaaguacuccaccucgaaggagaaguaaacaaaaucaaaagcgcucuccucucaacaaacaaagcaguuguuucacucucaaacggaguaucaguacuaaccucaaaaguacuugaccuaaaaaauuauauagacaaacaacuauuaccaauaguaaacaaacaaagcugcuccaucuccaacaucgagacagucauagaauuucaacaaaaaaauaaccgccuauuagaaauaaccagagaauuuucaguaaacgcaggaguaacuaccccaguaucaacauauauguuaacaaacucagaacuccuaagucuaaucaacgacaugccaauaaccaacgaccaaaaaaaacuaaugagcaacaauguacaaauaguucgucaacaaucuuacuccauaaugucuauaauaaaagaagaaguacucgccuauguaguccaacuaccacuauacggagucaucgauacaccaugcuggaaacuccacacauccccacucuguacuacuaacaccaaagaagguucaaauauaugccuaaccagaacagauagagguugguacugcgauaaugcaggaucaguauccuuuuucccccaagccgaaacaugcaaaguucaauccaauagaguauuuugugauacaaugaacucuuuaacccucccauccgaagucaaucuauguaacgucgacauauuuaacccaaaauacgauugcaaaauaaugacaucaaaaacagacgucucauccucaguuauaacguccuuaggcgcuauaguaucaugcuacggcaaaacaaaauguacagcaucaaacaaaaacagaggaaucauaaaaacuuucucuaacgguugcgacuauguauccaacaaaggugucgacacaguauccguaggcaacacccuuuacuauguuaauaaacaagaaggaaaaucucuauauguaaaaggcgaaccaauuauaaauuuuuacgacccccuugucuuucccucugacgaauuugacgcuuccauaucacaagucaacgaaaaaaucaaccaaucccucgcauucauacgcaaaucagacgaacuacuacauaacgucaacgcaggcaaauccacaacaaacauaaugauaaccacaaucauaauuguaauaauaguaauacuacuuucucuaauagcagucggauuacucuuauacuguaaagcucgaucaacaccagucacccucucuaaagaucaacuauccggaaucaacaacauagcuuucucaaacuaaggacuaguguccaccugucccuccugggcugcuggauugucucguuuuccugccaaauaaacaggaucagcgcuuuacagaucuaaaaaaaaaaaaaaaaaaaaaaaaaaaaaaaaaaaaaaaaaaaaaaaaaaaaaaaaaaaaaaaaugcaucccccccccccccccccccccccccccccccaaaggcucuuuucagagccaccagaauu

SEQ ID NO: 176 - RNA, 2033 nt, Artificial Sequence
  mRNA product Design c-1 comprising derived and/or modified sequence from HRSV(A2)__F0 (opt11)
gggagaguccgcucagccagguugcagaagcggcuuagcguguguccuaaucuucucucugcguguagguaggccugugccgcaaacaagcuuaccauggaacuccucauacucaaagccaacgcaaucacaaccauacucaccgccgucaccuucugcuuugcaucuggccagaacaucacugaagaguucuaccaauccacaugcuccgccguaagcaaaggcuaccuauccgcccuacgcaccggcugguacaccagcguaaucaccauagaacucuccaauauaaaagaaaacaaaugcaacggcaccgacgcaaaagucaagcuaauaaaacaagaacucgacaaauacaaaaacgccguuaccgaacuccagcuacucaugcaaucgaccccagcaaccaacaaccgugcgagacgcgaacucccccgcuucaugaacuacacccuaaacaacgccaaaaagaccaacguaacucuauccaagaaacgcaaacgccgcuuccucggauuccuccucggcgucggcuccgcaaucgccagcggcgucgccguuagcaaaguccuucaccucgaaggagaaguaaacaaaauuaaaagcgcccucuuauccacaaacaaggccguaguaucccugucaaacggcgucuccguccuuacauccaaaguccucgaccucaagaacuacauagacaaacagcuacuacccauuguaaauaaacaaagcugcucaauuagcaacaucgaaaccguaaucgaguuccagcagaaaaacaacagacuucucgaaaucacccgcgaguucagcgucaacgccggcguaaccaccccugucucaacauacaugcuaaccaacagcgaacugcucucccucaucaacgacaugcccaucaccaacgaccaaaagaaacucaugagcaacaacguacaaaucgugcgccaacaguccuacucaauaaugucaaucaucaaagaagaagugcuagcauacgucguacaacuaccacucuacggcguaauagauacccccugcuggaagcuccauaccuccccacucuguaccaccaacaccaaagaaggcucaaacaucugccuaacgcgcacagaccguggaugguacugugacaacgccggcuccgucuccuucuucccucaagccgaaacaugcaaaguccaauccaacagagucuucugcgauaccaugaacucccugacacucccaagcgaagucaaccuuugcaacgucgauaucuuuaaccccaaauacgacugcaagaucaugacaucaaaaaccgacguauccuccucuguaauaaccucccuaggcgcaaucguaucaugcuacggcaaaaccaaauguaccgccuccaacaaaaaucgcggcaucaucaaaaccuucucgaacggcugcgacuacgucuccaacaaaggcguagacacaguuuccguaggcaacacccucuacuacgucaauaaacaggaaggcaagucccucuacgucaaaggcgaacccaucaucaauuucuacgacccccucguuuuccccuccgaugaguucgacgcaagcaucagccaggucaacgaaaagauaaaccagucccucgccuucauccgcaaaucagaugaacuccuucacaacguuaacgcaggcaagagcaccaccaacaucaugaucacaacuauaaucaucgucauaaucgucauccuacucucacuaaucgccgucggucuccuacuauauuguaaagcccgaucaacaccggucacacucuccaaagaccaacucuccggaaucaacaauaucgcuuucucgaacuaaggacuaguguccaccugucccuccugggcugcuggauugucucguuuuccugccaaauaaacaggaucagcgcuuuacagaucuaaaaaaaaaaaaaaaaaaaaaaaaaaaaaaaaaaaaaaaaaaaaaaaaaaaaaaaaaaaaaaaaugcaucccccccccccccccccccccccccccccccaaaggcucuuuucagagccaccagaauu

SEQ ID NO: 177 - RNA, 2123 nt, Artificial Sequence
  mRNA product Design c-2 comprising derived and/or modified sequence from HRSV(A2)__F0 (artificial)
gggagacuccugucgggcggaaguaggaggaguagaguuuaaaaacaguacucuuuuuccgguucgggacguaguugaagcaacgacaagccggauaaccgcucuugagacaggaagcuuaccauggaguugcuaauccucaaagcaaaugcaauuaccacaauccucacugcagucacauuuuguuuugcuucuggucaaaacaucacugaagaauuuuaucaaucaacaugcagugcaguuagcaaaggcuaucuuagugcucugagaacugguugguauaccaguguuauaacuauagaauuaaguaauaucaaggaaaauaaguguaauggaacagaugcuaagguaaaauugauaaaacaagaauuagauaaauauaaaaaugcuguaacagaauugcaguugcucaugcaaagcacaccagcaacaaacaaucgagccagaagagaacuaccaagguuuaugaauuauacacucaacaaugccaaaaaaaccaauguaacauuaagcaagaaaaggaaaagaagauuucuugguuuuuuguuagguguuggaucugcaaucgccaguggcguugcuguaucuaagguccugcaccuagaaggggaagugaacaagaucaaaagugcucuacuauccacaaacaaggcuguagucagcuuaucaaauggaguuagugucuuaaccagcaaaguguuagaccucaaaaacuauauagauaaacaauuguuaccuauugugaacaagcaaagcugcagcauaucaaauauagaaacugugauagaguuccaacaaaagaacaacagacuacuagagauuaccagggaauuuaguguuaaugcagguguaacuacaccuguaagcacuuacauguuaacuaauagugaauuauugucauuaaucaaugauaugccuauaacaaaugaucagaaaaaguuaauguccaacaauguucaaauaguuagacagcaaaguuacucuaucauguccauaauaaaagaggaagucuuagcauauguaguacaauuaccacuauaugguguuauagauacacccuguuggaaacuacacacauccccucuauguacaaccaacacaaaagaaggguccaacaucuguuuaacaagaacugacagaggaugguacugugacaaugcaggaucaguaucuuucuucccacaagcugaaacauguaaaguucaaucaaaucgaguauuuugugacacaaugaacaguuuaacauuaccaagugaaguaaaucucugcaauguugacauauucaaccccaaauaugauuguaaaauuaugacuucaaaaacagauguaagcagcuccguuaucacaucucuaggagccauugugucaugcuauggcaaaacuaaauguacagcauccaauaaaaaucguggaaucauaaagacauuuucuaacgggugcgauuauguaucaaauaaagggguggacacugugucuguagguaacacauuauauuauguaaauaagcaagaagguaaaagucucuauguaaaaggugaaccaauaauaaauuucuaugacccauuaguauuccccucugaugaauuugaugcaucaauaucucaagucaacgagaagauuaaccagagccuagcauuuauucguaaauccgaugaauuauuacauaauguaaaugcugguaaauccaccacaaauaucaugauaacuacuauaauuauagugauuauaguaauauuguuaucauuaauugcuguuggacugcucuuauacuguaaggccagaagcacaccagucacacuaagcaaagaucaacugagugguauaaauaauauugcauuuaguaacuaaggacuaguggaagcauuuuccuggcugauuaaaagaaauuacucagcuauggucaucuguuccuguuagaaggcuaugcagcauauuauauacuaugcgcauguuaugaaaugcauaauaaaaaauuuuaaaaaaucuaaaagaucuaaaaaaaaaaaaaaaaaaaaaaaaaaaaaaaaaaaaaaaaaaaaaaaaaaaaaaaaaaaaaaaaugcaucccccccccccccccccccccccccccccccaaaggcucuuuucagagccaccagaauu

SEQ ID NO: 178 - RNA, 2123 nt, Artificial Sequence
  mRNA product Design c-2 comprising derived and/or modified sequence from HRSV(A2)__F0 (opt1)
gggagacuccugucgggcggaaguaggaggaguagaguuuaaaaacaguacucuuuuuccgguucgggacguaguugaagcaacgacaagccggauaaccgcucuugagacaggaagcuuaccauggagcugcucauccugaaggccaacgccaucaccaccauccugacggcggugaccuucugcuucgccagcggccagaacaucaccgaggaguucuaccaguccaccugcagcgccgucuccaagggguaccucagcgcccugcggacgggcugguacaccuccgugaucaccaucgagcugagcaacaucaaggagaacaagugcaacgggaccgacgccaaggugaagcucaucaagcaggagcuggacaaguacaagaacgcggucacggagcugcagcuccugaugcaguccaccccggcaaccaacaaccgcgcccggcgcgagcugccccgguucaugaacuacacccucaacaacgccaagaagacgaacgugacccugagcaagaagcgcaagcggcgcuuccugggcuuccuccugggggugggcuccgccaucgcgagcggcgucgccguguccaaggugcugcaccucgagggggaggucaacaagaucaagagcgcccugcuguccaccaacaaggccguggugagccucuccaacggcgucagcgugcugaccuccaaggugcuggaccucaagaacuacaucgacaagcagcugcugcccaucgucaacaagcagagcugcuccaucagcaacaucgagacggugaucgaguuccagcagaagaacaaccggcuccuggagaucacccgcgaguucagcgugaacgccggggucaccacccccguguccacguacaugcugaccaacagcgagcuccugucccugaucaacgacaugccgaucaccaacgaccagaagaagcucaugagcaacaacgugcagaucguccggcagcaguccuacagcaucauguccaucaucaaggaggaggugcuggcguacgugguccagcugccccucuacggcgugaucgacacccccugcuggaagcugcacacgagcccccugugcaccaccaacaccaaggagggguccaacaucugccucacgcgcaccgaccggggcugguacugcgacaacgccggcagcgucuccuucuucccgcaggccgagaccugcaaggugcagagcaaccgcguguucugcgacaccaugaacucccugacgcugcccagcgagguaaaccucugcaacgucgacaucuucaaccccaaguacgacugcaagaucaugaccuccaagaccgacgugagcuccagcgugaucaccucccugggggccaucgucagcugcuacggcaagacgaagugcaccgccagcaacaagaaccgggggaucaucaagaccuucuccaacggcugcgacuacgugagcaacaagggcguggacaccguguccgucgggaacacccuguacuacgugaacaagcaggagggcaagagccucuacgugaagggggagcccaucaucaacuucuacgacccgcuggucuuccccuccgacgaguucgacgcgagcaucucccaggugaacgagaagaucaaccagagccuggccuucauccgcaaguccgacgagcugcuccacaacgugaacgccggcaagagcacgaccaacaucaugaucaccaccaucaucaucgucaucaucgugauccugcugucccucaucgccguggggcugcugcucuacugcaaggcccggagcacgcccgucacccuguccaaggaccagcugagcggcaucaacaacaucgcguucuccaacugaggacuaguggaagcauuuuccuggcugauuaaaagaaauuacucagcuauggucaucuguuccuguuagaaggcuaugcagcauauuauauacuaugcgcauguuaugaaaugcauaauaaaaaauuuuaaaaaaucuaaaagaucuaaaaaaaaaaaaaaaaaaaaaaaaaaaaaaaaaaaaaaaaaaaaaaaaaaaaaaaaaaaaaaaaugcaucccccccccccccccccccccccccccccccaaaggcucuuuucagagccaccagaauu

SEQ ID NO: 179 - RNA, 2123 nt, Artificial Sequence
  mRNA product Design c-2 comprising derived and/or modified sequence from HRSV(A2)__F0 (opt1)
gggagacuccugucgggcggaaguaggaggaguagaguuuaaaaacaguacucuuuuuccgguucgggacguaguugaagcaacgacaagccggauaaccgcucuugagacaggaagcuuaccauggagcugcucauccugaaggccaacgccaucaccaccauccugacggcggugaccuucugcuucgccagcggccagaacaucaccgaggaguucuaccaguccacgugcagcgccgucuccaagggguaccucagcgcccugcgcaccggcugguacaccuccgugaucaccaucgagcugagcaacaucaaggagaacaagugcaacgggaccgacgccaaggugaagcucaucaagcaggagcuggacaaguacaagaacgcggucacggagcugcagcuccugaugcaguccacccccgccaccaacaaccgggcccgccgggagcugccgcgcuucaugaacuacacccucaacaacgccaagaagacgaacgugacccugagcaagaagcggaagcgccgguuccugggcuuccuccugggggugggcuccgcgaucgccagcggcgucgccguguccaaggugcugcaccucgagggggaggucaacaagaucaagagcgcccugcuguccaccaacaaggccguggugagccucuccaacggcgucagcgugcugaccuccaaggugcuggaccucaagaacuacaucgacaagcagcugcugcccaucgucaacaagcagagcugcuccaucagcaacaucgagacggugaucgaguuccagcagaagaacaaccgccuccuggagaucacccgggaguucagcgugaacgcgggggucaccacccccguguccacguacaugcugaccaacagcgagcuccugucccugaucaacgacaugcccaucaccaacgaccagaagaagcucaugagcaacaacgugcagaucguccgccagcaguccuacagcaucauguccaucaucaaggaggaggugcuggccuacgugguccagcugccgcucuacggcgugaucgacacccccugcuggaagcugcacacgagcccccugugcaccaccaacaccaaggagggguccaacaucugccucacgcggaccgaccgcggcugguacugcgacaacgccggcagcgucuccuucuucccccaggccgagaccugcaaggugcagagcaaccggguguucugcgacaccaugaacucccugacgcugccgagcgaggucaaccucugcaacguggacaucuucaaccccaaguacgacugcaagaucaugaccuccaagaccgacgugagcuccagcgucaucaccucccugggggccaucgugagcugcuacggcaagacgaagugcaccgcgagcaacaagaaccgcgggaucaucaagaccuucuccaacggcugcgacuacgugagcaacaagggcgucgacaccguguccguggggaacacccuguacuacgucaacaagcaggagggcaagagccucuacgugaagggggagcccaucaucaacuucuacgacccccugguguucccguccgacgaguucgacgccagcaucucccaggucaacgagaagaucaaccagagccuggccuucauccggaaguccgacgagcuccugcacaacgugaacgccggcaagagcacgaccaacaucaugaucaccaccaucaucaucgugaucaucgucauccugcugucccucaucgccguggggcugcugcucuacugcaaggcgcgcagcacgcccgugacccuguccaaggaccagcugagcggcaucaacaacaucgccuucuccaacugaggacuaguggaagcauuuuccuggcugauuaaaagaaauuacucagcuauggucaucuguuccuguuagaaggcuaugcagcauauuauauacuaugcgcauguuaugaaaugcauaauaaaaaauuuuaaaaaaucuaaaagaucuaaaaaaaaaaaaaaaaaaaaaaaaaaaaaaaaaaaaaaaaaaaaaaaaaaaaaaaaaaaaaaaaugcaucccccccccccccccccccccccccccccccaaaggcucuuuucagagccaccagaauu

SEQ ID NO: 180 - RNA, 2123 nt, Artificial Sequence
  mRNA product Design c-2 comprising derived and/or modified sequence from HRSV(A2)__F0 (opt2)
gggagacuccugucgggcggaaguaggaggaguagaguuuaaaaacaguacucuuuuuccgguucgggacguaguugaagcaacgacaagccggauaaccgcucuugagacaggaagcuuaccauggagcuccucauccucaaggccaacgccaucaccaccauccucaccgccgucaccuucugcuucgccuccggccagaacaucaccgaggaguucuaccaguccaccugcuccgccgucuccaagggcuaccucuccgcccuccgcaccggcugguacaccuccgucaucaccaucgagcucuccaacaucaaggagaacaagugcaacggcaccgacgccaaggucaagcucaucaagcaggagcucgacaaguacaagaacgccgucaccgagcuccagcuccucaugcaguccacccccgccaccaacaaccgcgcccgccgcgagcucccccgcuucaugaacuacacccucaacaacgccaagaagaccaacgucacccucuccaagaagcgcaagcgccgcuuccucggcuuccuccucggcgucggcuccgccaucgccuccggcgucgccgucuccaagguccuccaccucgagggcgaggucaacaagaucaaguccgcccuccucuccaccaacaaggccgucgucucccucuccaacggcgucuccguccucaccuccaagguccucgaccucaagaacuacaucgacaagcagcuccuccccaucgucaacaagcaguccugcuccaucuccaacaucgagaccgucaucgaguuccagcagaagaacaaccgccuccucgagaucacccgcgaguucuccgucaacgccggcgucaccacccccgucuccaccuacaugcucaccaacuccgagcuccucucccucaucaacgacaugcccaucaccaacgaccagaagaagcucauguccaacaacguccagaucguccgccagcaguccuacuccaucauguccaucaucaaggaggagguccucgccuacgucguccagcucccccucuacggcgucaucgacacccccugcuggaagcuccacaccuccccccucugcaccaccaacaccaaggagggcuccaacaucugccucacccgcaccgaccgcggcugguacugcgacaacgccggcuccgucuccuucuucccccaggccgagaccugcaagguccaguccaaccgcgucuucugcgacaccaugaacucccucacccuccccuccgaggucaaccucugcaacgucgacaucuucaaccccaaguacgacugcaagaucaugaccuccaagaccgacgucuccuccuccgucaucaccucccucggcgccaucgucuccugcuacggcaagaccaagugcaccgccuccaacaagaaccgcggcaucaucaagaccuucuccaacggcugcgacuacgucuccaacaagggcgucgacaccgucuccgucggcaacacccucuacuacgucaacaagcaggagggcaagucccucuacgucaagggcgagcccaucaucaacuucuacgacccccucgucuuccccuccgacgaguucgacgccuccaucucccaggucaacgagaagaucaaccagucccucgccuucauccgcaaguccgacgagcuccuccacaacgucaacgccggcaaguccaccaccaacaucaugaucaccaccaucaucaucgucaucaucgucauccuccucucccucaucgccgucggccuccuccucuacugcaaggcccgcuccacccccgucacccucuccaaggaccagcucuccggcaucaacaacaucgccuucuccaacugaggacuaguggaagcauuuuccuggcugauuaaaagaaauuacucagcuauggucaucuguuccuguuagaaggcuaugcagcauauuauauacuaugcgcauguuaugaaaugcauaauaaaaaauuuuaaaaaaucuaaaagaucuaaaaaaaaaaaaaaaaaaaaaaaaaaaaaaaaaaaaaaaaaaaaaaaaaaaaaaaaaaaaaaaaugcaucccccccccccccccccccccccccccccccaaaggcucuuuucagagccaccagaauu

SEQ ID NO: 181 - RNA, 2123 nt, Artificial Sequence
  mRNA product Design c-2 comprising derived and/or modified sequence from HRSV(A2)__F0 (opt3)
gggagacuccugucgggcggaaguaggaggaguagaguuuaaaaacaguacucuuuuuccgguucgggacguaguugaagcaacgacaagccggauaaccgcucuugagacaggaagcuuaccauggagcugcucauccuuaaggccaacgcuauuaccacaauacugacugcagugacguucugcuuugccagcggccagaauaucaccgaagaguucuaccaauccacauguucugcggucucaaaaggguauuugagugcuuuaagaacuggaugguacaccagcguuauuacaaucgaacuguccaacauuaaggagaauaaaugcaacgguaccgacgccaaggugaaacuaaucaagcaggaacucgauaaguauaaaaaugcaguaacugagcugcagcuucugaugcagucuacacccgccaccaacaauagggcucggcgcgaguugccucgauuuaugaacuacacgcucaauaacgcaaagaaaacuaaugugacccugucgaagaaacguaagagaagguuccugggcuuucucuuaggggucggaucagccauagcuagcggcguggccguuaguaaggugcugcaccuugaaggugaggucaacaaaaucaaguccgcguugcugucuacaaauaaagcagugguaagccuauccaacgggguuucagugcucacuucuaagguccuggaccuuaaaaauuauauugauaagcaacuguugccaaucgugaacaaacagagcuguucuauuuccaacaucgaaaccgugauagaguuccagcagaagaauaaccggcuccuggagauuacacgcgaauuuucagucaaugccggaguuaccacgccggugagcacuuacauguuaacaaacagugagcugcucucucuuaucaaugacaugcccauuaccaacgaucaaaagaaacugauguccaauaacguacagaucgugagacagcagagcuauucgaucaugucuauuauaaaggaagaggucuuggcuuacgugguucaacuaccucuguacggcgugaucgacacuccaugcuggaaacuccauacauccccacuguguaccacgaauaccaaggaaggcucaaacauuugccuuacaaggacugaucgggggugguauugugacaaugccggaagugucagcuucuuuccucaggcagagaccugcaaagugcaguccaaccgcguauucugugauacaaugaauagucugacuuugccaagcgagguuaaccucugcaauguggacaucuuuaaccccaaguacgauuguaagauaaugaccucaaaaacagacgucaguuccagcgugauuaccucucugggugcuaucgucucaugcuauggcaagacuaaaugcacggccaguaacaagaaucgagggaucauuaaaacauucagcaacggaugugauuacguguccaauaagggcguugacaccgugucuguagguaacacuuuauauuacgucaauaagcaagaagggaaaucgcuguaugugaagggagagccuaucauuaacuuuuacgacccccuaguuuucccgagcgaugaauuugacgcguccauaucacaggugaaugagaaaaucaaccagagucucgccuucauuagaaagucugaugaacugcuucacaaugucaacgcaggcaaaagcaccacaaauaucaugaucaccacuauuauaaucgugauuaucguaauuuugcugucccucaucgcugugggccugcuucuguacugcaaggccaggucaacacccguuacguugagcaaggaccagcucucugggauaaacaauaucgcuuucuccaacugaggacuaguggaagcauuuuccuggcugauuaaaagaaauuacucagcuauggucaucuguuccuguuagaaggcuaugcagcauauuauauacuaugcgcauguuaugaaaugcauaauaaaaaauuuuaaaaaaucuaaaagaucuaaaaaaaaaaaaaaaaaaaaaaaaaaaaaaaaaaaaaaaaaaaaaaaaaaaaaaaaaaaaaaaaugcaucccccccccccccccccccccccccccccccaaaggcucuuuucagagccaccagaauu

SEQ ID NO: 182 - RNA, 2123 nt, Artificial Sequence
  mRNA product Design c-2 comprising derived and/or modified sequence from HRSV(A2)__F0 (opt4)
gggagacuccugucgggcggaaguaggaggaguagaguuuaaaaacaguacucuuuuuccgguucgggacguaguugaagcaacgacaagccggauaaccgcucuugagacaggaagcuuaccauggagcugcugauccugaaggccaacgccaucaccaccauccugaccgccgugaccuucugcuucgccagcggccagaacaucaccgaggaguucuaccagagcaccugcagcgccgugagcaagggcuaccugagcgcccugagaaccggcugguacaccagcgugaucaccaucgagcugagcaacaucaaggagaacaagugcaacggcaccgacgccaaggugaagcugaucaagcaggagcuggacaaguacaagaacgccgugaccgagcugcagcugcugaugcagagcacccccgccaccaacaacagagccagaagagagcugcccagauucaugaacuacacccugaacaacgccaagaagaccaacgugacccugagcaagaagagaaagagaagauuccugggcuuccugcugggcgugggcagcgccaucgccagcggcguggccgugagcaaggugcugcaccuggagggcgaggugaacaagaucaagagcgcccugcugagcaccaacaaggccguggugagccugagcaacggcgugagcgugcugaccagcaaggugcuggaccugaagaacuacaucgacaagcagcugcugcccaucgugaacaagcagagcugcagcaucagcaacaucgagaccgugaucgaguuccagcagaagaacaacagacugcuggagaucaccagagaguucagcgugaacgccggcgugaccacccccgugagcaccuacaugcugaccaacagcgagcugcugagccugaucaacgacaugcccaucaccaacgaccagaagaagcugaugagcaacaacgugcagaucgugagacagcagagcuacagcaucaugagcaucaucaaggaggaggugcuggccuacguggugcagcugccccuguacggcgugaucgacacccccugcuggaagcugcacaccagcccccugugcaccaccaacaccaaggagggcagcaacaucugccugaccagaaccgacagaggcugguacugcgacaacgccggcagcgugagcuucuucccccaggccgagaccugcaaggugcagagcaacagaguguucugcgacaccaugaacagccugacccugcccagcgaggugaaccugugcaacguggacaucuucaaccccaaguacgacugcaagaucaugaccagcaagaccgacgugagcagcagcgugaucaccagccugggcgccaucgugagcugcuacggcaagaccaagugcaccgccagcaacaagaacagaggcaucaucaagaccuucagcaacggcugcgacuacgugagcaacaagggcguggacaccgugagcgugggcaacacccuguacuacgugaacaagcaggagggcaagagccuguacgugaagggcgagcccaucaucaacuucuacgacccccugguguuccccagcgacgaguucgacgccagcaucagccaggugaacgagaagaucaaccagagccuggccuucaucagaaagagcgacgagcugcugcacaacgugaacgccggcaagagcaccaccaacaucaugaucaccaccaucaucaucgugaucaucgugauccugcugagccugaucgccgugggccugcugcuguacugcaaggccagaagcacccccgugacccugagcaaggaccagcugagcggcaucaacaacaucgccuucagcaacugaggacuaguggaagcauuuuccuggcugauuaaaagaaauuacucagcuauggucaucuguuccuguuagaaggcuaugcagcauauuauauacuaugcgcauguuaugaaaugcauaauaaaaaauuuuaaaaaaucuaaaagaucuaaaaaaaaaaaaaaaaaaaaaaaaaaaaaaaaaaaaaaaaaaaaaaaaaaaaaaaaaaaaaaaaugcaucccccccccccccccccccccccccccccccaaaggcucuuuucagagccaccagaauu

SEQ ID NO: 183 - RNA, 2123 nt, Artificial Sequence
  mRNA product Design c-2 comprising derived and/or modified sequence from HRSV(A2)__F0 (opt5)
gggagacuccugucgggcggaaguaggaggaguagaguuuaaaaacaguacucuuuuuccgguucgggacguaguugaagcaacgacaagccggauaaccgcucuugagacaggaagcuuaccauggagcugcucauccugaaggccaacgcuauuaccacaauccuuacggccgugaccuucugcuuugcgagcggccagaauauuacagaagaguucuaccaauccaccuguucugcugucagcaaaggguaucuguccgcccucagaacaggaugguacaccucuguuaucacaauugaacugagcaacaucaaggagaauaaaugcaacggcaccgacgccaaggugaaacuuaucaagcaggaacuggauaaguauaaaaaugcugugacggagcuccagcugcugaugcaguccacccccgccacaaacaaucgggcucgcagagagcucccucgguuuaugaacuacacccugaauaacgccaagaaaacaaaugucacccuuucuaagaaacgcaagagacgguuccugggguuucuccugggagugggcagcgcgauugccuccgggguugcugugagcaagguccuucaccuggaaggagaggugaacaaaaucaagucugcccuccuguccacgaauaaagcuguugugagccugucuaacggcgucuccgugcucacaagcaaggugcuggaccuuaaaaauuauauugauaagcaacugcucccgaucgucaacaaacagucuuguuccauuagcaacaucgaaaccguuauugaguuccagcagaagaauaaccgccugcuugagaucacaagagaauuuuccgugaaugccggcgugaccacccccgucucuacauacaugcugacgaacagcgagcuccugucccugaucaaugacaugccuauuaccaacgaucaaaagaaacucaugagcaauaacgugcagaucguucggcagcagucuuauuccauuaugagcaucauuaaggaagaggugcuggcguacgucgugcaacuuccccuguacgggguuaucgacacaccuugcuggaaacuccauaccucuccccuguguacaaccaauacgaaggaaggaagcaacaucugccuuacacgcaccgauagaggcugguauugugacaaugccggguccgugucuuucuuuccucaggcugagaccugcaaaguccagagcaaccggguguucugugauacaaugaacucccugacccucccgagcgaggucaaucugugcaauguggacauuuuuaaccccaaguacgauuguaagaucaugacaucuaaaacggacguuuccagcucugugauuaccucccugggagccaucgucagcugcuauggcaagacaaaaugcaccgcuuccaacaagaaucgcgggauuaucaaaacauucucuaacggaugugauuacgugagcaauaagggcguugacaccguguccgucggcaacacgcucuauuacgugaauaagcaagaagggaaaucucuguaugugaagggagagccuaucauuaacuuuuacgacccccuuguuuucccuagcgaugaauuugacgccuccaucagccaggucaaugagaaaauuaaccagucucuggccuucaucagaaaguccgaugaacuccugcacaaugugaacgcuggcaaaagcaccacaaauauuaugaucaccacaauuaucaucgugauuaucgucauucugcuuucucucaucgcgguggggcugcugcucuacugcaaggcccgguccacccccguuacgcugagcaaggaccagcuuucuggaauuaacaauaucgcuuucagcaacugaggacuaguggaagcauuuuccuggcugauuaaaagaaauuacucagcuauggucaucuguuccuguuagaaggcuaugcagcauauuauauacuaugcgcauguuaugaaaugcauaauaaaaaauuuuaaaaaaucuaaaagaucuaaaaaaaaaaaaaaaaaaaaaaaaaaaaaaaaaaaaaaaaaaaaaaaaaaaaaaaaaaaaaaaaugcaucccccccccccccccccccccccccccccccaaaggcucuuuucagagccaccagaauu

SEQ ID NO: 184 - RNA, 2123 nt, Artificial Sequence
  mRNA product Design c-2 comprising derived and/or modified sequence from HRSV(A2)__F0 (opt6)
gggagacuccugucgggcggaaguaggaggaguagaguuuaaaaacaguacucuuuuuccgguucgggacguaguugaagcaacgacaagccggauaaccgcucuugagacaggaagcuuaccauggaacuucuaauauuaaaagcuaacgcaaucacuacuaucuuaaccgcaguaacauucuguuuugcauccggccaaaacauaacagaagaauuuuaccaaucaacuugcucugcagucucaaaagguuaucuaucugcauuaagaacaggcugguacaccucaguaauaacgaucgaacuaucaaacaucaaagaaaacaaauguaauggaacagacgcaaaaguaaaacuaaucaaacaagaacuagacaaauacaaaaacgcaguaaccgaacuccaacuccucaugcaaaguacaccagcaacaaauaacagagcaagacgugaacuaccacguuuuaugaauuacacgcucaauaacgcaaaaaaaacaaauguuacccuaucaaaaaaacgaaaaagaagauuccucggauuccuacuaggcguaggcucagcaauagcuucaggaguagcaguaucaaaaguacuccaccucgaaggagaaguaaacaaaaucaaaagcgcucuccucucaacaaacaaagcaguuguuucacucucaaacggaguaucaguacuaaccucaaaaguacuugaccuaaaaaauuauauagacaaacaacuauuaccaauaguaaacaaacaaagcugcuccaucuccaacaucgagacagucauagaauuucaacaaaaaaauaaccgccuauuagaaauaaccagagaauuuucaguaaacgcaggaguaacuaccccaguaucaacauauauguuaacaaacucagaacuccuaagucuaaucaacgacaugccaauaaccaacgaccaaaaaaaacuaaugagcaacaauguacaaauaguucgucaacaaucuuacuccauaaugucuauaauaaaagaagaaguacucgccuauguaguccaacuaccacuauacggagucaucgauacaccaugcuggaaacuccacacauccccacucuguacuacuaacaccaaagaagguucaaauauaugccuaaccagaacagauagagguugguacugcgauaaugcaggaucaguauccuuuuucccccaagccgaaacaugcaaaguucaauccaauagaguauuuugugauacaaugaacucuuuaacccucccauccgaagucaaucuauguaacgucgacauauuuaacccaaaauacgauugcaaaauaaugacaucaaaaacagacgucucauccucaguuauaacguccuuaggcgcuauaguaucaugcuacggcaaaacaaaauguacagcaucaaacaaaaacagaggaaucauaaaaacuuucucuaacgguugcgacuauguauccaacaaaggugucgacacaguauccguaggcaacacccuuuacuauguuaauaaacaagaaggaaaaucucuauauguaaaaggcgaaccaauuauaaauuuuuacgacccccuugucuuucccucugacgaauuugacgcuuccauaucacaagucaacgaaaaaaucaaccaaucccucgcauucauacgcaaaucagacgaacuacuacauaacgucaacgcaggcaaauccacaacaaacauaaugauaaccacaaucauaauuguaauaauaguaauacuacuuucucuaauagcagucggauuacucuuauacuguaaagcucgaucaacaccagucacccucucuaaagaucaacuauccggaaucaacaacauagcuuucucaaacuaaggacuaguggaagcauuuuccuggcugauuaaaagaaauuacucagcuauggucaucuguuccuguuagaaggcuaugcagcauauuauauacuaugcgcauguuaugaaaugcauaauaaaaaauuuuaaaaaaucuaaaagaucuaaaaaaaaaaaaaaaaaaaaaaaaaaaaaaaaaaaaaaaaaaaaaaaaaaaaaaaaaaaaaaaaugcaucccccccccccccccccccccccccccccccaaaggcucuuuucagagccaccagaauu

SEQ ID NO: 185 - RNA, 2123 nt, Artificial Sequence
  mRNA product Design c-2 comprising derived and/or modified sequence from HRSV(A2)__F0 (opt11)
gggagacuccugucgggcggaaguaggaggaguagaguuuaaaaacaguacucuuuuuccgguucgggacguaguugaagcaacgacaagccggauaaccgcucuugagacaggaagcuuaccauggaacuccucauacucaaagccaacgcaaucacaaccauacucaccgccgucaccuucugcuuugcaucuggccagaacaucacugaagaguucuaccaauccacaugcuccgccguaagcaaaggcuaccuauccgcccuacgcaccggcugguacaccagcguaaucaccauagaacucuccaauauaaaagaaaacaaaugcaacggcaccgacgcaaaagucaagcuaauaaaacaagaacucgacaaauacaaaaacgccguuaccgaacuccagcuacucaugcaaucgaccccagcaaccaacaaccgugcgagacgcgaacucccccgcuucaugaacuacacccuaaacaacgccaaaaagaccaacguaacucuauccaagaaacgcaaacgccgcuuccucggauuccuccucggcgucggcuccgcaaucgccagcggcgucgccguuagcaaaguccuucaccucgaaggagaaguaaacaaaauuaaaagcgcccucuuauccacaaacaaggccguaguaucccugucaaacggcgucuccguccuuacauccaaaguccucgaccucaagaacuacauagacaaacagcuacuacccauuguaaauaaacaaagcugcucaauuagcaacaucgaaaccguaaucgaguuccagcagaaaaacaacagacuucucgaaaucacccgcgaguucagcgucaacgccggcguaaccaccccugucucaacauacaugcuaaccaacagcgaacugcucucccucaucaacgacaugcccaucaccaacgaccaaaagaaacucaugagcaacaacguacaaaucgugcgccaacaguccuacucaauaaugucaaucaucaaagaagaagugcuagcauacgucguacaacuaccacucuacggcguaauagauacccccugcuggaagcuccauaccuccccacucuguaccaccaacaccaaagaaggcucaaacaucugccuaacgcgcacagaccguggaugguacugugacaacgccggcuccgucuccuucuucccucaagccgaaacaugcaaaguccaauccaacagagucuucugcgauaccaugaacucccugacacucccaagcgaagucaaccuuugcaacgucgauaucuuuaaccccaaauacgacugcaagaucaugacaucaaaaaccgacguauccuccucuguaauaaccucccuaggcgcaaucguaucaugcuacggcaaaaccaaauguaccgccuccaacaaaaaucgcggcaucaucaaaaccuucucgaacggcugcgacuacgucuccaacaaaggcguagacacaguuuccguaggcaacacccucuacuacgucaauaaacaggaaggcaagucccucuacgucaaaggcgaacccaucaucaauuucuacgacccccucguuuuccccuccgaugaguucgacgcaagcaucagccaggucaacgaaaagauaaaccagucccucgccuucauccgcaaaucagaugaacuccuucacaacguuaacgcaggcaagagcaccaccaacaucaugaucacaacuauaaucaucgucauaaucgucauccuacucucacuaaucgccgucggucuccuacuauauuguaaagcccgaucaacaccggucacacucuccaaagaccaacucuccggaaucaacaauaucgcuuucucgaacuaaggacuaguggaagcauuuuccuggcugauuaaaagaaauuacucagcuauggucaucuguuccuguuagaaggcuaugcagcauauuauauacuaugcgcauguuaugaaaugcauaauaaaaaauuuuaaaaaaucuaaaagaucuaaaaaaaaaaaaaaaaaaaaaaaaaaaaaaaaaaaaaaaaaaaaaaaaaaaaaaaaaaaaaaaaugcaucccccccccccccccccccccccccccccccaaaggcucuuuucagagccaccagaauu

SEQ ID NO: 186 - RNA, 2100 nt, Artificial Sequence
  mRNA product Design c-3 comprising derived and/or modified sequence from HRSV(A2)__F0 (artificial)
gggagaguccgcucagccagguugcagaagcggcuuagcguguguccuaaucuucucucugcguguagguaggccugugccgcaaacaagcuuaccauggaguugcuaauccucaaagcaaaugcaauuaccacaauccucacugcagucacauuuuguuuugcuucuggucaaaacaucacugaagaauuuuaucaaucaacaugcagugcaguuagcaaaggcuaucuuagugcucugagaacugguugguauaccaguguuauaacuauagaauuaaguaauaucaaggaaaauaaguguaauggaacagaugcuaagguaaaauugauaaaacaagaauuagauaaauauaaaaaugcuguaacagaauugcaguugcucaugcaaagcacaccagcaacaaacaaucgagccagaagagaacuaccaagguuuaugaauuauacacucaacaaugccaaaaaaaccaauguaacauuaagcaagaaaaggaaaagaagauuucuugguuuuuuguuagguguuggaucugcaaucgccaguggcguugcuguaucuaagguccugcaccuagaaggggaagugaacaagaucaaaagugcucuacuauccacaaacaaggcuguagucagcuuaucaaauggaguuagugucuuaaccagcaaaguguuagaccucaaaaacuauauagauaaacaauuguuaccuauugugaacaagcaaagcugcagcauaucaaauauagaaacugugauagaguuccaacaaaagaacaacagacuacuagagauuaccagggaauuuaguguuaaugcagguguaacuacaccuguaagcacuuacauguuaacuaauagugaauuauugucauuaaucaaugauaugccuauaacaaaugaucagaaaaaguuaauguccaacaauguucaaauaguuagacagcaaaguuacucuaucauguccauaauaaaagaggaagucuuagcauauguaguacaauuaccacuauaugguguuauagauacacccuguuggaaacuacacacauccccucuauguacaaccaacacaaaagaaggguccaacaucuguuuaacaagaacugacagaggaugguacugugacaaugcaggaucaguaucuuucuucccacaagcugaaacauguaaaguucaaucaaaucgaguauuuugugacacaaugaacaguuuaacauuaccaagugaaguaaaucucugcaauguugacauauucaaccccaaauaugauuguaaaauuaugacuucaaaaacagauguaagcagcuccguuaucacaucucuaggagccauugugucaugcuauggcaaaacuaaauguacagcauccaauaaaaaucguggaaucauaaagacauuuucuaacgggugcgauuauguaucaaauaaagggguggacacugugucuguagguaacacauuauauuauguaaauaagcaagaagguaaaagucucuauguaaaaggugaaccaauaauaaauuucuaugacccauuaguauuccccucugaugaauuugaugcaucaauaucucaagucaacgagaagauuaaccagagccuagcauuuauucguaaauccgaugaauuauuacauaauguaaaugcugguaaauccaccacaaauaucaugauaacuacuauaauuauagugauuauaguaauauuguuaucauuaauugcuguuggacugcucuuauacuguaaggccagaagcacaccagucacacuaagcaaagaucaacugagugguauaaauaauauugcauuuaguaacuaaggacuaguacuggcugcaucucccuuuccucuguccuccauccuucucccaggauggugaagggggaccugguacccagugauccccaccccaggauccuaaaucaugacuuaccugcuaauaaaaacucauuggaaaagugagaagaucuaaaaaaaaaaaaaaaaaaaaaaaaaaaaaaaaaaaaaaaaaaaaaaaaaaaaaaaaaaaaaaaaugcaucccccccccccccccccccccccccccccccaaaggcucuuuucagagccaccagaauu

SEQ ID NO: 187 - RNA, 2100 nt, Artificial Sequence
  mRNA product Design c-3 comprising derived and/or modified sequence from HRSV(A2)__F0 (opt1)
gggagaguccgcucagccagguugcagaagcggcuuagcguguguccuaaucuucucucugcguguagguaggccugugccgcaaacaagcuuaccauggagcugcucauccugaaggccaacgccaucaccaccauccugacggcggugaccuucugcuucgccagcggccagaacaucaccgaggaguucuaccaguccaccugcagcgccgucuccaagggguaccucagcgcccugcggacgggcugguacaccuccgugaucaccaucgagcugagcaacaucaaggagaacaagugcaacgggaccgacgccaaggugaagcucaucaagcaggagcuggacaaguacaagaacgcggucacggagcugcagcuccugaugcaguccaccccggcaaccaacaaccgcgcccggcgcgagcugccccgguucaugaacuacacccucaacaacgccaagaagacgaacgugacccugagcaagaagcgcaagcggcgcuuccugggcuuccuccugggggugggcuccgccaucgcgagcggcgucgccguguccaaggugcugcaccucgagggggaggucaacaagaucaagagcgcccugcuguccaccaacaaggccguggugagccucuccaacggcgucagcgugcugaccuccaaggugcuggaccucaagaacuacaucgacaagcagcugcugcccaucgucaacaagcagagcugcuccaucagcaacaucgagacggugaucgaguuccagcagaagaacaaccggcuccuggagaucacccgcgaguucagcgugaacgccggggucaccacccccguguccacguacaugcugaccaacagcgagcuccugucccugaucaacgacaugccgaucaccaacgaccagaagaagcucaugagcaacaacgugcagaucguccggcagcaguccuacagcaucauguccaucaucaaggaggaggugcuggcguacgugguccagcugccccucuacggcgugaucgacacccccugcuggaagcugcacacgagcccccugugcaccaccaacaccaaggagggguccaacaucugccucacgcgcaccgaccggggcugguacugcgacaacgccggcagcgucuccuucuucccgcaggccgagaccugcaaggugcagagcaaccgcguguucugcgacaccaugaacucccugacgcugcccagcgagguaaaccucugcaacgucgacaucuucaaccccaaguacgacugcaagaucaugaccuccaagaccgacgugagcuccagcgugaucaccucccugggggccaucgucagcugcuacggcaagacgaagugcaccgccagcaacaagaaccgggggaucaucaagaccuucuccaacggcugcgacuacgugagcaacaagggcguggacaccguguccgucgggaacacccuguacuacgugaacaagcaggagggcaagagccucuacgugaagggggagcccaucaucaacuucuacgacccgcuggucuuccccuccgacgaguucgacgcgagcaucucccaggugaacgagaagaucaaccagagccuggccuucauccgcaaguccgacgagcugcuccacaacgugaacgccggcaagagcacgaccaacaucaugaucaccaccaucaucaucgucaucaucgugauccugcugucccucaucgccguggggcugcugcucuacugcaaggcccggagcacgcccgucacccuguccaaggaccagcugagcggcaucaacaacaucgcguucuccaacugaggacuaguacuggcugcaucucccuuuccucuguccuccauccuucucccaggauggugaagggggaccugguacccagugauccccaccccaggauccuaaaucaugacuuaccugcuaauaaaaacucauuggaaaagugagaagaucuaaaaaaaaaaaaaaaaaaaaaaaaaaaaaaaaaaaaaaaaaaaaaaaaaaaaaaaaaaaaaaaaugcaucccccccccccccccccccccccccccccccaaaggcucuuuucagagccaccagaauu

SEQ ID NO: 188 - RNA, 2100 nt, Artificial Sequence
  mRNA product Design c-3 comprising derived and/or modified sequence from HRSV(A2)__F0 (opt1)
gggagaguccgcucagccagguugcagaagcggcuuagcguguguccuaaucuucucucugcguguagguaggccugugccgcaaacaagcuuaccauggagcugcucauccugaaggccaacgccaucaccaccauccugacggcggugaccuucugcuucgccagcggccagaacaucaccgaggaguucuaccaguccacgugcagcgccgucuccaagggguaccucagcgcccugcgcaccggcugguacaccuccgugaucaccaucgagcugagcaacaucaaggagaacaagugcaacgggaccgacgccaaggugaagcucaucaagcaggagcuggacaaguacaagaacgcggucacggagcugcagcuccugaugcaguccacccccgccaccaacaaccgggcccgccgggagcugccgcgcuucaugaacuacacccucaacaacgccaagaagacgaacgugacccugagcaagaagcggaagcgccgguuccugggcuuccuccugggggugggcuccgcgaucgccagcggcgucgccguguccaaggugcugcaccucgagggggaggucaacaagaucaagagcgcccugcuguccaccaacaaggccguggugagccucuccaacggcgucagcgugcugaccuccaaggugcuggaccucaagaacuacaucgacaagcagcugcugcccaucgucaacaagcagagcugcuccaucagcaacaucgagacggugaucgaguuccagcagaagaacaaccgccuccuggagaucacccgggaguucagcgugaacgcgggggucaccacccccguguccacguacaugcugaccaacagcgagcuccugucccugaucaacgacaugcccaucaccaacgaccagaagaagcucaugagcaacaacgugcagaucguccgccagcaguccuacagcaucauguccaucaucaaggaggaggugcuggccuacgugguccagcugccgcucuacggcgugaucgacacccccugcuggaagcugcacacgagcccccugugcaccaccaacaccaaggagggguccaacaucugccucacgcggaccgaccgcggcugguacugcgacaacgccggcagcgucuccuucuucccccaggccgagaccugcaaggugcagagcaaccggguguucugcgacaccaugaacucccugacgcugccgagcgaggucaaccucugcaacguggacaucuucaaccccaaguacgacugcaagaucaugaccuccaagaccgacgugagcuccagcgucaucaccucccugggggccaucgugagcugcuacggcaagacgaagugcaccgcgagcaacaagaaccgcgggaucaucaagaccuucuccaacggcugcgacuacgugagcaacaagggcgucgacaccguguccguggggaacacccuguacuacgucaacaagcaggagggcaagagccucuacgugaagggggagcccaucaucaacuucuacgacccccugguguucccguccgacgaguucgacgccagcaucucccaggucaacgagaagaucaaccagagccuggccuucauccggaaguccgacgagcuccugcacaacgugaacgccggcaagagcacgaccaacaucaugaucaccaccaucaucaucgugaucaucgucauccugcugucccucaucgccguggggcugcugcucuacugcaaggcgcgcagcacgcccgugacccuguccaaggaccagcugagcggcaucaacaacaucgccuucuccaacugaggacuaguacuggcugcaucucccuuuccucuguccuccauccuucucccaggauggugaagggggaccugguacccagugauccccaccccaggauccuaaaucaugacuuaccugcuaauaaaaacucauuggaaaagugagaagaucuaaaaaaaaaaaaaaaaaaaaaaaaaaaaaaaaaaaaaaaaaaaaaaaaaaaaaaaaaaaaaaaaugcaucccccccccccccccccccccccccccccccaaaggcucuuuucagagccaccagaauu

SEQ ID NO: 189 - RNA, 2100 nt, Artificial Sequence
  mRNA product Design c-3 comprising derived and/or modified sequence from HRSV(A2)__F0 (opt2)
gggagaguccgcucagccagguugcagaagcggcuuagcguguguccuaaucuucucucugcguguagguaggccugugccgcaaacaagcuuaccauggagcuccucauccucaaggccaacgccaucaccaccauccucaccgccgucaccuucugcuucgccuccggccagaacaucaccgaggaguucuaccaguccaccugcuccgccgucuccaagggcuaccucuccgcccuccgcaccggcugguacaccuccgucaucaccaucgagcucuccaacaucaaggagaacaagugcaacggcaccgacgccaaggucaagcucaucaagcaggagcucgacaaguacaagaacgccgucaccgagcuccagcuccucaugcaguccacccccgccaccaacaaccgcgcccgccgcgagcucccccgcuucaugaacuacacccucaacaacgccaagaagaccaacgucacccucuccaagaagcgcaagcgccgcuuccucggcuuccuccucggcgucggcuccgccaucgccuccggcgucgccgucuccaagguccuccaccucgagggcgaggucaacaagaucaaguccgcccuccucuccaccaacaaggccgucgucucccucuccaacggcgucuccguccucaccuccaagguccucgaccucaagaacuacaucgacaagcagcuccuccccaucgucaacaagcaguccugcuccaucuccaacaucgagaccgucaucgaguuccagcagaagaacaaccgccuccucgagaucacccgcgaguucuccgucaacgccggcgucaccacccccgucuccaccuacaugcucaccaacuccgagcuccucucccucaucaacgacaugcccaucaccaacgaccagaagaagcucauguccaacaacguccagaucguccgccagcaguccuacuccaucauguccaucaucaaggaggagguccucgccuacgucguccagcucccccucuacggcgucaucgacacccccugcuggaagcuccacaccuccccccucugcaccaccaacaccaaggagggcuccaacaucugccucacccgcaccgaccgcggcugguacugcgacaacgccggcuccgucuccuucuucccccaggccgagaccugcaagguccaguccaaccgcgucuucugcgacaccaugaacucccucacccuccccuccgaggucaaccucugcaacgucgacaucuucaaccccaaguacgacugcaagaucaugaccuccaagaccgacgucuccuccuccgucaucaccucccucggcgccaucgucuccugcuacggcaagaccaagugcaccgccuccaacaagaaccgcggcaucaucaagaccuucuccaacggcugcgacuacgucuccaacaagggcgucgacaccgucuccgucggcaacacccucuacuacgucaacaagcaggagggcaagucccucuacgucaagggcgagcccaucaucaacuucuacgacccccucgucuuccccuccgacgaguucgacgccuccaucucccaggucaacgagaagaucaaccagucccucgccuucauccgcaaguccgacgagcuccuccacaacgucaacgccggcaaguccaccaccaacaucaugaucaccaccaucaucaucgucaucaucgucauccuccucucccucaucgccgucggccuccuccucuacugcaaggcccgcuccacccccgucacccucuccaaggaccagcucuccggcaucaacaacaucgccuucuccaacugaggacuaguacuggcugcaucucccuuuccucuguccuccauccuucucccaggauggugaagggggaccugguacccagugauccccaccccaggauccuaaaucaugacuuaccugcuaauaaaaacucauuggaaaagugagaagaucuaaaaaaaaaaaaaaaaaaaaaaaaaaaaaaaaaaaaaaaaaaaaaaaaaaaaaaaaaaaaaaaaugcaucccccccccccccccccccccccccccccccaaaggcucuuuucagagccaccagaauu

SEQ ID NO: 190 - RNA, 2100 nt, Artificial Sequence
  mRNA product Design c-3 comprising derived and/or modified sequence from HRSV(A2)__F0 (opt3)
gggagaguccgcucagccagguugcagaagcggcuuagcguguguccuaaucuucucucugcguguagguaggccugugccgcaaacaagcuuaccauggagcugcucauccuuaaggccaacgcuauuaccacaauacugacugcagugacguucugcuuugccagcggccagaauaucaccgaagaguucuaccaauccacauguucugcggucucaaaaggguauuugagugcuuuaagaacuggaugguacaccagcguuauuacaaucgaacuguccaacauuaaggagaauaaaugcaacgguaccgacgccaaggugaaacuaaucaagcaggaacucgauaaguauaaaaaugcaguaacugagcugcagcuucugaugcagucuacacccgccaccaacaauagggcucggcgcgaguugccucgauuuaugaacuacacgcucaauaacgcaaagaaaacuaaugugacccugucgaagaaacguaagagaagguuccugggcuuucucuuaggggucggaucagccauagcuagcggcguggccguuaguaaggugcugcaccuugaaggugaggucaacaaaaucaaguccgcguugcugucuacaaauaaagcagugguaagccuauccaacgggguuucagugcucacuucuaagguccuggaccuuaaaaauuauauugauaagcaacuguugccaaucgugaacaaacagagcuguucuauuuccaacaucgaaaccgugauagaguuccagcagaagaauaaccggcuccuggagauuacacgcgaauuuucagucaaugccggaguuaccacgccggugagcacuuacauguuaacaaacagugagcugcucucucuuaucaaugacaugcccauuaccaacgaucaaaagaaacugauguccaauaacguacagaucgugagacagcagagcuauucgaucaugucuauuauaaaggaagaggucuuggcuuacgugguucaacuaccucuguacggcgugaucgacacuccaugcuggaaacuccauacauccccacuguguaccacgaauaccaaggaaggcucaaacauuugccuuacaaggacugaucgggggugguauugugacaaugccggaagugucagcuucuuuccucaggcagagaccugcaaagugcaguccaaccgcguauucugugauacaaugaauagucugacuuugccaagcgagguuaaccucugcaauguggacaucuuuaaccccaaguacgauuguaagauaaugaccucaaaaacagacgucaguuccagcgugauuaccucucugggugcuaucgucucaugcuauggcaagacuaaaugcacggccaguaacaagaaucgagggaucauuaaaacauucagcaacggaugugauuacguguccaauaagggcguugacaccgugucuguagguaacacuuuauauuacgucaauaagcaagaagggaaaucgcuguaugugaagggagagccuaucauuaacuuuuacgacccccuaguuuucccgagcgaugaauuugacgcguccauaucacaggugaaugagaaaaucaaccagagucucgccuucauuagaaagucugaugaacugcuucacaaugucaacgcaggcaaaagcaccacaaauaucaugaucaccacuauuauaaucgugauuaucguaauuuugcugucccucaucgcugugggccugcuucuguacugcaaggccaggucaacacccguuacguugagcaaggaccagcucucugggauaaacaauaucgcuuucuccaacugaggacuaguacuggcugcaucucccuuuccucuguccuccauccuucucccaggauggugaagggggaccugguacccagugauccccaccccaggauccuaaaucaugacuuaccugcuaauaaaaacucauuggaaaagugagaagaucuaaaaaaaaaaaaaaaaaaaaaaaaaaaaaaaaaaaaaaaaaaaaaaaaaaaaaaaaaaaaaaaaugcaucccccccccccccccccccccccccccccccaaaggcucuuuucagagccaccagaauu

SEQ ID NO: 191 - RNA, 2100 nt, Artificial Sequence
  mRNA product Design c-3 comprising derived and/or modified sequence from HRSV(A2)__F0 (opt4)
gggagaguccgcucagccagguugcagaagcggcuuagcguguguccuaaucuucucucugcguguagguaggccugugccgcaaacaagcuuaccauggagcugcugauccugaaggccaacgccaucaccaccauccugaccgccgugaccuucugcuucgccagcggccagaacaucaccgaggaguucuaccagagcaccugcagcgccgugagcaagggcuaccugagcgcccugagaaccggcugguacaccagcgugaucaccaucgagcugagcaacaucaaggagaacaagugcaacggcaccgacgccaaggugaagcugaucaagcaggagcuggacaaguacaagaacgccgugaccgagcugcagcugcugaugcagagcacccccgccaccaacaacagagccagaagagagcugcccagauucaugaacuacacccugaacaacgccaagaagaccaacgugacccugagcaagaagagaaagagaagauuccugggcuuccugcugggcgugggcagcgccaucgccagcggcguggccgugagcaaggugcugcaccuggagggcgaggugaacaagaucaagagcgcccugcugagcaccaacaaggccguggugagccugagcaacggcgugagcgugcugaccagcaaggugcuggaccugaagaacuacaucgacaagcagcugcugcccaucgugaacaagcagagcugcagcaucagcaacaucgagaccgugaucgaguuccagcagaagaacaacagacugcuggagaucaccagagaguucagcgugaacgccggcgugaccacccccgugagcaccuacaugcugaccaacagcgagcugcugagccugaucaacgacaugcccaucaccaacgaccagaagaagcugaugagcaacaacgugcagaucgugagacagcagagcuacagcaucaugagcaucaucaaggaggaggugcuggccuacguggugcagcugccccuguacggcgugaucgacacccccugcuggaagcugcacaccagcccccugugcaccaccaacaccaaggagggcagcaacaucugccugaccagaaccgacagaggcugguacugcgacaacgccggcagcgugagcuucuucccccaggccgagaccugcaaggugcagagcaacagaguguucugcgacaccaugaacagccugacccugcccagcgaggugaaccugugcaacguggacaucuucaaccccaaguacgacugcaagaucaugaccagcaagaccgacgugagcagcagcgugaucaccagccugggcgccaucgugagcugcuacggcaagaccaagugcaccgccagcaacaagaacagaggcaucaucaagaccuucagcaacggcugcgacuacgugagcaacaagggcguggacaccgugagcgugggcaacacccuguacuacgugaacaagcaggagggcaagagccuguacgugaagggcgagcccaucaucaacuucuacgacccccugguguuccccagcgacgaguucgacgccagcaucagccaggugaacgagaagaucaaccagagccuggccuucaucagaaagagcgacgagcugcugcacaacgugaacgccggcaagagcaccaccaacaucaugaucaccaccaucaucaucgugaucaucgugauccugcugagccugaucgccgugggccugcugcuguacugcaaggccagaagcacccccgugacccugagcaaggaccagcugagcggcaucaacaacaucgccuucagcaacugaggacuaguacuggcugcaucucccuuuccucuguccuccauccuucucccaggauggugaagggggaccugguacccagugauccccaccccaggauccuaaaucaugacuuaccugcuaauaaaaacucauuggaaaagugagaagaucuaaaaaaaaaaaaaaaaaaaaaaaaaaaaaaaaaaaaaaaaaaaaaaaaaaaaaaaaaaaaaaaaugcaucccccccccccccccccccccccccccccccaaaggcucuuuucagagccaccagaauu

SEQ ID NO: 192 - RNA, 2100 nt, Artificial Sequence
  mRNA product Design c-3 comprising derived and/or modified sequence from HRSV(A2)__F0 (opt5)
gggagaguccgcucagccagguugcagaagcggcuuagcguguguccuaaucuucucucugcguguagguaggccugugccgcaaacaagcuuaccauggagcugcucauccugaaggccaacgcuauuaccacaauccuuacggccgugaccuucugcuuugcgagcggccagaauauuacagaagaguucuaccaauccaccuguucugcugucagcaaaggguaucuguccgcccucagaacaggaugguacaccucuguuaucacaauugaacugagcaacaucaaggagaauaaaugcaacggcaccgacgccaaggugaaacuuaucaagcaggaacuggauaaguauaaaaaugcugugacggagcuccagcugcugaugcaguccacccccgccacaaacaaucgggcucgcagagagcucccucgguuuaugaacuacacccugaauaacgccaagaaaacaaaugucacccuuucuaagaaacgcaagagacgguuccugggguuucuccugggagugggcagcgcgauugccuccgggguugcugugagcaagguccuucaccuggaaggagaggugaacaaaaucaagucugcccuccuguccacgaauaaagcuguugugagccugucuaacggcgucuccgugcucacaagcaaggugcuggaccuuaaaaauuauauugauaagcaacugcucccgaucgucaacaaacagucuuguuccauuagcaacaucgaaaccguuauugaguuccagcagaagaauaaccgccugcuugagaucacaagagaauuuuccgugaaugccggcgugaccacccccgucucuacauacaugcugacgaacagcgagcuccugucccugaucaaugacaugccuauuaccaacgaucaaaagaaacucaugagcaauaacgugcagaucguucggcagcagucuuauuccauuaugagcaucauuaaggaagaggugcuggcguacgucgugcaacuuccccuguacgggguuaucgacacaccuugcuggaaacuccauaccucuccccuguguacaaccaauacgaaggaaggaagcaacaucugccuuacacgcaccgauagaggcugguauugugacaaugccggguccgugucuuucuuuccucaggcugagaccugcaaaguccagagcaaccggguguucugugauacaaugaacucccugacccucccgagcgaggucaaucugugcaauguggacauuuuuaaccccaaguacgauuguaagaucaugacaucuaaaacggacguuuccagcucugugauuaccucccugggagccaucgucagcugcuauggcaagacaaaaugcaccgcuuccaacaagaaucgcgggauuaucaaaacauucucuaacggaugugauuacgugagcaauaagggcguugacaccguguccgucggcaacacgcucuauuacgugaauaagcaagaagggaaaucucuguaugugaagggagagccuaucauuaacuuuuacgacccccuuguuuucccuagcgaugaauuugacgccuccaucagccaggucaaugagaaaauuaaccagucucuggccuucaucagaaaguccgaugaacuccugcacaaugugaacgcuggcaaaagcaccacaaauauuaugaucaccacaauuaucaucgugauuaucgucauucugcuuucucucaucgcgguggggcugcugcucuacugcaaggcccgguccacccccguuacgcugagcaaggaccagcuuucuggaauuaacaauaucgcuuucagcaacugaggacuaguacuggcugcaucucccuuuccucuguccuccauccuucucccaggauggugaagggggaccugguacccagugauccccaccccaggauccuaaaucaugacuuaccugcuaauaaaaacucauuggaaaagugagaagaucuaaaaaaaaaaaaaaaaaaaaaaaaaaaaaaaaaaaaaaaaaaaaaaaaaaaaaaaaaaaaaaaaugcaucccccccccccccccccccccccccccccccaaaggcucuuuucagagccaccagaauu

SEQ ID NO: 193 - RNA, 2100 nt, Artificial Sequence
  mRNA product Design c-3 comprising derived and/or modified sequence from HRSV(A2)__F0 (opt6)
gggagaguccgcucagccagguugcagaagcggcuuagcguguguccuaaucuucucucugcguguagguaggccugugccgcaaacaagcuuaccauggaacuucuaauauuaaaagcuaacgcaaucacuacuaucuuaaccgcaguaacauucuguuuugcauccggccaaaacauaacagaagaauuuuaccaaucaacuugcucugcagucucaaaagguuaucuaucugcauuaagaacaggcugguacaccucaguaauaacgaucgaacuaucaaacaucaaagaaaacaaauguaauggaacagacgcaaaaguaaaacuaaucaaacaagaacuagacaaauacaaaaacgcaguaaccgaacuccaacuccucaugcaaaguacaccagcaacaaauaacagagcaagacgugaacuaccacguuuuaugaauuacacgcucaauaacgcaaaaaaaacaaauguuacccuaucaaaaaaacgaaaaagaagauuccucggauuccuacuaggcguaggcucagcaauagcuucaggaguagcaguaucaaaaguacuccaccucgaaggagaaguaaacaaaaucaaaagcgcucuccucucaacaaacaaagcaguuguuucacucucaaacggaguaucaguacuaaccucaaaaguacuugaccuaaaaaauuauauagacaaacaacuauuaccaauaguaaacaaacaaagcugcuccaucuccaacaucgagacagucauagaauuucaacaaaaaaauaaccgccuauuagaaauaaccagagaauuuucaguaaacgcaggaguaacuaccccaguaucaacauauauguuaacaaacucagaacuccuaagucuaaucaacgacaugccaauaaccaacgaccaaaaaaaacuaaugagcaacaauguacaaauaguucgucaacaaucuuacuccauaaugucuauaauaaaagaagaaguacucgccuauguaguccaacuaccacuauacggagucaucgauacaccaugcuggaaacuccacacauccccacucuguacuacuaacaccaaagaagguucaaauauaugccuaaccagaacagauagagguugguacugcgauaaugcaggaucaguauccuuuuucccccaagccgaaacaugcaaaguucaauccaauagaguauuuugugauacaaugaacucuuuaacccucccauccgaagucaaucuauguaacgucgacauauuuaacccaaaauacgauugcaaaauaaugacaucaaaaacagacgucucauccucaguuauaacguccuuaggcgcuauaguaucaugcuacggcaaaacaaaauguacagcaucaaacaaaaacagaggaaucauaaaaacuuucucuaacgguugcgacuauguauccaacaaaggugucgacacaguauccguaggcaacacccuuuacuauguuaauaaacaagaaggaaaaucucuauauguaaaaggcgaaccaauuauaaauuuuuacgacccccuugucuuucccucugacgaauuugacgcuuccauaucacaagucaacgaaaaaaucaaccaaucccucgcauucauacgcaaaucagacgaacuacuacauaacgucaacgcaggcaaauccacaacaaacauaaugauaaccacaaucauaauuguaauaauaguaauacuacuuucucuaauagcagucggauuacucuuauacuguaaagcucgaucaacaccagucacccucucuaaagaucaacuauccggaaucaacaacauagcuuucucaaacuaaggacuaguacuggcugcaucucccuuuccucuguccuccauccuucucccaggauggugaagggggaccugguacccagugauccccaccccaggauccuaaaucaugacuuaccugcuaauaaaaacucauuggaaaagugagaagaucuaaaaaaaaaaaaaaaaaaaaaaaaaaaaaaaaaaaaaaaaaaaaaaaaaaaaaaaaaaaaaaaaugcaucccccccccccccccccccccccccccccccaaaggcucuuuucagagccaccagaauu

SEQ ID NO: 194 - RNA, 2100 nt, Artificial Sequence
  mRNA product Design c-3 comprising derived and/or modified sequence from HRSV(A2)__F0 (opt11)
gggagaguccgcucagccagguugcagaagcggcuuagcguguguccuaaucuucucucugcguguagguaggccugugccgcaaacaagcuuaccauggaacuccucauacucaaagccaacgcaaucacaaccauacucaccgccgucaccuucugcuuugcaucuggccagaacaucacugaagaguucuaccaauccacaugcuccgccguaagcaaaggcuaccuauccgcccuacgcaccggcugguacaccagcguaaucaccauagaacucuccaauauaaaagaaaacaaaugcaacggcaccgacgcaaaagucaagcuaauaaaacaagaacucgacaaauacaaaaacgccguuaccgaacuccagcuacucaugcaaucgaccccagcaaccaacaaccgugcgagacgcgaacucccccgcuucaugaacuacacccuaaacaacgccaaaaagaccaacguaacucuauccaagaaacgcaaacgccgcuuccucggauuccuccucggcgucggcuccgcaaucgccagcggcgucgccguuagcaaaguccuucaccucgaaggagaaguaaacaaaauuaaaagcgcccucuuauccacaaacaaggccguaguaucccugucaaacggcgucuccguccuuacauccaaaguccucgaccucaagaacuacauagacaaacagcuacuacccauuguaaauaaacaaagcugcucaauuagcaacaucgaaaccguaaucgaguuccagcagaaaaacaacagacuucucgaaaucacccgcgaguucagcgucaacgccggcguaaccaccccugucucaacauacaugcuaaccaacagcgaacugcucucccucaucaacgacaugcccaucaccaacgaccaaaagaaacucaugagcaacaacguacaaaucgugcgccaacaguccuacucaauaaugucaaucaucaaagaagaagugcuagcauacgucguacaacuaccacucuacggcguaauagauacccccugcuggaagcuccauaccuccccacucuguaccaccaacaccaaagaaggcucaaacaucugccuaacgcgcacagaccguggaugguacugugacaacgccggcuccgucuccuucuucccucaagccgaaacaugcaaaguccaauccaacagagucuucugcgauaccaugaacucccugacacucccaagcgaagucaaccuuugcaacgucgauaucuuuaaccccaaauacgacugcaagaucaugacaucaaaaaccgacguauccuccucuguaauaaccucccuaggcgcaaucguaucaugcuacggcaaaaccaaauguaccgccuccaacaaaaaucgcggcaucaucaaaaccuucucgaacggcugcgacuacgucuccaacaaaggcguagacacaguuuccguaggcaacacccucuacuacgucaauaaacaggaaggcaagucccucuacgucaaaggcgaacccaucaucaauuucuacgacccccucguuuuccccuccgaugaguucgacgcaagcaucagccaggucaacgaaaagauaaaccagucccucgccuucauccgcaaaucagaugaacuccuucacaacguuaacgcaggcaagagcaccaccaacaucaugaucacaacuauaaucaucgucauaaucgucauccuacucucacuaaucgccgucggucuccuacuauauuguaaagcccgaucaacaccggucacacucuccaaagaccaacucuccggaaucaacaauaucgcuuucucgaacuaaggacuaguacuggcugcaucucccuuuccucuguccuccauccuucucccaggauggugaagggggaccugguacccagugauccccaccccaggauccuaaaucaugacuuaccugcuaauaaaaacucauuggaaaagugagaagaucuaaaaaaaaaaaaaaaaaaaaaaaaaaaaaaaaaaaaaaaaaaaaaaaaaaaaaaaaaaaaaaaaugcaucccccccccccccccccccccccccccccccaaaggcucuuuucagagccaccagaauu

SEQ ID NO: 195 - RNA, 2096 nt, Artificial Sequence
  mRNA product Design c-4 comprising derived and/or modified sequence from HRSV(A2)__F0 (artificial)
gggagaguccgcucagccagguugcagaagcggcuuagcguguguccuaaucuucucucugcguguagguaggccugugccgcaaacaagcuuaccauggaguugcuaauccucaaagcaaaugcaauuaccacaauccucacugcagucacauuuuguuuugcuucuggucaaaacaucacugaagaauuuuaucaaucaacaugcagugcaguuagcaaaggcuaucuuagugcucugagaacugguugguauaccaguguuauaacuauagaauuaaguaauaucaaggaaaauaaguguaauggaacagaugcuaagguaaaauugauaaaacaagaauuagauaaauauaaaaaugcuguaacagaauugcaguugcucaugcaaagcacaccagcaacaaacaaucgagccagaagagaacuaccaagguuuaugaauuauacacucaacaaugccaaaaaaaccaauguaacauuaagcaagaaaaggaaaagaagauuucuugguuuuuuguuagguguuggaucugcaaucgccaguggcguugcuguaucuaagguccugcaccuagaaggggaagugaacaagaucaaaagugcucuacuauccacaaacaaggcuguagucagcuuaucaaauggaguuagugucuuaaccagcaaaguguuagaccucaaaaacuauauagauaaacaauuguuaccuauugugaacaagcaaagcugcagcauaucaaauauagaaacugugauagaguuccaacaaaagaacaacagacuacuagagauuaccagggaauuuaguguuaaugcagguguaacuacaccuguaagcacuuacauguuaacuaauagugaauuauugucauuaaucaaugauaugccuauaacaaaugaucagaaaaaguuaauguccaacaauguucaaauaguuagacagcaaaguuacucuaucauguccauaauaaaagaggaagucuuagcauauguaguacaauuaccacuauaugguguuauagauacacccuguuggaaacuacacacauccccucuauguacaaccaacacaaaagaaggguccaacaucuguuuaacaagaacugacagaggaugguacugugacaaugcaggaucaguaucuuucuucccacaagcugaaacauguaaaguucaaucaaaucgaguauuuugugacacaaugaacaguuuaacauuaccaagugaaguaaaucucugcaauguugacauauucaaccccaaauaugauuguaaaauuaugacuucaaaaacagauguaagcagcuccguuaucacaucucuaggagccauugugucaugcuauggcaaaacuaaauguacagcauccaauaaaaaucguggaaucauaaagacauuuucuaacgggugcgauuauguaucaaauaaagggguggacacugugucuguagguaacacauuauauuauguaaauaagcaagaagguaaaagucucuauguaaaaggugaaccaauaauaaauuucuaugacccauuaguauuccccucugaugaauuugaugcaucaauaucucaagucaacgagaagauuaaccagagccuagcauuuauucguaaauccgaugaauuauuacauaauguaaaugcugguaaauccaccacaaauaucaugauaacuacuauaauuauagugauuauaguaauauuguuaucauuaauugcuguuggacugcucuuauacuguaaggccagaagcacaccagucacacuaagcaaagaucaacugagugguauaaauaauauugcauuuaguaacuaaggacuaguggaagcauuuuccuggcugauuaaaagaaauuacucagcuauggucaucuguuccuguuagaaggcuaugcagcauauuauauacuaugcgcauguuaugaaaugcauaauaaaaaauuuuaaaaaaucuaaaagaucuaaaaaaaaaaaaaaaaaaaaaaaaaaaaaaaaaaaaaaaaaaaaaaaaaaaaaaaaaaaaaaaaugcaucccccccccccccccccccccccccccccccaaaggcucuuuucagagccaccagaauu

SEQ ID NO: 196 - RNA, 2096 nt, Artificial Sequence
  mRNA product Design c-4 comprising derived and/or modified sequence from HRSV(A2)__F0 (opt1)
gggagaguccgcucagccagguugcagaagcggcuuagcguguguccuaaucuucucucugcguguagguaggccugugccgcaaacaagcuuaccauggagcugcucauccugaaggccaacgccaucaccaccauccugacggcggugaccuucugcuucgccagcggccagaacaucaccgaggaguucuaccaguccaccugcagcgccgucuccaagggguaccucagcgcccugcggacgggcugguacaccuccgugaucaccaucgagcugagcaacaucaaggagaacaagugcaacgggaccgacgccaaggugaagcucaucaagcaggagcuggacaaguacaagaacgcggucacggagcugcagcuccugaugcaguccaccccggcaaccaacaaccgcgcccggcgcgagcugccccgguucaugaacuacacccucaacaacgccaagaagacgaacgugacccugagcaagaagcgcaagcggcgcuuccugggcuuccuccugggggugggcuccgccaucgcgagcggcgucgccguguccaaggugcugcaccucgagggggaggucaacaagaucaagagcgcccugcuguccaccaacaaggccguggugagccucuccaacggcgucagcgugcugaccuccaaggugcuggaccucaagaacuacaucgacaagcagcugcugcccaucgucaacaagcagagcugcuccaucagcaacaucgagacggugaucgaguuccagcagaagaacaaccggcuccuggagaucacccgcgaguucagcgugaacgccggggucaccacccccguguccacguacaugcugaccaacagcgagcuccugucccugaucaacgacaugccgaucaccaacgaccagaagaagcucaugagcaacaacgugcagaucguccggcagcaguccuacagcaucauguccaucaucaaggaggaggugcuggcguacgugguccagcugccccucuacggcgugaucgacacccccugcuggaagcugcacacgagcccccugugcaccaccaacaccaaggagggguccaacaucugccucacgcgcaccgaccggggcugguacugcgacaacgccggcagcgucuccuucuucccgcaggccgagaccugcaaggugcagagcaaccgcguguucugcgacaccaugaacucccugacgcugcccagcgagguaaaccucugcaacgucgacaucuucaaccccaaguacgacugcaagaucaugaccuccaagaccgacgugagcuccagcgugaucaccucccugggggccaucgucagcugcuacggcaagacgaagugcaccgccagcaacaagaaccgggggaucaucaagaccuucuccaacggcugcgacuacgugagcaacaagggcguggacaccguguccgucgggaacacccuguacuacgugaacaagcaggagggcaagagccucuacgugaagggggagcccaucaucaacuucuacgacccgcuggucuuccccuccgacgaguucgacgcgagcaucucccaggugaacgagaagaucaaccagagccuggccuucauccgcaaguccgacgagcugcuccacaacgugaacgccggcaagagcacgaccaacaucaugaucaccaccaucaucaucgucaucaucgugauccugcugucccucaucgccguggggcugcugcucuacugcaaggcccggagcacgcccgucacccuguccaaggaccagcugagcggcaucaacaacaucgcguucuccaacugaggacuaguggaagcauuuuccuggcugauuaaaagaaauuacucagcuauggucaucuguuccuguuagaaggcuaugcagcauauuauauacuaugcgcauguuaugaaaugcauaauaaaaaauuuuaaaaaaucuaaaagaucuaaaaaaaaaaaaaaaaaaaaaaaaaaaaaaaaaaaaaaaaaaaaaaaaaaaaaaaaaaaaaaaaugcaucccccccccccccccccccccccccccccccaaaggcucuuuucagagccaccagaauu

SEQ ID NO: 197 - RNA, 2096 nt, Artificial Sequence
  mRNA product Design c-4 comprising derived and/or modified sequence from HRSV(A2)__F0 (opt1)
gggagaguccgcucagccagguugcagaagcggcuuagcguguguccuaaucuucucucugcguguagguaggccugugccgcaaacaagcuuaccauggagcugcucauccugaaggccaacgccaucaccaccauccugacggcggugaccuucugcuucgccagcggccagaacaucaccgaggaguucuaccaguccacgugcagcgccgucuccaagggguaccucagcgcccugcgcaccggcugguacaccuccgugaucaccaucgagcugagcaacaucaaggagaacaagugcaacgggaccgacgccaaggugaagcucaucaagcaggagcuggacaaguacaagaacgcggucacggagcugcagcuccugaugcaguccacccccgccaccaacaaccgggcccgccgggagcugccgcgcuucaugaacuacacccucaacaacgccaagaagacgaacgugacccugagcaagaagcggaagcgccgguuccugggcuuccuccugggggugggcuccgcgaucgccagcggcgucgccguguccaaggugcugcaccucgagggggaggucaacaagaucaagagcgcccugcuguccaccaacaaggccguggugagccucuccaacggcgucagcgugcugaccuccaaggugcuggaccucaagaacuacaucgacaagcagcugcugcccaucgucaacaagcagagcugcuccaucagcaacaucgagacggugaucgaguuccagcagaagaacaaccgccuccuggagaucacccgggaguucagcgugaacgcgggggucaccacccccguguccacguacaugcugaccaacagcgagcuccugucccugaucaacgacaugcccaucaccaacgaccagaagaagcucaugagcaacaacgugcagaucguccgccagcaguccuacagcaucauguccaucaucaaggaggaggugcuggccuacgugguccagcugccgcucuacggcgugaucgacacccccugcuggaagcugcacacgagcccccugugcaccaccaacaccaaggagggguccaacaucugccucacgcggaccgaccgcggcugguacugcgacaacgccggcagcgucuccuucuucccccaggccgagaccugcaaggugcagagcaaccggguguucugcgacaccaugaacucccugacgcugccgagcgaggucaaccucugcaacguggacaucuucaaccccaaguacgacugcaagaucaugaccuccaagaccgacgugagcuccagcgucaucaccucccugggggccaucgugagcugcuacggcaagacgaagugcaccgcgagcaacaagaaccgcgggaucaucaagaccuucuccaacggcugcgacuacgugagcaacaagggcgucgacaccguguccguggggaacacccuguacuacgucaacaagcaggagggcaagagccucuacgugaagggggagcccaucaucaacuucuacgacccccugguguucccguccgacgaguucgacgccagcaucucccaggucaacgagaagaucaaccagagccuggccuucauccggaaguccgacgagcuccugcacaacgugaacgccggcaagagcacgaccaacaucaugaucaccaccaucaucaucgugaucaucgucauccugcugucccucaucgccguggggcugcugcucuacugcaaggcgcgcagcacgcccgugacccuguccaaggaccagcugagcggcaucaacaacaucgccuucuccaacugaggacuaguggaagcauuuuccuggcugauuaaaagaaauuacucagcuauggucaucuguuccuguuagaaggcuaugcagcauauuauauacuaugcgcauguuaugaaaugcauaauaaaaaauuuuaaaaaaucuaaaagaucuaaaaaaaaaaaaaaaaaaaaaaaaaaaaaaaaaaaaaaaaaaaaaaaaaaaaaaaaaaaaaaaaugcaucccccccccccccccccccccccccccccccaaaggcucuuuucagagccaccagaauu

SEQ ID NO: 198 - RNA, 2096 nt, Artificial Sequence
  mRNA product Design c-4 comprising derived and/or modified sequence from HRSV(A2)__F0 (opt2)
gggagaguccgcucagccagguugcagaagcggcuuagcguguguccuaaucuucucucugcguguagguaggccugugccgcaaacaagcuuaccauggagcuccucauccucaaggccaacgccaucaccaccauccucaccgccgucaccuucugcuucgccuccggccagaacaucaccgaggaguucuaccaguccaccugcuccgccgucuccaagggcuaccucuccgcccuccgcaccggcugguacaccuccgucaucaccaucgagcucuccaacaucaaggagaacaagugcaacggcaccgacgccaaggucaagcucaucaagcaggagcucgacaaguacaagaacgccgucaccgagcuccagcuccucaugcaguccacccccgccaccaacaaccgcgcccgccgcgagcucccccgcuucaugaacuacacccucaacaacgccaagaagaccaacgucacccucuccaagaagcgcaagcgccgcuuccucggcuuccuccucggcgucggcuccgccaucgccuccggcgucgccgucuccaagguccuccaccucgagggcgaggucaacaagaucaaguccgcccuccucuccaccaacaaggccgucgucucccucuccaacggcgucuccguccucaccuccaagguccucgaccucaagaacuacaucgacaagcagcuccuccccaucgucaacaagcaguccugcuccaucuccaacaucgagaccgucaucgaguuccagcagaagaacaaccgccuccucgagaucacccgcgaguucuccgucaacgccggcgucaccacccccgucuccaccuacaugcucaccaacuccgagcuccucucccucaucaacgacaugcccaucaccaacgaccagaagaagcucauguccaacaacguccagaucguccgccagcaguccuacuccaucauguccaucaucaaggaggagguccucgccuacgucguccagcucccccucuacggcgucaucgacacccccugcuggaagcuccacaccuccccccucugcaccaccaacaccaaggagggcuccaacaucugccucacccgcaccgaccgcggcugguacugcgacaacgccggcuccgucuccuucuucccccaggccgagaccugcaagguccaguccaaccgcgucuucugcgacaccaugaacucccucacccuccccuccgaggucaaccucugcaacgucgacaucuucaaccccaaguacgacugcaagaucaugaccuccaagaccgacgucuccuccuccgucaucaccucccucggcgccaucgucuccugcuacggcaagaccaagugcaccgccuccaacaagaaccgcggcaucaucaagaccuucuccaacggcugcgacuacgucuccaacaagggcgucgacaccgucuccgucggcaacacccucuacuacgucaacaagcaggagggcaagucccucuacgucaagggcgagcccaucaucaacuucuacgacccccucgucuuccccuccgacgaguucgacgccuccaucucccaggucaacgagaagaucaaccagucccucgccuucauccgcaaguccgacgagcuccuccacaacgucaacgccggcaaguccaccaccaacaucaugaucaccaccaucaucaucgucaucaucgucauccuccucucccucaucgccgucggccuccuccucuacugcaaggcccgcuccacccccgucacccucuccaaggaccagcucuccggcaucaacaacaucgccuucuccaacugaggacuaguggaagcauuuuccuggcugauuaaaagaaauuacucagcuauggucaucuguuccuguuagaaggcuaugcagcauauuauauacuaugcgcauguuaugaaaugcauaauaaaaaauuuuaaaaaaucuaaaagaucuaaaaaaaaaaaaaaaaaaaaaaaaaaaaaaaaaaaaaaaaaaaaaaaaaaaaaaaaaaaaaaaaugcaucccccccccccccccccccccccccccccccaaaggcucuuuucagagccaccagaauu

SEQ ID NO: 199 - RNA, 2096 nt, Artificial Sequence
  mRNA product Design c-4 comprising derived and/or modified sequence from HRSV(A2)__F0 (opt3)
gggagaguccgcucagccagguugcagaagcggcuuagcguguguccuaaucuucucucugcguguagguaggccugugccgcaaacaagcuuaccauggagcugcucauccuuaaggccaacgcuauuaccacaauacugacugcagugacguucugcuuugccagcggccagaauaucaccgaagaguucuaccaauccacauguucugcggucucaaaaggguauuugagugcuuuaagaacuggaugguacaccagcguuauuacaaucgaacuguccaacauuaaggagaauaaaugcaacgguaccgacgccaaggugaaacuaaucaagcaggaacucgauaaguauaaaaaugcaguaacugagcugcagcuucugaugcagucuacacccgccaccaacaauagggcucggcgcgaguugccucgauuuaugaacuacacgcucaauaacgcaaagaaaacuaaugugacccugucgaagaaacguaagagaagguuccugggcuuucucuuaggggucggaucagccauagcuagcggcguggccguuaguaaggugcugcaccuugaaggugaggucaacaaaaucaaguccgcguugcugucuacaaauaaagcagugguaagccuauccaacgggguuucagugcucacuucuaagguccuggaccuuaaaaauuauauugauaagcaacuguugccaaucgugaacaaacagagcuguucuauuuccaacaucgaaaccgugauagaguuccagcagaagaauaaccggcuccuggagauuacacgcgaauuuucagucaaugccggaguuaccacgccggugagcacuuacauguuaacaaacagugagcugcucucucuuaucaaugacaugcccauuaccaacgaucaaaagaaacugauguccaauaacguacagaucgugagacagcagagcuauucgaucaugucuauuauaaaggaagaggucuuggcuuacgugguucaacuaccucuguacggcgugaucgacacuccaugcuggaaacuccauacauccccacuguguaccacgaauaccaaggaaggcucaaacauuugccuuacaaggacugaucgggggugguauugugacaaugccggaagugucagcuucuuuccucaggcagagaccugcaaagugcaguccaaccgcguauucugugauacaaugaauagucugacuuugccaagcgagguuaaccucugcaauguggacaucuuuaaccccaaguacgauuguaagauaaugaccucaaaaacagacgucaguuccagcgugauuaccucucugggugcuaucgucucaugcuauggcaagacuaaaugcacggccaguaacaagaaucgagggaucauuaaaacauucagcaacggaugugauuacguguccaauaagggcguugacaccgugucuguagguaacacuuuauauuacgucaauaagcaagaagggaaaucgcuguaugugaagggagagccuaucauuaacuuuuacgacccccuaguuuucccgagcgaugaauuugacgcguccauaucacaggugaaugagaaaaucaaccagagucucgccuucauuagaaagucugaugaacugcuucacaaugucaacgcaggcaaaagcaccacaaauaucaugaucaccacuauuauaaucgugauuaucguaauuuugcugucccucaucgcugugggccugcuucuguacugcaaggccaggucaacacccguuacguugagcaaggaccagcucucugggauaaacaauaucgcuuucuccaacugaggacuaguggaagcauuuuccuggcugauuaaaagaaauuacucagcuauggucaucuguuccuguuagaaggcuaugcagcauauuauauacuaugcgcauguuaugaaaugcauaauaaaaaauuuuaaaaaaucuaaaagaucuaaaaaaaaaaaaaaaaaaaaaaaaaaaaaaaaaaaaaaaaaaaaaaaaaaaaaaaaaaaaaaaaugcaucccccccccccccccccccccccccccccccaaaggcucuuuucagagccaccagaauu

SEQ ID NO: 200 - RNA, 2096 nt, Artificial Sequence
  mRNA product Design c-4 comprising derived and/or modified sequence from HRSV(A2)__F0 (opt4)
gggagaguccgcucagccagguugcagaagcggcuuagcguguguccuaaucuucucucugcguguagguaggccugugccgcaaacaagcuuaccauggagcugcugauccugaaggccaacgccaucaccaccauccugaccgccgugaccuucugcuucgccagcggccagaacaucaccgaggaguucuaccagagcaccugcagcgccgugagcaagggcuaccugagcgcccugagaaccggcugguacaccagcgugaucaccaucgagcugagcaacaucaaggagaacaagugcaacggcaccgacgccaaggugaagcugaucaagcaggagcuggacaaguacaagaacgccgugaccgagcugcagcugcugaugcagagcacccccgccaccaacaacagagccagaagagagcugcccagauucaugaacuacacccugaacaacgccaagaagaccaacgugacccugagcaagaagagaaagagaagauuccugggcuuccugcugggcgugggcagcgccaucgccagcggcguggccgugagcaaggugcugcaccuggagggcgaggugaacaagaucaagagcgcccugcugagcaccaacaaggccguggugagccugagcaacggcgugagcgugcugaccagcaaggugcuggaccugaagaacuacaucgacaagcagcugcugcccaucgugaacaagcagagcugcagcaucagcaacaucgagaccgugaucgaguuccagcagaagaacaacagacugcuggagaucaccagagaguucagcgugaacgccggcgugaccacccccgugagcaccuacaugcugaccaacagcgagcugcugagccugaucaacgacaugcccaucaccaacgaccagaagaagcugaugagcaacaacgugcagaucgugagacagcagagcuacagcaucaugagcaucaucaaggaggaggugcuggccuacguggugcagcugccccuguacggcgugaucgacacccccugcuggaagcugcacaccagcccccugugcaccaccaacaccaaggagggcagcaacaucugccugaccagaaccgacagaggcugguacugcgacaacgccggcagcgugagcuucuucccccaggccgagaccugcaaggugcagagcaacagaguguucugcgacaccaugaacagccugacccugcccagcgaggugaaccugugcaacguggacaucuucaaccccaaguacgacugcaagaucaugaccagcaagaccgacgugagcagcagcgugaucaccagccugggcgccaucgugagcugcuacggcaagaccaagugcaccgccagcaacaagaacagaggcaucaucaagaccuucagcaacggcugcgacuacgugagcaacaagggcguggacaccgugagcgugggcaacacccuguacuacgugaacaagcaggagggcaagagccuguacgugaagggcgagcccaucaucaacuucuacgacccccugguguuccccagcgacgaguucgacgccagcaucagccaggugaacgagaagaucaaccagagccuggccuucaucagaaagagcgacgagcugcugcacaacgugaacgccggcaagagcaccaccaacaucaugaucaccaccaucaucaucgugaucaucgugauccugcugagccugaucgccgugggccugcugcuguacugcaaggccagaagcacccccgugacccugagcaaggaccagcugagcggcaucaacaacaucgccuucagcaacugaggacuaguggaagcauuuuccuggcugauuaaaagaaauuacucagcuauggucaucuguuccuguuagaaggcuaugcagcauauuauauacuaugcgcauguuaugaaaugcauaauaaaaaauuuuaaaaaaucuaaaagaucuaaaaaaaaaaaaaaaaaaaaaaaaaaaaaaaaaaaaaaaaaaaaaaaaaaaaaaaaaaaaaaaaugcaucccccccccccccccccccccccccccccccaaaggcucuuuucagagccaccagaauu

SEQ ID NO: 201 - RNA, 2096 nt, Artificial Sequence
  mRNA product Design c-4 comprising derived and/or modified sequence from HRSV(A2)__F0 (opt5)
gggagaguccgcucagccagguugcagaagcggcuuagcguguguccuaaucuucucucugcguguagguaggccugugccgcaaacaagcuuaccauggagcugcucauccugaaggccaacgcuauuaccacaauccuuacggccgugaccuucugcuuugcgagcggccagaauauuacagaagaguucuaccaauccaccuguucugcugucagcaaaggguaucuguccgcccucagaacaggaugguacaccucuguuaucacaauugaacugagcaacaucaaggagaauaaaugcaacggcaccgacgccaaggugaaacuuaucaagcaggaacuggauaaguauaaaaaugcugugacggagcuccagcugcugaugcaguccacccccgccacaaacaaucgggcucgcagagagcucccucgguuuaugaacuacacccugaauaacgccaagaaaacaaaugucacccuuucuaagaaacgcaagagacgguuccugggguuucuccugggagugggcagcgcgauugccuccgggguugcugugagcaagguccuucaccuggaaggagaggugaacaaaaucaagucugcccuccuguccacgaauaaagcuguugugagccugucuaacggcgucuccgugcucacaagcaaggugcuggaccuuaaaaauuauauugauaagcaacugcucccgaucgucaacaaacagucuuguuccauuagcaacaucgaaaccguuauugaguuccagcagaagaauaaccgccugcuugagaucacaagagaauuuuccgugaaugccggcgugaccacccccgucucuacauacaugcugacgaacagcgagcuccugucccugaucaaugacaugccuauuaccaacgaucaaaagaaacucaugagcaauaacgugcagaucguucggcagcagucuuauuccauuaugagcaucauuaaggaagaggugcuggcguacgucgugcaacuuccccuguacgggguuaucgacacaccuugcuggaaacuccauaccucuccccuguguacaaccaauacgaaggaaggaagcaacaucugccuuacacgcaccgauagaggcugguauugugacaaugccggguccgugucuuucuuuccucaggcugagaccugcaaaguccagagcaaccggguguucugugauacaaugaacucccugacccucccgagcgaggucaaucugugcaauguggacauuuuuaaccccaaguacgauuguaagaucaugacaucuaaaacggacguuuccagcucugugauuaccucccugggagccaucgucagcugcuauggcaagacaaaaugcaccgcuuccaacaagaaucgcgggauuaucaaaacauucucuaacggaugugauuacgugagcaauaagggcguugacaccguguccgucggcaacacgcucuauuacgugaauaagcaagaagggaaaucucuguaugugaagggagagccuaucauuaacuuuuacgacccccuuguuuucccuagcgaugaauuugacgccuccaucagccaggucaaugagaaaauuaaccagucucuggccuucaucagaaaguccgaugaacuccugcacaaugugaacgcuggcaaaagcaccacaaauauuaugaucaccacaauuaucaucgugauuaucgucauucugcuuucucucaucgcgguggggcugcugcucuacugcaaggcccgguccacccccguuacgcugagcaaggaccagcuuucuggaauuaacaauaucgcuuucagcaacugaggacuaguggaagcauuuuccuggcugauuaaaagaaauuacucagcuauggucaucuguuccuguuagaaggcuaugcagcauauuauauacuaugcgcauguuaugaaaugcauaauaaaaaauuuuaaaaaaucuaaaagaucuaaaaaaaaaaaaaaaaaaaaaaaaaaaaaaaaaaaaaaaaaaaaaaaaaaaaaaaaaaaaaaaaugcaucccccccccccccccccccccccccccccccaaaggcucuuuucagagccaccagaauu

SEQ ID NO: 202 - RNA, 2096 nt, Artificial Sequence
  mRNA product Design c-4 comprising derived and/or modified sequence from HRSV(A2)__F0 (opt6)
gggagaguccgcucagccagguugcagaagcggcuuagcguguguccuaaucuucucucugcguguagguaggccugugccgcaaacaagcuuaccauggaacuucuaauauuaaaagcuaacgcaaucacuacuaucuuaaccgcaguaacauucuguuuugcauccggccaaaacauaacagaagaauuuuaccaaucaacuugcucugcagucucaaaagguuaucuaucugcauuaagaacaggcugguacaccucaguaauaacgaucgaacuaucaaacaucaaagaaaacaaauguaauggaacagacgcaaaaguaaaacuaaucaaacaagaacuagacaaauacaaaaacgcaguaaccgaacuccaacuccucaugcaaaguacaccagcaacaaauaacagagcaagacgugaacuaccacguuuuaugaauuacacgcucaauaacgcaaaaaaaacaaauguuacccuaucaaaaaaacgaaaaagaagauuccucggauuccuacuaggcguaggcucagcaauagcuucaggaguagcaguaucaaaaguacuccaccucgaaggagaaguaaacaaaaucaaaagcgcucuccucucaacaaacaaagcaguuguuucacucucaaacggaguaucaguacuaaccucaaaaguacuugaccuaaaaaauuauauagacaaacaacuauuaccaauaguaaacaaacaaagcugcuccaucuccaacaucgagacagucauagaauuucaacaaaaaaauaaccgccuauuagaaauaaccagagaauuuucaguaaacgcaggaguaacuaccccaguaucaacauauauguuaacaaacucagaacuccuaagucuaaucaacgacaugccaauaaccaacgaccaaaaaaaacuaaugagcaacaauguacaaauaguucgucaacaaucuuacuccauaaugucuauaauaaaagaagaaguacucgccuauguaguccaacuaccacuauacggagucaucgauacaccaugcuggaaacuccacacauccccacucuguacuacuaacaccaaagaagguucaaauauaugccuaaccagaacagauagagguugguacugcgauaaugcaggaucaguauccuuuuucccccaagccgaaacaugcaaaguucaauccaauagaguauuuugugauacaaugaacucuuuaacccucccauccgaagucaaucuauguaacgucgacauauuuaacccaaaauacgauugcaaaauaaugacaucaaaaacagacgucucauccucaguuauaacguccuuaggcgcuauaguaucaugcuacggcaaaacaaaauguacagcaucaaacaaaaacagaggaaucauaaaaacuuucucuaacgguugcgacuauguauccaacaaaggugucgacacaguauccguaggcaacacccuuuacuauguuaauaaacaagaaggaaaaucucuauauguaaaaggcgaaccaauuauaaauuuuuacgacccccuugucuuucccucugacgaauuugacgcuuccauaucacaagucaacgaaaaaaucaaccaaucccucgcauucauacgcaaaucagacgaacuacuacauaacgucaacgcaggcaaauccacaacaaacauaaugauaaccacaaucauaauuguaauaauaguaauacuacuuucucuaauagcagucggauuacucuuauacuguaaagcucgaucaacaccagucacccucucuaaagaucaacuauccggaaucaacaacauagcuuucucaaacuaaggacuaguggaagcauuuuccuggcugauuaaaagaaauuacucagcuauggucaucuguuccuguuagaaggcuaugcagcauauuauauacuaugcgcauguuaugaaaugcauaauaaaaaauuuuaaaaaaucuaaaagaucuaaaaaaaaaaaaaaaaaaaaaaaaaaaaaaaaaaaaaaaaaaaaaaaaaaaaaaaaaaaaaaaaugcaucccccccccccccccccccccccccccccccaaaggcucuuuucagagccaccagaauu

SEQ ID NO: 203 - RNA, 2096 nt, Artificial Sequence
  mRNA product Design c-4 comprising derived and/or modified sequence from HRSV(A2)__F0 (opt11)
gggagaguccgcucagccagguugcagaagcggcuuagcguguguccuaaucuucucucugcguguagguaggccugugccgcaaacaagcuuaccauggaacuccucauacucaaagccaacgcaaucacaaccauacucaccgccgucaccuucugcuuugcaucuggccagaacaucacugaagaguucuaccaauccacaugcuccgccguaagcaaaggcuaccuauccgcccuacgcaccggcugguacaccagcguaaucaccauagaacucuccaauauaaaagaaaacaaaugcaacggcaccgacgcaaaagucaagcuaauaaaacaagaacucgacaaauacaaaaacgccguuaccgaacuccagcuacucaugcaaucgaccccagcaaccaacaaccgugcgagacgcgaacucccccgcuucaugaacuacacccuaaacaacgccaaaaagaccaacguaacucuauccaagaaacgcaaacgccgcuuccucggauuccuccucggcgucggcuccgcaaucgccagcggcgucgccguuagcaaaguccuucaccucgaaggagaaguaaacaaaauuaaaagcgcccucuuauccacaaacaaggccguaguaucccugucaaacggcgucuccguccuuacauccaaaguccucgaccucaagaacuacauagacaaacagcuacuacccauuguaaauaaacaaagcugcucaauuagcaacaucgaaaccguaaucgaguuccagcagaaaaacaacagacuucucgaaaucacccgcgaguucagcgucaacgccggcguaaccaccccugucucaacauacaugcuaaccaacagcgaacugcucucccucaucaacgacaugcccaucaccaacgaccaaaagaaacucaugagcaacaacguacaaaucgugcgccaacaguccuacucaauaaugucaaucaucaaagaagaagugcuagcauacgucguacaacuaccacucuacggcguaauagauacccccugcuggaagcuccauaccuccccacucuguaccaccaacaccaaagaaggcucaaacaucugccuaacgcgcacagaccguggaugguacugugacaacgccggcuccgucuccuucuucccucaagccgaaacaugcaaaguccaauccaacagagucuucugcgauaccaugaacucccugacacucccaagcgaagucaaccuuugcaacgucgauaucuuuaaccccaaauacgacugcaagaucaugacaucaaaaaccgacguauccuccucuguaauaaccucccuaggcgcaaucguaucaugcuacggcaaaaccaaauguaccgccuccaacaaaaaucgcggcaucaucaaaaccuucucgaacggcugcgacuacgucuccaacaaaggcguagacacaguuuccguaggcaacacccucuacuacgucaauaaacaggaaggcaagucccucuacgucaaaggcgaacccaucaucaauuucuacgacccccucguuuuccccuccgaugaguucgacgcaagcaucagccaggucaacgaaaagauaaaccagucccucgccuucauccgcaaaucagaugaacuccuucacaacguuaacgcaggcaagagcaccaccaacaucaugaucacaacuauaaucaucgucauaaucgucauccuacucucacuaaucgccgucggucuccuacuauauuguaaagcccgaucaacaccggucacacucuccaaagaccaacucuccggaaucaacaauaucgcuuucucgaacuaaggacuaguggaagcauuuuccuggcugauuaaaagaaauuacucagcuauggucaucuguuccuguuagaaggcuaugcagcauauuauauacuaugcgcauguuaugaaaugcauaauaaaaaauuuuaaaaaaucuaaaagaucuaaaaaaaaaaaaaaaaaaaaaaaaaaaaaaaaaaaaaaaaaaaaaaaaaaaaaaaaaaaaaaaaugcaucccccccccccccccccccccccccccccccaaaggcucuuuucagagccaccagaauu

SEQ ID NO: 204 - RNA, 2014 nt, Artificial Sequence
  mRNA product Design c-5 comprising derived and/or modified sequence from HRSV(A2)__F0 (artificial)
gggagagcggcucggccauuuugucccagucaguccggaggcugcggcugcagaaguaccgccugcggaguaacugcaaagaagcuuaccauggaguugcuaauccucaaagcaaaugcaauuaccacaauccucacugcagucacauuuuguuuugcuucuggucaaaacaucacugaagaauuuuaucaaucaacaugcagugcaguuagcaaaggcuaucuuagugcucugagaacugguugguauaccaguguuauaacuauagaauuaaguaauaucaaggaaaauaaguguaauggaacagaugcuaagguaaaauugauaaaacaagaauuagauaaauauaaaaaugcuguaacagaauugcaguugcucaugcaaagcacaccagcaacaaacaaucgagccagaagagaacuaccaagguuuaugaauuauacacucaacaaugccaaaaaaaccaauguaacauuaagcaagaaaaggaaaagaagauuucuugguuuuuuguuagguguuggaucugcaaucgccaguggcguugcuguaucuaagguccugcaccuagaaggggaagugaacaagaucaaaagugcucuacuauccacaaacaaggcuguagucagcuuaucaaauggaguuagugucuuaaccagcaaaguguuagaccucaaaaacuauauagauaaacaauuguuaccuauugugaacaagcaaagcugcagcauaucaaauauagaaacugugauagaguuccaacaaaagaacaacagacuacuagagauuaccagggaauuuaguguuaaugcagguguaacuacaccuguaagcacuuacauguuaacuaauagugaauuauugucauuaaucaaugauaugccuauaacaaaugaucagaaaaaguuaauguccaacaauguucaaauaguuagacagcaaaguuacucuaucauguccauaauaaaagaggaagucuuagcauauguaguacaauuaccacuauaugguguuauagauacacccuguuggaaacuacacacauccccucuauguacaaccaacacaaaagaaggguccaacaucuguuuaacaagaacugacagaggaugguacugugacaaugcaggaucaguaucuuucuucccacaagcugaaacauguaaaguucaaucaaaucgaguauuuugugacacaaugaacaguuuaacauuaccaagugaaguaaaucucugcaauguugacauauucaaccccaaauaugauuguaaaauuaugacuucaaaaacagauguaagcagcuccguuaucacaucucuaggagccauugugucaugcuauggcaaaacuaaauguacagcauccaauaaaaaucguggaaucauaaagacauuuucuaacgggugcgauuauguaucaaauaaagggguggacacugugucuguagguaacacauuauauuauguaaauaagcaagaagguaaaagucucuauguaaaaggugaaccaauaauaaauuucuaugacccauuaguauuccccucugaugaauuugaugcaucaauaucucaagucaacgagaagauuaaccagagccuagcauuuauucguaaauccgaugaauuauuacauaauguaaaugcugguaaauccaccacaaauaucaugauaacuacuauaauuauagugauuauaguaauauuguuaucauuaauugcuguuggacugcucuuauacuguaaggccagaagcacaccagucacacuaagcaaagaucaacugagugguauaaauaauauugcauuuaguaacuaaggacuagucccuguucccagagcccacuuuuuuuucuuuuuuugaaauaaaauagccugucuuucagaucuaaaaaaaaaaaaaaaaaaaaaaaaaaaaaaaaaaaaaaaaaaaaaaaaaaaaaaaaaaaaaaaaugcaucccccccccccccccccccccccccccccccaaaggcucuuuucagagccaccagaauu

SEQ ID NO: 205 - RNA, 2014 nt, Artificial Sequence
  mRNA product Design c-5 comprising derived and/or modified sequence from HRSV(A2)__F0 (opt1)
gggagagcggcucggccauuuugucccagucaguccggaggcugcggcugcagaaguaccgccugcggaguaacugcaaagaagcuuaccauggagcugcucauccugaaggccaacgccaucaccaccauccugacggcggugaccuucugcuucgccagcggccagaacaucaccgaggaguucuaccaguccaccugcagcgccgucuccaagggguaccucagcgcccugcggacgggcugguacaccuccgugaucaccaucgagcugagcaacaucaaggagaacaagugcaacgggaccgacgccaaggugaagcucaucaagcaggagcuggacaaguacaagaacgcggucacggagcugcagcuccugaugcaguccaccccggcaaccaacaaccgcgcccggcgcgagcugccccgguucaugaacuacacccucaacaacgccaagaagacgaacgugacccugagcaagaagcgcaagcggcgcuuccugggcuuccuccugggggugggcuccgccaucgcgagcggcgucgccguguccaaggugcugcaccucgagggggaggucaacaagaucaagagcgcccugcuguccaccaacaaggccguggugagccucuccaacggcgucagcgugcugaccuccaaggugcuggaccucaagaacuacaucgacaagcagcugcugcccaucgucaacaagcagagcugcuccaucagcaacaucgagacggugaucgaguuccagcagaagaacaaccggcuccuggagaucacccgcgaguucagcgugaacgccggggucaccacccccguguccacguacaugcugaccaacagcgagcuccugucccugaucaacgacaugccgaucaccaacgaccagaagaagcucaugagcaacaacgugcagaucguccggcagcaguccuacagcaucauguccaucaucaaggaggaggugcuggcguacgugguccagcugccccucuacggcgugaucgacacccccugcuggaagcugcacacgagcccccugugcaccaccaacaccaaggagggguccaacaucugccucacgcgcaccgaccggggcugguacugcgacaacgccggcagcgucuccuucuucccgcaggccgagaccugcaaggugcagagcaaccgcguguucugcgacaccaugaacucccugacgcugcccagcgagguaaaccucugcaacgucgacaucuucaaccccaaguacgacugcaagaucaugaccuccaagaccgacgugagcuccagcgugaucaccucccugggggccaucgucagcugcuacggcaagacgaagugcaccgccagcaacaagaaccgggggaucaucaagaccuucuccaacggcugcgacuacgugagcaacaagggcguggacaccguguccgucgggaacacccuguacuacgugaacaagcaggagggcaagagccucuacgugaagggggagcccaucaucaacuucuacgacccgcuggucuuccccuccgacgaguucgacgcgagcaucucccaggugaacgagaagaucaaccagagccuggccuucauccgcaaguccgacgagcugcuccacaacgugaacgccggcaagagcacgaccaacaucaugaucaccaccaucaucaucgucaucaucgugauccugcugucccucaucgccguggggcugcugcucuacugcaaggcccggagcacgcccgucacccuguccaaggaccagcugagcggcaucaacaacaucgcguucuccaacugaggacuagucccuguucccagagcccacuuuuuuuucuuuuuuugaaauaaaauagccugucuuucagaucuaaaaaaaaaaaaaaaaaaaaaaaaaaaaaaaaaaaaaaaaaaaaaaaaaaaaaaaaaaaaaaaaugcaucccccccccccccccccccccccccccccccaaaggcucuuuucagagccaccagaauu

SEQ ID NO: 206 - RNA, 2014 nt, Artificial Sequence
  mRNA product Design c-5 comprising derived and/or modified sequence from HRSV(A2)__F0 (opt1)
gggagagcggcucggccauuuugucccagucaguccggaggcugcggcugcagaaguaccgccugcggaguaacugcaaagaagcuuaccauggagcugcucauccugaaggccaacgccaucaccaccauccugacggcggugaccuucugcuucgccagcggccagaacaucaccgaggaguucuaccaguccacgugcagcgccgucuccaagggguaccucagcgcccugcgcaccggcugguacaccuccgugaucaccaucgagcugagcaacaucaaggagaacaagugcaacgggaccgacgccaaggugaagcucaucaagcaggagcuggacaaguacaagaacgcggucacggagcugcagcuccugaugcaguccacccccgccaccaacaaccgggcccgccgggagcugccgcgcuucaugaacuacacccucaacaacgccaagaagacgaacgugacccugagcaagaagcggaagcgccgguuccugggcuuccuccugggggugggcuccgcgaucgccagcggcgucgccguguccaaggugcugcaccucgagggggaggucaacaagaucaagagcgcccugcuguccaccaacaaggccguggugagccucuccaacggcgucagcgugcugaccuccaaggugcuggaccucaagaacuacaucgacaagcagcugcugcccaucgucaacaagcagagcugcuccaucagcaacaucgagacggugaucgaguuccagcagaagaacaaccgccuccuggagaucacccgggaguucagcgugaacgcgggggucaccacccccguguccacguacaugcugaccaacagcgagcuccugucccugaucaacgacaugcccaucaccaacgaccagaagaagcucaugagcaacaacgugcagaucguccgccagcaguccuacagcaucauguccaucaucaaggaggaggugcuggccuacgugguccagcugccgcucuacggcgugaucgacacccccugcuggaagcugcacacgagcccccugugcaccaccaacaccaaggagggguccaacaucugccucacgcggaccgaccgcggcugguacugcgacaacgccggcagcgucuccuucuucccccaggccgagaccugcaaggugcagagcaaccggguguucugcgacaccaugaacucccugacgcugccgagcgaggucaaccucugcaacguggacaucuucaaccccaaguacgacugcaagaucaugaccuccaagaccgacgugagcuccagcgucaucaccucccugggggccaucgugagcugcuacggcaagacgaagugcaccgcgagcaacaagaaccgcgggaucaucaagaccuucuccaacggcugcgacuacgugagcaacaagggcgucgacaccguguccguggggaacacccuguacuacgucaacaagcaggagggcaagagccucuacgugaagggggagcccaucaucaacuucuacgacccccugguguucccguccgacgaguucgacgccagcaucucccaggucaacgagaagaucaaccagagccuggccuucauccggaaguccgacgagcuccugcacaacgugaacgccggcaagagcacgaccaacaucaugaucaccaccaucaucaucgugaucaucgucauccugcugucccucaucgccguggggcugcugcucuacugcaaggcgcgcagcacgcccgugacccuguccaaggaccagcugagcggcaucaacaacaucgccuucuccaacugaggacuagucccuguucccagagcccacuuuuuuuucuuuuuuugaaauaaaauagccugucuuucagaucuaaaaaaaaaaaaaaaaaaaaaaaaaaaaaaaaaaaaaaaaaaaaaaaaaaaaaaaaaaaaaaaaugcaucccccccccccccccccccccccccccccccaaaggcucuuuucagagccaccagaauu

SEQ ID NO: 207 - RNA, 2014 nt, Artificial Sequence
  mRNA product Design c-5 comprising derived and/or modified sequence from HRSV(A2)__F0 (opt2)
gggagagcggcucggccauuuugucccagucaguccggaggcugcggcugcagaaguaccgccugcggaguaacugcaaagaagcuuaccauggagcuccucauccucaaggccaacgccaucaccaccauccucaccgccgucaccuucugcuucgccuccggccagaacaucaccgaggaguucuaccaguccaccugcuccgccgucuccaagggcuaccucuccgcccuccgcaccggcugguacaccuccgucaucaccaucgagcucuccaacaucaaggagaacaagugcaacggcaccgacgccaaggucaagcucaucaagcaggagcucgacaaguacaagaacgccgucaccgagcuccagcuccucaugcaguccacccccgccaccaacaaccgcgcccgccgcgagcucccccgcuucaugaacuacacccucaacaacgccaagaagaccaacgucacccucuccaagaagcgcaagcgccgcuuccucggcuuccuccucggcgucggcuccgccaucgccuccggcgucgccgucuccaagguccuccaccucgagggcgaggucaacaagaucaaguccgcccuccucuccaccaacaaggccgucgucucccucuccaacggcgucuccguccucaccuccaagguccucgaccucaagaacuacaucgacaagcagcuccuccccaucgucaacaagcaguccugcuccaucuccaacaucgagaccgucaucgaguuccagcagaagaacaaccgccuccucgagaucacccgcgaguucuccgucaacgccggcgucaccacccccgucuccaccuacaugcucaccaacuccgagcuccucucccucaucaacgacaugcccaucaccaacgaccagaagaagcucauguccaacaacguccagaucguccgccagcaguccuacuccaucauguccaucaucaaggaggagguccucgccuacgucguccagcucccccucuacggcgucaucgacacccccugcuggaagcuccacaccuccccccucugcaccaccaacaccaaggagggcuccaacaucugccucacccgcaccgaccgcggcugguacugcgacaacgccggcuccgucuccuucuucccccaggccgagaccugcaagguccaguccaaccgcgucuucugcgacaccaugaacucccucacccuccccuccgaggucaaccucugcaacgucgacaucuucaaccccaaguacgacugcaagaucaugaccuccaagaccgacgucuccuccuccgucaucaccucccucggcgccaucgucuccugcuacggcaagaccaagugcaccgccuccaacaagaaccgcggcaucaucaagaccuucuccaacggcugcgacuacgucuccaacaagggcgucgacaccgucuccgucggcaacacccucuacuacgucaacaagcaggagggcaagucccucuacgucaagggcgagcccaucaucaacuucuacgacccccucgucuuccccuccgacgaguucgacgccuccaucucccaggucaacgagaagaucaaccagucccucgccuucauccgcaaguccgacgagcuccuccacaacgucaacgccggcaaguccaccaccaacaucaugaucaccaccaucaucaucgucaucaucgucauccuccucucccucaucgccgucggccuccuccucuacugcaaggcccgcuccacccccgucacccucuccaaggaccagcucuccggcaucaacaacaucgccuucuccaacugaggacuagucccuguucccagagcccacuuuuuuuucuuuuuuugaaauaaaauagccugucuuucagaucuaaaaaaaaaaaaaaaaaaaaaaaaaaaaaaaaaaaaaaaaaaaaaaaaaaaaaaaaaaaaaaaaugcaucccccccccccccccccccccccccccccccaaaggcucuuuucagagccaccagaauu

SEQ ID NO: 208 - RNA, 2014 nt, Artificial Sequence
  mRNA product Design c-5 comprising derived and/or modified sequence from HRSV(A2)__F0 (opt3)
gggagagcggcucggccauuuugucccagucaguccggaggcugcggcugcagaaguaccgccugcggaguaacugcaaagaagcuuaccauggagcugcucauccuuaaggccaacgcuauuaccacaauacugacugcagugacguucugcuuugccagcggccagaauaucaccgaagaguucuaccaauccacauguucugcggucucaaaaggguauuugagugcuuuaagaacuggaugguacaccagcguuauuacaaucgaacuguccaacauuaaggagaauaaaugcaacgguaccgacgccaaggugaaacuaaucaagcaggaacucgauaaguauaaaaaugcaguaacugagcugcagcuucugaugcagucuacacccgccaccaacaauagggcucggcgcgaguugccucgauuuaugaacuacacgcucaauaacgcaaagaaaacuaaugugacccugucgaagaaacguaagagaagguuccugggcuuucucuuaggggucggaucagccauagcuagcggcguggccguuaguaaggugcugcaccuugaaggugaggucaacaaaaucaaguccgcguugcugucuacaaauaaagcagugguaagccuauccaacgggguuucagugcucacuucuaagguccuggaccuuaaaaauuauauugauaagcaacuguugccaaucgugaacaaacagagcuguucuauuuccaacaucgaaaccgugauagaguuccagcagaagaauaaccggcuccuggagauuacacgcgaauuuucagucaaugccggaguuaccacgccggugagcacuuacauguuaacaaacagugagcugcucucucuuaucaaugacaugcccauuaccaacgaucaaaagaaacugauguccaauaacguacagaucgugagacagcagagcuauucgaucaugucuauuauaaaggaagaggucuuggcuuacgugguucaacuaccucuguacggcgugaucgacacuccaugcuggaaacuccauacauccccacuguguaccacgaauaccaaggaaggcucaaacauuugccuuacaaggacugaucgggggugguauugugacaaugccggaagugucagcuucuuuccucaggcagagaccugcaaagugcaguccaaccgcguauucugugauacaaugaauagucugacuuugccaagcgagguuaaccucugcaauguggacaucuuuaaccccaaguacgauuguaagauaaugaccucaaaaacagacgucaguuccagcgugauuaccucucugggugcuaucgucucaugcuauggcaagacuaaaugcacggccaguaacaagaaucgagggaucauuaaaacauucagcaacggaugugauuacguguccaauaagggcguugacaccgugucuguagguaacacuuuauauuacgucaauaagcaagaagggaaaucgcuguaugugaagggagagccuaucauuaacuuuuacgacccccuaguuuucccgagcgaugaauuugacgcguccauaucacaggugaaugagaaaaucaaccagagucucgccuucauuagaaagucugaugaacugcuucacaaugucaacgcaggcaaaagcaccacaaauaucaugaucaccacuauuauaaucgugauuaucguaauuuugcugucccucaucgcugugggccugcuucuguacugcaaggccaggucaacacccguuacguugagcaaggaccagcucucugggauaaacaauaucgcuuucuccaacugaggacuagucccuguucccagagcccacuuuuuuuucuuuuuuugaaauaaaauagccugucuuucagaucuaaaaaaaaaaaaaaaaaaaaaaaaaaaaaaaaaaaaaaaaaaaaaaaaaaaaaaaaaaaaaaaaugcaucccccccccccccccccccccccccccccccaaaggcucuuuucagagccaccagaauu

SEQ ID NO: 209 - RNA, 2014 nt, Artificial Sequence
  mRNA product Design c-5 comprising derived and/or modified sequence from HRSV(A2)__F0 (opt4)
gggagagcggcucggccauuuugucccagucaguccggaggcugcggcugcagaaguaccgccugcggaguaacugcaaagaagcuuaccauggagcugcugauccugaaggccaacgccaucaccaccauccugaccgccgugaccuucugcuucgccagcggccagaacaucaccgaggaguucuaccagagcaccugcagcgccgugagcaagggcuaccugagcgcccugagaaccggcugguacaccagcgugaucaccaucgagcugagcaacaucaaggagaacaagugcaacggcaccgacgccaaggugaagcugaucaagcaggagcuggacaaguacaagaacgccgugaccgagcugcagcugcugaugcagagcacccccgccaccaacaacagagccagaagagagcugcccagauucaugaacuacacccugaacaacgccaagaagaccaacgugacccugagcaagaagagaaagagaagauuccugggcuuccugcugggcgugggcagcgccaucgccagcggcguggccgugagcaaggugcugcaccuggagggcgaggugaacaagaucaagagcgcccugcugagcaccaacaaggccguggugagccugagcaacggcgugagcgugcugaccagcaaggugcuggaccugaagaacuacaucgacaagcagcugcugcccaucgugaacaagcagagcugcagcaucagcaacaucgagaccgugaucgaguuccagcagaagaacaacagacugcuggagaucaccagagaguucagcgugaacgccggcgugaccacccccgugagcaccuacaugcugaccaacagcgagcugcugagccugaucaacgacaugcccaucaccaacgaccagaagaagcugaugagcaacaacgugcagaucgugagacagcagagcuacagcaucaugagcaucaucaaggaggaggugcuggccuacguggugcagcugccccuguacggcgugaucgacacccccugcuggaagcugcacaccagcccccugugcaccaccaacaccaaggagggcagcaacaucugccugaccagaaccgacagaggcugguacugcgacaacgccggcagcgugagcuucuucccccaggccgagaccugcaaggugcagagcaacagaguguucugcgacaccaugaacagccugacccugcccagcgaggugaaccugugcaacguggacaucuucaaccccaaguacgacugcaagaucaugaccagcaagaccgacgugagcagcagcgugaucaccagccugggcgccaucgugagcugcuacggcaagaccaagugcaccgccagcaacaagaacagaggcaucaucaagaccuucagcaacggcugcgacuacgugagcaacaagggcguggacaccgugagcgugggcaacacccuguacuacgugaacaagcaggagggcaagagccuguacgugaagggcgagcccaucaucaacuucuacgacccccugguguuccccagcgacgaguucgacgccagcaucagccaggugaacgagaagaucaaccagagccuggccuucaucagaaagagcgacgagcugcugcacaacgugaacgccggcaagagcaccaccaacaucaugaucaccaccaucaucaucgugaucaucgugauccugcugagccugaucgccgugggccugcugcuguacugcaaggccagaagcacccccgugacccugagcaaggaccagcugagcggcaucaacaacaucgccuucagcaacugaggacuagucccuguucccagagcccacuuuuuuuucuuuuuuugaaauaaaauagccugucuuucagaucuaaaaaaaaaaaaaaaaaaaaaaaaaaaaaaaaaaaaaaaaaaaaaaaaaaaaaaaaaaaaaaaaugcaucccccccccccccccccccccccccccccccaaaggcucuuuucagagccaccagaauu

SEQ ID NO: 210 - RNA, 2014 nt, Artificial Sequence
  mRNA product Design c-5 comprising derived and/or modified sequence from HRSV(A2)__F0 (opt5)
gggagagcggcucggccauuuugucccagucaguccggaggcugcggcugcagaaguaccgccugcggaguaacugcaaagaagcuuaccauggagcugcucauccugaaggccaacgcuauuaccacaauccuuacggccgugaccuucugcuuugcgagcggccagaauauuacagaagaguucuaccaauccaccuguucugcugucagcaaaggguaucuguccgcccucagaacaggaugguacaccucuguuaucacaauugaacugagcaacaucaaggagaauaaaugcaacggcaccgacgccaaggugaaacuuaucaagcaggaacuggauaaguauaaaaaugcugugacggagcuccagcugcugaugcaguccacccccgccacaaacaaucgggcucgcagagagcucccucgguuuaugaacuacacccugaauaacgccaagaaaacaaaugucacccuuucuaagaaacgcaagagacgguuccugggguuucuccugggagugggcagcgcgauugccuccgggguugcugugagcaagguccuucaccuggaaggagaggugaacaaaaucaagucugcccuccuguccacgaauaaagcuguugugagccugucuaacggcgucuccgugcucacaagcaaggugcuggaccuuaaaaauuauauugauaagcaacugcucccgaucgucaacaaacagucuuguuccauuagcaacaucgaaaccguuauugaguuccagcagaagaauaaccgccugcuugagaucacaagagaauuuuccgugaaugccggcgugaccacccccgucucuacauacaugcugacgaacagcgagcuccugucccugaucaaugacaugccuauuaccaacgaucaaaagaaacucaugagcaauaacgugcagaucguucggcagcagucuuauuccauuaugagcaucauuaaggaagaggugcuggcguacgucgugcaacuuccccuguacgggguuaucgacacaccuugcuggaaacuccauaccucuccccuguguacaaccaauacgaaggaaggaagcaacaucugccuuacacgcaccgauagaggcugguauugugacaaugccggguccgugucuuucuuuccucaggcugagaccugcaaaguccagagcaaccggguguucugugauacaaugaacucccugacccucccgagcgaggucaaucugugcaauguggacauuuuuaaccccaaguacgauuguaagaucaugacaucuaaaacggacguuuccagcucugugauuaccucccugggagccaucgucagcugcuauggcaagacaaaaugcaccgcuuccaacaagaaucgcgggauuaucaaaacauucucuaacggaugugauuacgugagcaauaagggcguugacaccguguccgucggcaacacgcucuauuacgugaauaagcaagaagggaaaucucuguaugugaagggagagccuaucauuaacuuuuacgacccccuuguuuucccuagcgaugaauuugacgccuccaucagccaggucaaugagaaaauuaaccagucucuggccuucaucagaaaguccgaugaacuccugcacaaugugaacgcuggcaaaagcaccacaaauauuaugaucaccacaauuaucaucgugauuaucgucauucugcuuucucucaucgcgguggggcugcugcucuacugcaaggcccgguccacccccguuacgcugagcaaggaccagcuuucuggaauuaacaauaucgcuuucagcaacugaggacuagucccuguucccagagcccacuuuuuuuucuuuuuuugaaauaaaauagccugucuuucagaucuaaaaaaaaaaaaaaaaaaaaaaaaaaaaaaaaaaaaaaaaaaaaaaaaaaaaaaaaaaaaaaaaugcaucccccccccccccccccccccccccccccccaaaggcucuuuucagagccaccagaauu

SEQ ID NO: 211 - RNA, 2014 nt, Artificial Sequence
  mRNA product Design c-5 comprising derived and/or modified sequence from HRSV(A2)__F0 (opt6)
gggagagcggcucggccauuuugucccagucaguccggaggcugcggcugcagaaguaccgccugcggaguaacugcaaagaagcuuaccauggaacuucuaauauuaaaagcuaacgcaaucacuacuaucuuaaccgcaguaacauucuguuuugcauccggccaaaacauaacagaagaauuuuaccaaucaacuugcucugcagucucaaaagguuaucuaucugcauuaagaacaggcugguacaccucaguaauaacgaucgaacuaucaaacaucaaagaaaacaaauguaauggaacagacgcaaaaguaaaacuaaucaaacaagaacuagacaaauacaaaaacgcaguaaccgaacuccaacuccucaugcaaaguacaccagcaacaaauaacagagcaagacgugaacuaccacguuuuaugaauuacacgcucaauaacgcaaaaaaaacaaauguuacccuaucaaaaaaacgaaaaagaagauuccucggauuccuacuaggcguaggcucagcaauagcuucaggaguagcaguaucaaaaguacuccaccucgaaggagaaguaaacaaaaucaaaagcgcucuccucucaacaaacaaagcaguuguuucacucucaaacggaguaucaguacuaaccucaaaaguacuugaccuaaaaaauuauauagacaaacaacuauuaccaauaguaaacaaacaaagcugcuccaucuccaacaucgagacagucauagaauuucaacaaaaaaauaaccgccuauuagaaauaaccagagaauuuucaguaaacgcaggaguaacuaccccaguaucaacauauauguuaacaaacucagaacuccuaagucuaaucaacgacaugccaauaaccaacgaccaaaaaaaacuaaugagcaacaauguacaaauaguucgucaacaaucuuacuccauaaugucuauaauaaaagaagaaguacucgccuauguaguccaacuaccacuauacggagucaucgauacaccaugcuggaaacuccacacauccccacucuguacuacuaacaccaaagaagguucaaauauaugccuaaccagaacagauagagguugguacugcgauaaugcaggaucaguauccuuuuucccccaagccgaaacaugcaaaguucaauccaauagaguauuuugugauacaaugaacucuuuaacccucccauccgaagucaaucuauguaacgucgacauauuuaacccaaaauacgauugcaaaauaaugacaucaaaaacagacgucucauccucaguuauaacguccuuaggcgcuauaguaucaugcuacggcaaaacaaaauguacagcaucaaacaaaaacagaggaaucauaaaaacuuucucuaacgguugcgacuauguauccaacaaaggugucgacacaguauccguaggcaacacccuuuacuauguuaauaaacaagaaggaaaaucucuauauguaaaaggcgaaccaauuauaaauuuuuacgacccccuugucuuucccucugacgaauuugacgcuuccauaucacaagucaacgaaaaaaucaaccaaucccucgcauucauacgcaaaucagacgaacuacuacauaacgucaacgcaggcaaauccacaacaaacauaaugauaaccacaaucauaauuguaauaauaguaauacuacuuucucuaauagcagucggauuacucuuauacuguaaagcucgaucaacaccagucacccucucuaaagaucaacuauccggaaucaacaacauagcuuucucaaacuaaggacuagucccuguucccagagcccacuuuuuuuucuuuuuuugaaauaaaauagccugucuuucagaucuaaaaaaaaaaaaaaaaaaaaaaaaaaaaaaaaaaaaaaaaaaaaaaaaaaaaaaaaaaaaaaaaugcaucccccccccccccccccccccccccccccccaaaggcucuuuucagagccaccagaauu

SEQ ID NO: 212 - RNA, 2014 nt, Artificial Sequence
  mRNA product Design c-5 comprising derived and/or modified sequence from HRSV(A2)__F0 (opt11)
gggagagcggcucggccauuuugucccagucaguccggaggcugcggcugcagaaguaccgccugcggaguaacugcaaagaagcuuaccauggaacuccucauacucaaagccaacgcaaucacaaccauacucaccgccgucaccuucugcuuugcaucuggccagaacaucacugaagaguucuaccaauccacaugcuccgccguaagcaaaggcuaccuauccgcccuacgcaccggcugguacaccagcguaaucaccauagaacucuccaauauaaaagaaaacaaaugcaacggcaccgacgcaaaagucaagcuaauaaaacaagaacucgacaaauacaaaaacgccguuaccgaacuccagcuacucaugcaaucgaccccagcaaccaacaaccgugcgagacgcgaacucccccgcuucaugaacuacacccuaaacaacgccaaaaagaccaacguaacucuauccaagaaacgcaaacgccgcuuccucggauuccuccucggcgucggcuccgcaaucgccagcggcgucgccguuagcaaaguccuucaccucgaaggagaaguaaacaaaauuaaaagcgcccucuuauccacaaacaaggccguaguaucccugucaaacggcgucuccguccuuacauccaaaguccucgaccucaagaacuacauagacaaacagcuacuacccauuguaaauaaacaaagcugcucaauuagcaacaucgaaaccguaaucgaguuccagcagaaaaacaacagacuucucgaaaucacccgcgaguucagcgucaacgccggcguaaccaccccugucucaacauacaugcuaaccaacagcgaacugcucucccucaucaacgacaugcccaucaccaacgaccaaaagaaacucaugagcaacaacguacaaaucgugcgccaacaguccuacucaauaaugucaaucaucaaagaagaagugcuagcauacgucguacaacuaccacucuacggcguaauagauacccccugcuggaagcuccauaccuccccacucuguaccaccaacaccaaagaaggcucaaacaucugccuaacgcgcacagaccguggaugguacugugacaacgccggcuccgucuccuucuucccucaagccgaaacaugcaaaguccaauccaacagagucuucugcgauaccaugaacucccugacacucccaagcgaagucaaccuuugcaacgucgauaucuuuaaccccaaauacgacugcaagaucaugacaucaaaaaccgacguauccuccucuguaauaaccucccuaggcgcaaucguaucaugcuacggcaaaaccaaauguaccgccuccaacaaaaaucgcggcaucaucaaaaccuucucgaacggcugcgacuacgucuccaacaaaggcguagacacaguuuccguaggcaacacccucuacuacgucaauaaacaggaaggcaagucccucuacgucaaaggcgaacccaucaucaauuucuacgacccccucguuuuccccuccgaugaguucgacgcaagcaucagccaggucaacgaaaagauaaaccagucccucgccuucauccgcaaaucagaugaacuccuucacaacguuaacgcaggcaagagcaccaccaacaucaugaucacaacuauaaucaucgucauaaucgucauccuacucucacuaaucgccgucggucuccuacuauauuguaaagcccgaucaacaccggucacacucuccaaagaccaacucuccggaaucaacaauaucgcuuucucgaacuaaggacuagucccuguucccagagcccacuuuuuuuucuuuuuuugaaauaaaauagccugucuuucagaucuaaaaaaaaaaaaaaaaaaaaaaaaaaaaaaaaaaaaaaaaaaaaaaaaaaaaaaaaaaaaaaaaugcaucccccccccccccccccccccccccccccccaaaggcucuuuucagagccaccagaauu

SEQ ID NO: 213 - RNA, 2023 nt, Artificial Sequence
  mRNA product Design d-1 comprising derived and/or modified sequence from HRSV(A2)__F0 (artificial)
gggagacccgugacccggaaguuguacggcuacgcgacuuucccucccacaaacccucgcgcccuuccuuuccuacuugggcccggcagaaagcuuaccauggaguugcuaauccucaaagcaaaugcaauuaccacaauccucacugcagucacauuuuguuuugcuucuggucaaaacaucacugaagaauuuuaucaaucaacaugcagugcaguuagcaaaggcuaucuuagugcucugagaacugguugguauaccaguguuauaacuauagaauuaaguaauaucaaggaaaauaaguguaauggaacagaugcuaagguaaaauugauaaaacaagaauuagauaaauauaaaaaugcuguaacagaauugcaguugcucaugcaaagcacaccagcaacaaacaaucgagccagaagagaacuaccaagguuuaugaauuauacacucaacaaugccaaaaaaaccaauguaacauuaagcaagaaaaggaaaagaagauuucuugguuuuuuguuagguguuggaucugcaaucgccaguggcguugcuguaucuaagguccugcaccuagaaggggaagugaacaagaucaaaagugcucuacuauccacaaacaaggcuguagucagcuuaucaaauggaguuagugucuuaaccagcaaaguguuagaccucaaaaacuauauagauaaacaauuguuaccuauugugaacaagcaaagcugcagcauaucaaauauagaaacugugauagaguuccaacaaaagaacaacagacuacuagagauuaccagggaauuuaguguuaaugcagguguaacuacaccuguaagcacuuacauguuaacuaauagugaauuauugucauuaaucaaugauaugccuauaacaaaugaucagaaaaaguuaauguccaacaauguucaaauaguuagacagcaaaguuacucuaucauguccauaauaaaagaggaagucuuagcauauguaguacaauuaccacuauaugguguuauagauacacccuguuggaaacuacacacauccccucuauguacaaccaacacaaaagaaggguccaacaucuguuuaacaagaacugacagaggaugguacugugacaaugcaggaucaguaucuuucuucccacaagcugaaacauguaaaguucaaucaaaucgaguauuuugugacacaaugaacaguuuaacauuaccaagugaaguaaaucucugcaauguugacauauucaaccccaaauaugauuguaaaauuaugacuucaaaaacagauguaagcagcuccguuaucacaucucuaggagccauugugucaugcuauggcaaaacuaaauguacagcauccaauaaaaaucguggaaucauaaagacauuuucuaacgggugcgauuauguaucaaauaaagggguggacacugugucuguagguaacacauuauauuauguaaauaagcaagaagguaaaagucucuauguaaaaggugaaccaauaauaaauuucuaugacccauuaguauuccccucugaugaauuugaugcaucaauaucucaagucaacgagaagauuaaccagagccuagcauuuauucguaaauccgaugaauuauuacauaauguaaaugcugguaaauccaccacaaauaucaugauaacuacuauaauuauagugauuauaguaauauuguuaucauuaauugcuguuggacugcucuuauacuguaaggccagaagcacaccagucacacuaagcaaagaucaacugagugguauaaauaauauugcauuuaguaacuaaggacuagucccuguucccagagcccacuuuuuuuucuuuuuuugaaauaaaauagccugucuuucagaucuaaaaaaaaaaaaaaaaaaaaaaaaaaaaaaaaaaaaaaaaaaaaaaaaaaaaaaaaaaaaaaaaugcaucccccccccccccccccccccccccccccccaaaggcucuuuucagagccaccagaauu

SEQ ID NO: 214 - RNA, 2023 nt, Artificial Sequence
  mRNA product Design d-1 comprising derived and/or modified sequence from HRSV(A2)__F0 (opt1)
gggagacccgugacccggaaguuguacggcuacgcgacuuucccucccacaaacccucgcgcccuuccuuuccuacuugggcccggcagaaagcuuaccauggagcugcucauccugaaggccaacgccaucaccaccauccugacggcggugaccuucugcuucgccagcggccagaacaucaccgaggaguucuaccaguccaccugcagcgccgucuccaagggguaccucagcgcccugcggacgggcugguacaccuccgugaucaccaucgagcugagcaacaucaaggagaacaagugcaacgggaccgacgccaaggugaagcucaucaagcaggagcuggacaaguacaagaacgcggucacggagcugcagcuccugaugcaguccaccccggcaaccaacaaccgcgcccggcgcgagcugccccgguucaugaacuacacccucaacaacgccaagaagacgaacgugacccugagcaagaagcgcaagcggcgcuuccugggcuuccuccugggggugggcuccgccaucgcgagcggcgucgccguguccaaggugcugcaccucgagggggaggucaacaagaucaagagcgcccugcuguccaccaacaaggccguggugagccucuccaacggcgucagcgugcugaccuccaaggugcuggaccucaagaacuacaucgacaagcagcugcugcccaucgucaacaagcagagcugcuccaucagcaacaucgagacggugaucgaguuccagcagaagaacaaccggcuccuggagaucacccgcgaguucagcgugaacgccggggucaccacccccguguccacguacaugcugaccaacagcgagcuccugucccugaucaacgacaugccgaucaccaacgaccagaagaagcucaugagcaacaacgugcagaucguccggcagcaguccuacagcaucauguccaucaucaaggaggaggugcuggcguacgugguccagcugccccucuacggcgugaucgacacccccugcuggaagcugcacacgagcccccugugcaccaccaacaccaaggagggguccaacaucugccucacgcgcaccgaccggggcugguacugcgacaacgccggcagcgucuccuucuucccgcaggccgagaccugcaaggugcagagcaaccgcguguucugcgacaccaugaacucccugacgcugcccagcgagguaaaccucugcaacgucgacaucuucaaccccaaguacgacugcaagaucaugaccuccaagaccgacgugagcuccagcgugaucaccucccugggggccaucgucagcugcuacggcaagacgaagugcaccgccagcaacaagaaccgggggaucaucaagaccuucuccaacggcugcgacuacgugagcaacaagggcguggacaccguguccgucgggaacacccuguacuacgugaacaagcaggagggcaagagccucuacgugaagggggagcccaucaucaacuucuacgacccgcuggucuuccccuccgacgaguucgacgcgagcaucucccaggugaacgagaagaucaaccagagccuggccuucauccgcaaguccgacgagcugcuccacaacgugaacgccggcaagagcacgaccaacaucaugaucaccaccaucaucaucgucaucaucgugauccugcugucccucaucgccguggggcugcugcucuacugcaaggcccggagcacgcccgucacccuguccaaggaccagcugagcggcaucaacaacaucgcguucuccaacugaggacuagucccuguucccagagcccacuuuuuuuucuuuuuuugaaauaaaauagccugucuuucagaucuaaaaaaaaaaaaaaaaaaaaaaaaaaaaaaaaaaaaaaaaaaaaaaaaaaaaaaaaaaaaaaaaugcaucccccccccccccccccccccccccccccccaaaggcucuuuucagagccaccagaauu

SEQ ID NO: 215 - RNA, 2023 nt, Artificial Sequence
  mRNA product Design d-1 comprising derived and/or modified sequence from HRSV(A2)__F0 (opt1)
gggagacccgugacccggaaguuguacggcuacgcgacuuucccucccacaaacccucgcgcccuuccuuuccuacuugggcccggcagaaagcuuaccauggagcugcucauccugaaggccaacgccaucaccaccauccugacggcggugaccuucugcuucgccagcggccagaacaucaccgaggaguucuaccaguccacgugcagcgccgucuccaagggguaccucagcgcccugcgcaccggcugguacaccuccgugaucaccaucgagcugagcaacaucaaggagaacaagugcaacgggaccgacgccaaggugaagcucaucaagcaggagcuggacaaguacaagaacgcggucacggagcugcagcuccugaugcaguccacccccgccaccaacaaccgggcccgccgggagcugccgcgcuucaugaacuacacccucaacaacgccaagaagacgaacgugacccugagcaagaagcggaagcgccgguuccugggcuuccuccugggggugggcuccgcgaucgccagcggcgucgccguguccaaggugcugcaccucgagggggaggucaacaagaucaagagcgcccugcuguccaccaacaaggccguggugagccucuccaacggcgucagcgugcugaccuccaaggugcuggaccucaagaacuacaucgacaagcagcugcugcccaucgucaacaagcagagcugcuccaucagcaacaucgagacggugaucgaguuccagcagaagaacaaccgccuccuggagaucacccgggaguucagcgugaacgcgggggucaccacccccguguccacguacaugcugaccaacagcgagcuccugucccugaucaacgacaugcccaucaccaacgaccagaagaagcucaugagcaacaacgugcagaucguccgccagcaguccuacagcaucauguccaucaucaaggaggaggugcuggccuacgugguccagcugccgcucuacggcgugaucgacacccccugcuggaagcugcacacgagcccccugugcaccaccaacaccaaggagggguccaacaucugccucacgcggaccgaccgcggcugguacugcgacaacgccggcagcgucuccuucuucccccaggccgagaccugcaaggugcagagcaaccggguguucugcgacaccaugaacucccugacgcugccgagcgaggucaaccucugcaacguggacaucuucaaccccaaguacgacugcaagaucaugaccuccaagaccgacgugagcuccagcgucaucaccucccugggggccaucgugagcugcuacggcaagacgaagugcaccgcgagcaacaagaaccgcgggaucaucaagaccuucuccaacggcugcgacuacgugagcaacaagggcgucgacaccguguccguggggaacacccuguacuacgucaacaagcaggagggcaagagccucuacgugaagggggagcccaucaucaacuucuacgacccccugguguucccguccgacgaguucgacgccagcaucucccaggucaacgagaagaucaaccagagccuggccuucauccggaaguccgacgagcuccugcacaacgugaacgccggcaagagcacgaccaacaucaugaucaccaccaucaucaucgugaucaucgucauccugcugucccucaucgccguggggcugcugcucuacugcaaggcgcgcagcacgcccgugacccuguccaaggaccagcugagcggcaucaacaacaucgccuucuccaacugaggacuagucccuguucccagagcccacuuuuuuuucuuuuuuugaaauaaaauagccugucuuucagaucuaaaaaaaaaaaaaaaaaaaaaaaaaaaaaaaaaaaaaaaaaaaaaaaaaaaaaaaaaaaaaaaaugcaucccccccccccccccccccccccccccccccaaaggcucuuuucagagccaccagaauu

SEQ ID NO: 216 - RNA, 2023 nt, Artificial Sequence
  mRNA product Design d-1 comprising derived and/or modified sequence from HRSV(A2)__F0 (opt2)
gggagacccgugacccggaaguuguacggcuacgcgacuuucccucccacaaacccucgcgcccuuccuuuccuacuugggcccggcagaaagcuuaccauggagcuccucauccucaaggccaacgccaucaccaccauccucaccgccgucaccuucugcuucgccuccggccagaacaucaccgaggaguucuaccaguccaccugcuccgccgucuccaagggcuaccucuccgcccuccgcaccggcugguacaccuccgucaucaccaucgagcucuccaacaucaaggagaacaagugcaacggcaccgacgccaaggucaagcucaucaagcaggagcucgacaaguacaagaacgccgucaccgagcuccagcuccucaugcaguccacccccgccaccaacaaccgcgcccgccgcgagcucccccgcuucaugaacuacacccucaacaacgccaagaagaccaacgucacccucuccaagaagcgcaagcgccgcuuccucggcuuccuccucggcgucggcuccgccaucgccuccggcgucgccgucuccaagguccuccaccucgagggcgaggucaacaagaucaaguccgcccuccucuccaccaacaaggccgucgucucccucuccaacggcgucuccguccucaccuccaagguccucgaccucaagaacuacaucgacaagcagcuccuccccaucgucaacaagcaguccugcuccaucuccaacaucgagaccgucaucgaguuccagcagaagaacaaccgccuccucgagaucacccgcgaguucuccgucaacgccggcgucaccacccccgucuccaccuacaugcucaccaacuccgagcuccucucccucaucaacgacaugcccaucaccaacgaccagaagaagcucauguccaacaacguccagaucguccgccagcaguccuacuccaucauguccaucaucaaggaggagguccucgccuacgucguccagcucccccucuacggcgucaucgacacccccugcuggaagcuccacaccuccccccucugcaccaccaacaccaaggagggcuccaacaucugccucacccgcaccgaccgcggcugguacugcgacaacgccggcuccgucuccuucuucccccaggccgagaccugcaagguccaguccaaccgcgucuucugcgacaccaugaacucccucacccuccccuccgaggucaaccucugcaacgucgacaucuucaaccccaaguacgacugcaagaucaugaccuccaagaccgacgucuccuccuccgucaucaccucccucggcgccaucgucuccugcuacggcaagaccaagugcaccgccuccaacaagaaccgcggcaucaucaagaccuucuccaacggcugcgacuacgucuccaacaagggcgucgacaccgucuccgucggcaacacccucuacuacgucaacaagcaggagggcaagucccucuacgucaagggcgagcccaucaucaacuucuacgacccccucgucuuccccuccgacgaguucgacgccuccaucucccaggucaacgagaagaucaaccagucccucgccuucauccgcaaguccgacgagcuccuccacaacgucaacgccggcaaguccaccaccaacaucaugaucaccaccaucaucaucgucaucaucgucauccuccucucccucaucgccgucggccuccuccucuacugcaaggcccgcuccacccccgucacccucuccaaggaccagcucuccggcaucaacaacaucgccuucuccaacugaggacuagucccuguucccagagcccacuuuuuuuucuuuuuuugaaauaaaauagccugucuuucagaucuaaaaaaaaaaaaaaaaaaaaaaaaaaaaaaaaaaaaaaaaaaaaaaaaaaaaaaaaaaaaaaaaugcaucccccccccccccccccccccccccccccccaaaggcucuuuucagagccaccagaauu

SEQ ID NO: 217 - RNA, 2023 nt, Artificial Sequence
  mRNA product Design d-1 comprising derived and/or modified sequence from HRSV(A2)__F0 (opt3)
gggagacccgugacccggaaguuguacggcuacgcgacuuucccucccacaaacccucgcgcccuuccuuuccuacuugggcccggcagaaagcuuaccauggagcugcucauccuuaaggccaacgcuauuaccacaauacugacugcagugacguucugcuuugccagcggccagaauaucaccgaagaguucuaccaauccacauguucugcggucucaaaaggguauuugagugcuuuaagaacuggaugguacaccagcguuauuacaaucgaacuguccaacauuaaggagaauaaaugcaacgguaccgacgccaaggugaaacuaaucaagcaggaacucgauaaguauaaaaaugcaguaacugagcugcagcuucugaugcagucuacacccgccaccaacaauagggcucggcgcgaguugccucgauuuaugaacuacacgcucaauaacgcaaagaaaacuaaugugacccugucgaagaaacguaagagaagguuccugggcuuucucuuaggggucggaucagccauagcuagcggcguggccguuaguaaggugcugcaccuugaaggugaggucaacaaaaucaaguccgcguugcugucuacaaauaaagcagugguaagccuauccaacgggguuucagugcucacuucuaagguccuggaccuuaaaaauuauauugauaagcaacuguugccaaucgugaacaaacagagcuguucuauuuccaacaucgaaaccgugauagaguuccagcagaagaauaaccggcuccuggagauuacacgcgaauuuucagucaaugccggaguuaccacgccggugagcacuuacauguuaacaaacagugagcugcucucucuuaucaaugacaugcccauuaccaacgaucaaaagaaacugauguccaauaacguacagaucgugagacagcagagcuauucgaucaugucuauuauaaaggaagaggucuuggcuuacgugguucaacuaccucuguacggcgugaucgacacuccaugcuggaaacuccauacauccccacuguguaccacgaauaccaaggaaggcucaaacauuugccuuacaaggacugaucgggggugguauugugacaaugccggaagugucagcuucuuuccucaggcagagaccugcaaagugcaguccaaccgcguauucugugauacaaugaauagucugacuuugccaagcgagguuaaccucugcaauguggacaucuuuaaccccaaguacgauuguaagauaaugaccucaaaaacagacgucaguuccagcgugauuaccucucugggugcuaucgucucaugcuauggcaagacuaaaugcacggccaguaacaagaaucgagggaucauuaaaacauucagcaacggaugugauuacguguccaauaagggcguugacaccgugucuguagguaacacuuuauauuacgucaauaagcaagaagggaaaucgcuguaugugaagggagagccuaucauuaacuuuuacgacccccuaguuuucccgagcgaugaauuugacgcguccauaucacaggugaaugagaaaaucaaccagagucucgccuucauuagaaagucugaugaacugcuucacaaugucaacgcaggcaaaagcaccacaaauaucaugaucaccacuauuauaaucgugauuaucguaauuuugcugucccucaucgcugugggccugcuucuguacugcaaggccaggucaacacccguuacguugagcaaggaccagcucucugggauaaacaauaucgcuuucuccaacugaggacuagucccuguucccagagcccacuuuuuuuucuuuuuuugaaauaaaauagccugucuuucagaucuaaaaaaaaaaaaaaaaaaaaaaaaaaaaaaaaaaaaaaaaaaaaaaaaaaaaaaaaaaaaaaaaugcaucccccccccccccccccccccccccccccccaaaggcucuuuucagagccaccagaauu

SEQ ID NO: 218 - RNA, 2023 nt, Artificial Sequence
  mRNA product Design d-1 comprising derived and/or modified sequence from HRSV(A2)__F0 (opt4)
gggagacccgugacccggaaguuguacggcuacgcgacuuucccucccacaaacccucgcgcccuuccuuuccuacuugggcccggcagaaagcuuaccauggagcugcugauccugaaggccaacgccaucaccaccauccugaccgccgugaccuucugcuucgccagcggccagaacaucaccgaggaguucuaccagagcaccugcagcgccgugagcaagggcuaccugagcgcccugagaaccggcugguacaccagcgugaucaccaucgagcugagcaacaucaaggagaacaagugcaacggcaccgacgccaaggugaagcugaucaagcaggagcuggacaaguacaagaacgccgugaccgagcugcagcugcugaugcagagcacccccgccaccaacaacagagccagaagagagcugcccagauucaugaacuacacccugaacaacgccaagaagaccaacgugacccugagcaagaagagaaagagaagauuccugggcuuccugcugggcgugggcagcgccaucgccagcggcguggccgugagcaaggugcugcaccuggagggcgaggugaacaagaucaagagcgcccugcugagcaccaacaaggccguggugagccugagcaacggcgugagcgugcugaccagcaaggugcuggaccugaagaacuacaucgacaagcagcugcugcccaucgugaacaagcagagcugcagcaucagcaacaucgagaccgugaucgaguuccagcagaagaacaacagacugcuggagaucaccagagaguucagcgugaacgccggcgugaccacccccgugagcaccuacaugcugaccaacagcgagcugcugagccugaucaacgacaugcccaucaccaacgaccagaagaagcugaugagcaacaacgugcagaucgugagacagcagagcuacagcaucaugagcaucaucaaggaggaggugcuggccuacguggugcagcugccccuguacggcgugaucgacacccccugcuggaagcugcacaccagcccccugugcaccaccaacaccaaggagggcagcaacaucugccugaccagaaccgacagaggcugguacugcgacaacgccggcagcgugagcuucuucccccaggccgagaccugcaaggugcagagcaacagaguguucugcgacaccaugaacagccugacccugcccagcgaggugaaccugugcaacguggacaucuucaaccccaaguacgacugcaagaucaugaccagcaagaccgacgugagcagcagcgugaucaccagccugggcgccaucgugagcugcuacggcaagaccaagugcaccgccagcaacaagaacagaggcaucaucaagaccuucagcaacggcugcgacuacgugagcaacaagggcguggacaccgugagcgugggcaacacccuguacuacgugaacaagcaggagggcaagagccuguacgugaagggcgagcccaucaucaacuucuacgacccccugguguuccccagcgacgaguucgacgccagcaucagccaggugaacgagaagaucaaccagagccuggccuucaucagaaagagcgacgagcugcugcacaacgugaacgccggcaagagcaccaccaacaucaugaucaccaccaucaucaucgugaucaucgugauccugcugagccugaucgccgugggccugcugcuguacugcaaggccagaagcacccccgugacccugagcaaggaccagcugagcggcaucaacaacaucgccuucagcaacugaggacuagucccuguucccagagcccacuuuuuuuucuuuuuuugaaauaaaauagccugucuuucagaucuaaaaaaaaaaaaaaaaaaaaaaaaaaaaaaaaaaaaaaaaaaaaaaaaaaaaaaaaaaaaaaaaugcaucccccccccccccccccccccccccccccccaaaggcucuuuucagagccaccagaauu

SEQ ID NO: 219 - RNA, 2023 nt, Artificial Sequence
  mRNA product Design d-1 comprising derived and/or modified sequence from HRSV(A2)__F0 (opt5)
gggagacccgugacccggaaguuguacggcuacgcgacuuucccucccacaaacccucgcgcccuuccuuuccuacuugggcccggcagaaagcuuaccauggagcugcucauccugaaggccaacgcuauuaccacaauccuuacggccgugaccuucugcuuugcgagcggccagaauauuacagaagaguucuaccaauccaccuguucugcugucagcaaaggguaucuguccgcccucagaacaggaugguacaccucuguuaucacaauugaacugagcaacaucaaggagaauaaaugcaacggcaccgacgccaaggugaaacuuaucaagcaggaacuggauaaguauaaaaaugcugugacggagcuccagcugcugaugcaguccacccccgccacaaacaaucgggcucgcagagagcucccucgguuuaugaacuacacccugaauaacgccaagaaaacaaaugucacccuuucuaagaaacgcaagagacgguuccugggguuucuccugggagugggcagcgcgauugccuccgggguugcugugagcaagguccuucaccuggaaggagaggugaacaaaaucaagucugcccuccuguccacgaauaaagcuguugugagccugucuaacggcgucuccgugcucacaagcaaggugcuggaccuuaaaaauuauauugauaagcaacugcucccgaucgucaacaaacagucuuguuccauuagcaacaucgaaaccguuauugaguuccagcagaagaauaaccgccugcuugagaucacaagagaauuuuccgugaaugccggcgugaccacccccgucucuacauacaugcugacgaacagcgagcuccugucccugaucaaugacaugccuauuaccaacgaucaaaagaaacucaugagcaauaacgugcagaucguucggcagcagucuuauuccauuaugagcaucauuaaggaagaggugcuggcguacgucgugcaacuuccccuguacgggguuaucgacacaccuugcuggaaacuccauaccucuccccuguguacaaccaauacgaaggaaggaagcaacaucugccuuacacgcaccgauagaggcugguauugugacaaugccggguccgugucuuucuuuccucaggcugagaccugcaaaguccagagcaaccggguguucugugauacaaugaacucccugacccucccgagcgaggucaaucugugcaauguggacauuuuuaaccccaaguacgauuguaagaucaugacaucuaaaacggacguuuccagcucugugauuaccucccugggagccaucgucagcugcuauggcaagacaaaaugcaccgcuuccaacaagaaucgcgggauuaucaaaacauucucuaacggaugugauuacgugagcaauaagggcguugacaccguguccgucggcaacacgcucuauuacgugaauaagcaagaagggaaaucucuguaugugaagggagagccuaucauuaacuuuuacgacccccuuguuuucccuagcgaugaauuugacgccuccaucagccaggucaaugagaaaauuaaccagucucuggccuucaucagaaaguccgaugaacuccugcacaaugugaacgcuggcaaaagcaccacaaauauuaugaucaccacaauuaucaucgugauuaucgucauucugcuuucucucaucgcgguggggcugcugcucuacugcaaggcccgguccacccccguuacgcugagcaaggaccagcuuucuggaauuaacaauaucgcuuucagcaacugaggacuagucccuguucccagagcccacuuuuuuuucuuuuuuugaaauaaaauagccugucuuucagaucuaaaaaaaaaaaaaaaaaaaaaaaaaaaaaaaaaaaaaaaaaaaaaaaaaaaaaaaaaaaaaaaaugcaucccccccccccccccccccccccccccccccaaaggcucuuuucagagccaccagaauu

SEQ ID NO: 220 - RNA, 2023 nt, Artificial Sequence
  mRNA product Design d-1 comprising derived and/or modified sequence from HRSV(A2)__F0 (opt6)
gggagacccgugacccggaaguuguacggcuacgcgacuuucccucccacaaacccucgcgcccuuccuuuccuacuugggcccggcagaaagcuuaccauggaacuucuaauauuaaaagcuaacgcaaucacuacuaucuuaaccgcaguaacauucuguuuugcauccggccaaaacauaacagaagaauuuuaccaaucaacuugcucugcagucucaaaagguuaucuaucugcauuaagaacaggcugguacaccucaguaauaacgaucgaacuaucaaacaucaaagaaaacaaauguaauggaacagacgcaaaaguaaaacuaaucaaacaagaacuagacaaauacaaaaacgcaguaaccgaacuccaacuccucaugcaaaguacaccagcaacaaauaacagagcaagacgugaacuaccacguuuuaugaauuacacgcucaauaacgcaaaaaaaacaaauguuacccuaucaaaaaaacgaaaaagaagauuccucggauuccuacuaggcguaggcucagcaauagcuucaggaguagcaguaucaaaaguacuccaccucgaaggagaaguaaacaaaaucaaaagcgcucuccucucaacaaacaaagcaguuguuucacucucaaacggaguaucaguacuaaccucaaaaguacuugaccuaaaaaauuauauagacaaacaacuauuaccaauaguaaacaaacaaagcugcuccaucuccaacaucgagacagucauagaauuucaacaaaaaaauaaccgccuauuagaaauaaccagagaauuuucaguaaacgcaggaguaacuaccccaguaucaacauauauguuaacaaacucagaacuccuaagucuaaucaacgacaugccaauaaccaacgaccaaaaaaaacuaaugagcaacaauguacaaauaguucgucaacaaucuuacuccauaaugucuauaauaaaagaagaaguacucgccuauguaguccaacuaccacuauacggagucaucgauacaccaugcuggaaacuccacacauccccacucuguacuacuaacaccaaagaagguucaaauauaugccuaaccagaacagauagagguugguacugcgauaaugcaggaucaguauccuuuuucccccaagccgaaacaugcaaaguucaauccaauagaguauuuugugauacaaugaacucuuuaacccucccauccgaagucaaucuauguaacgucgacauauuuaacccaaaauacgauugcaaaauaaugacaucaaaaacagacgucucauccucaguuauaacguccuuaggcgcuauaguaucaugcuacggcaaaacaaaauguacagcaucaaacaaaaacagaggaaucauaaaaacuuucucuaacgguugcgacuauguauccaacaaaggugucgacacaguauccguaggcaacacccuuuacuauguuaauaaacaagaaggaaaaucucuauauguaaaaggcgaaccaauuauaaauuuuuacgacccccuugucuuucccucugacgaauuugacgcuuccauaucacaagucaacgaaaaaaucaaccaaucccucgcauucauacgcaaaucagacgaacuacuacauaacgucaacgcaggcaaauccacaacaaacauaaugauaaccacaaucauaauuguaauaauaguaauacuacuuucucuaauagcagucggauuacucuuauacuguaaagcucgaucaacaccagucacccucucuaaagaucaacuauccggaaucaacaacauagcuuucucaaacuaaggacuagucccuguucccagagcccacuuuuuuuucuuuuuuugaaauaaaauagccugucuuucagaucuaaaaaaaaaaaaaaaaaaaaaaaaaaaaaaaaaaaaaaaaaaaaaaaaaaaaaaaaaaaaaaaaugcaucccccccccccccccccccccccccccccccaaaggcucuuuucagagccaccagaauu

SEQ ID NO: 221 - RNA, 2023 nt, Artificial Sequence
  mRNA product Design d-1 comprising derived and/or modified sequence from HRSV(A2)__F0 (opt11)
gggagacccgugacccggaaguuguacggcuacgcgacuuucccucccacaaacccucgcgcccuuccuuuccuacuugggcccggcagaaagcuuaccauggaacuccucauacucaaagccaacgcaaucacaaccauacucaccgccgucaccuucugcuuugcaucuggccagaacaucacugaagaguucuaccaauccacaugcuccgccguaagcaaaggcuaccuauccgcccuacgcaccggcugguacaccagcguaaucaccauagaacucuccaauauaaaagaaaacaaaugcaacggcaccgacgcaaaagucaagcuaauaaaacaagaacucgacaaauacaaaaacgccguuaccgaacuccagcuacucaugcaaucgaccccagcaaccaacaaccgugcgagacgcgaacucccccgcuucaugaacuacacccuaaacaacgccaaaaagaccaacguaacucuauccaagaaacgcaaacgccgcuuccucggauuccuccucggcgucggcuccgcaaucgccagcggcgucgccguuagcaaaguccuucaccucgaaggagaaguaaacaaaauuaaaagcgcccucuuauccacaaacaaggccguaguaucccugucaaacggcgucuccguccuuacauccaaaguccucgaccucaagaacuacauagacaaacagcuacuacccauuguaaauaaacaaagcugcucaauuagcaacaucgaaaccguaaucgaguuccagcagaaaaacaacagacuucucgaaaucacccgcgaguucagcgucaacgccggcguaaccaccccugucucaacauacaugcuaaccaacagcgaacugcucucccucaucaacgacaugcccaucaccaacgaccaaaagaaacucaugagcaacaacguacaaaucgugcgccaacaguccuacucaauaaugucaaucaucaaagaagaagugcuagcauacgucguacaacuaccacucuacggcguaauagauacccccugcuggaagcuccauaccuccccacucuguaccaccaacaccaaagaaggcucaaacaucugccuaacgcgcacagaccguggaugguacugugacaacgccggcuccgucuccuucuucccucaagccgaaacaugcaaaguccaauccaacagagucuucugcgauaccaugaacucccugacacucccaagcgaagucaaccuuugcaacgucgauaucuuuaaccccaaauacgacugcaagaucaugacaucaaaaaccgacguauccuccucuguaauaaccucccuaggcgcaaucguaucaugcuacggcaaaaccaaauguaccgccuccaacaaaaaucgcggcaucaucaaaaccuucucgaacggcugcgacuacgucuccaacaaaggcguagacacaguuuccguaggcaacacccucuacuacgucaauaaacaggaaggcaagucccucuacgucaaaggcgaacccaucaucaauuucuacgacccccucguuuuccccuccgaugaguucgacgcaagcaucagccaggucaacgaaaagauaaaccagucccucgccuucauccgcaaaucagaugaacuccuucacaacguuaacgcaggcaagagcaccaccaacaucaugaucacaacuauaaucaucgucauaaucgucauccuacucucacuaaucgccgucggucuccuacuauauuguaaagcccgaucaacaccggucacacucuccaaagaccaacucuccggaaucaacaauaucgcuuucucgaacuaaggacuagucccuguucccagagcccacuuuuuuuucuuuuuuugaaauaaaauagccugucuuucagaucuaaaaaaaaaaaaaaaaaaaaaaaaaaaaaaaaaaaaaaaaaaaaaaaaaaaaaaaaaaaaaaaaugcaucccccccccccccccccccccccccccccccaaaggcucuuuucagagccaccagaauu

SEQ ID NO: 222 - RNA, 2078 nt, Artificial Sequence
  mRNA product Design d-2 comprising derived and/or modified sequence from HRSV(A2)__F0 (artificial)
gggagagcggcucggccauuuugucccagucaguccggaggcugcggcugcagaaguaccgccugcggaguaacugcaaagaagcuuaccauggaguugcuaauccucaaagcaaaugcaauuaccacaauccucacugcagucacauuuuguuuugcuucuggucaaaacaucacugaagaauuuuaucaaucaacaugcagugcaguuagcaaaggcuaucuuagugcucugagaacugguugguauaccaguguuauaacuauagaauuaaguaauaucaaggaaaauaaguguaauggaacagaugcuaagguaaaauugauaaaacaagaauuagauaaauauaaaaaugcuguaacagaauugcaguugcucaugcaaagcacaccagcaacaaacaaucgagccagaagagaacuaccaagguuuaugaauuauacacucaacaaugccaaaaaaaccaauguaacauuaagcaagaaaaggaaaagaagauuucuugguuuuuuguuagguguuggaucugcaaucgccaguggcguugcuguaucuaagguccugcaccuagaaggggaagugaacaagaucaaaagugcucuacuauccacaaacaaggcuguagucagcuuaucaaauggaguuagugucuuaaccagcaaaguguuagaccucaaaaacuauauagauaaacaauuguuaccuauugugaacaagcaaagcugcagcauaucaaauauagaaacugugauagaguuccaacaaaagaacaacagacuacuagagauuaccagggaauuuaguguuaaugcagguguaacuacaccuguaagcacuuacauguuaacuaauagugaauuauugucauuaaucaaugauaugccuauaacaaaugaucagaaaaaguuaauguccaacaauguucaaauaguuagacagcaaaguuacucuaucauguccauaauaaaagaggaagucuuagcauauguaguacaauuaccacuauaugguguuauagauacacccuguuggaaacuacacacauccccucuauguacaaccaacacaaaagaaggguccaacaucuguuuaacaagaacugacagaggaugguacugugacaaugcaggaucaguaucuuucuucccacaagcugaaacauguaaaguucaaucaaaucgaguauuuugugacacaaugaacaguuuaacauuaccaagugaaguaaaucucugcaauguugacauauucaaccccaaauaugauuguaaaauuaugacuucaaaaacagauguaagcagcuccguuaucacaucucuaggagccauugugucaugcuauggcaaaacuaaauguacagcauccaauaaaaaucguggaaucauaaagacauuuucuaacgggugcgauuauguaucaaauaaagggguggacacugugucuguagguaacacauuauauuauguaaauaagcaagaagguaaaagucucuauguaaaaggugaaccaauaauaaauuucuaugacccauuaguauuccccucugaugaauuugaugcaucaauaucucaagucaacgagaagauuaaccagagccuagcauuuauucguaaauccgaugaauuauuacauaauguaaaugcugguaaauccaccacaaauaucaugauaacuacuauaauuauagugauuauaguaauauuguuaucauuaauugcuguuggacugcucuuauacuguaaggccagaagcacaccagucacacuaagcaaagaucaacugagugguauaaauaauauugcauuuaguaacuaaggacuaguaauaaggaaacuguaugaaugucugugggcaggaagugaagagauccuucuguaaagguuuuuggaauuaugucugcugaauaauaaacuuuuuugaaauaauaaaucugguagaaaaaugagaucuaaaaaaaaaaaaaaaaaaaaaaaaaaaaaaaaaaaaaaaaaaaaaaaaaaaaaaaaaaaaaaaaugcaucccccccccccccccccccccccccccccccaaaggcucuuuucagagccaccagaauu

SEQ ID NO: 223 - RNA, 2078 nt, Artificial Sequence
  mRNA product Design d-2 comprising derived and/or modified sequence from HRSV(A2)__F0 (opt1)
gggagagcggcucggccauuuugucccagucaguccggaggcugcggcugcagaaguaccgccugcggaguaacugcaaagaagcuuaccauggagcugcucauccugaaggccaacgccaucaccaccauccugacggcggugaccuucugcuucgccagcggccagaacaucaccgaggaguucuaccaguccaccugcagcgccgucuccaagggguaccucagcgcccugcggacgggcugguacaccuccgugaucaccaucgagcugagcaacaucaaggagaacaagugcaacgggaccgacgccaaggugaagcucaucaagcaggagcuggacaaguacaagaacgcggucacggagcugcagcuccugaugcaguccaccccggcaaccaacaaccgcgcccggcgcgagcugccccgguucaugaacuacacccucaacaacgccaagaagacgaacgugacccugagcaagaagcgcaagcggcgcuuccugggcuuccuccugggggugggcuccgccaucgcgagcggcgucgccguguccaaggugcugcaccucgagggggaggucaacaagaucaagagcgcccugcuguccaccaacaaggccguggugagccucuccaacggcgucagcgugcugaccuccaaggugcuggaccucaagaacuacaucgacaagcagcugcugcccaucgucaacaagcagagcugcuccaucagcaacaucgagacggugaucgaguuccagcagaagaacaaccggcuccuggagaucacccgcgaguucagcgugaacgccggggucaccacccccguguccacguacaugcugaccaacagcgagcuccugucccugaucaacgacaugccgaucaccaacgaccagaagaagcucaugagcaacaacgugcagaucguccggcagcaguccuacagcaucauguccaucaucaaggaggaggugcuggcguacgugguccagcugccccucuacggcgugaucgacacccccugcuggaagcugcacacgagcccccugugcaccaccaacaccaaggagggguccaacaucugccucacgcgcaccgaccggggcugguacugcgacaacgccggcagcgucuccuucuucccgcaggccgagaccugcaaggugcagagcaaccgcguguucugcgacaccaugaacucccugacgcugcccagcgagguaaaccucugcaacgucgacaucuucaaccccaaguacgacugcaagaucaugaccuccaagaccgacgugagcuccagcgugaucaccucccugggggccaucgucagcugcuacggcaagacgaagugcaccgccagcaacaagaaccgggggaucaucaagaccuucuccaacggcugcgacuacgugagcaacaagggcguggacaccguguccgucgggaacacccuguacuacgugaacaagcaggagggcaagagccucuacgugaagggggagcccaucaucaacuucuacgacccgcuggucuuccccuccgacgaguucgacgcgagcaucucccaggugaacgagaagaucaaccagagccuggccuucauccgcaaguccgacgagcugcuccacaacgugaacgccggcaagagcacgaccaacaucaugaucaccaccaucaucaucgucaucaucgugauccugcugucccucaucgccguggggcugcugcucuacugcaaggcccggagcacgcccgucacccuguccaaggaccagcugagcggcaucaacaacaucgcguucuccaacugaggacuaguaauaaggaaacuguaugaaugucugugggcaggaagugaagagauccuucuguaaagguuuuuggaauuaugucugcugaauaauaaacuuuuuugaaauaauaaaucugguagaaaaaugagaucuaaaaaaaaaaaaaaaaaaaaaaaaaaaaaaaaaaaaaaaaaaaaaaaaaaaaaaaaaaaaaaaaugcaucccccccccccccccccccccccccccccccaaaggcucuuuucagagccaccagaauu

SEQ ID NO: 224 - RNA, 2078 nt, Artificial Sequence
  mRNA product Design d-2 comprising derived and/or modified sequence from HRSV(A2)__F0 (opt1)
gggagagcggcucggccauuuugucccagucaguccggaggcugcggcugcagaaguaccgccugcggaguaacugcaaagaagcuuaccauggagcugcucauccugaaggccaacgccaucaccaccauccugacggcggugaccuucugcuucgccagcggccagaacaucaccgaggaguucuaccaguccacgugcagcgccgucuccaagggguaccucagcgcccugcgcaccggcugguacaccuccgugaucaccaucgagcugagcaacaucaaggagaacaagugcaacgggaccgacgccaaggugaagcucaucaagcaggagcuggacaaguacaagaacgcggucacggagcugcagcuccugaugcaguccacccccgccaccaacaaccgggcccgccgggagcugccgcgcuucaugaacuacacccucaacaacgccaagaagacgaacgugacccugagcaagaagcggaagcgccgguuccugggcuuccuccugggggugggcuccgcgaucgccagcggcgucgccguguccaaggugcugcaccucgagggggaggucaacaagaucaagagcgcccugcuguccaccaacaaggccguggugagccucuccaacggcgucagcgugcugaccuccaaggugcuggaccucaagaacuacaucgacaagcagcugcugcccaucgucaacaagcagagcugcuccaucagcaacaucgagacggugaucgaguuccagcagaagaacaaccgccuccuggagaucacccgggaguucagcgugaacgcgggggucaccacccccguguccacguacaugcugaccaacagcgagcuccugucccugaucaacgacaugcccaucaccaacgaccagaagaagcucaugagcaacaacgugcagaucguccgccagcaguccuacagcaucauguccaucaucaaggaggaggugcuggccuacgugguccagcugccgcucuacggcgugaucgacacccccugcuggaagcugcacacgagcccccugugcaccaccaacaccaaggagggguccaacaucugccucacgcggaccgaccgcggcugguacugcgacaacgccggcagcgucuccuucuucccccaggccgagaccugcaaggugcagagcaaccggguguucugcgacaccaugaacucccugacgcugccgagcgaggucaaccucugcaacguggacaucuucaaccccaaguacgacugcaagaucaugaccuccaagaccgacgugagcuccagcgucaucaccucccugggggccaucgugagcugcuacggcaagacgaagugcaccgcgagcaacaagaaccgcgggaucaucaagaccuucuccaacggcugcgacuacgugagcaacaagggcgucgacaccguguccguggggaacacccuguacuacgucaacaagcaggagggcaagagccucuacgugaagggggagcccaucaucaacuucuacgacccccugguguucccguccgacgaguucgacgccagcaucucccaggucaacgagaagaucaaccagagccuggccuucauccggaaguccgacgagcuccugcacaacgugaacgccggcaagagcacgaccaacaucaugaucaccaccaucaucaucgugaucaucgucauccugcugucccucaucgccguggggcugcugcucuacugcaaggcgcgcagcacgcccgugacccuguccaaggaccagcugagcggcaucaacaacaucgccuucuccaacugaggacuaguaauaaggaaacuguaugaaugucugugggcaggaagugaagagauccuucuguaaagguuuuuggaauuaugucugcugaauaauaaacuuuuuugaaauaauaaaucugguagaaaaaugagaucuaaaaaaaaaaaaaaaaaaaaaaaaaaaaaaaaaaaaaaaaaaaaaaaaaaaaaaaaaaaaaaaaugcaucccccccccccccccccccccccccccccccaaaggcucuuuucagagccaccagaauu

SEQ ID NO: 225 - RNA, 2078 nt, Artificial Sequence
  mRNA product Design d-2 comprising derived and/or modified sequence from HRSV(A2)__F0 (opt2)
gggagagcggcucggccauuuugucccagucaguccggaggcugcggcugcagaaguaccgccugcggaguaacugcaaagaagcuuaccauggagcuccucauccucaaggccaacgccaucaccaccauccucaccgccgucaccuucugcuucgccuccggccagaacaucaccgaggaguucuaccaguccaccugcuccgccgucuccaagggcuaccucuccgcccuccgcaccggcugguacaccuccgucaucaccaucgagcucuccaacaucaaggagaacaagugcaacggcaccgacgccaaggucaagcucaucaagcaggagcucgacaaguacaagaacgccgucaccgagcuccagcuccucaugcaguccacccccgccaccaacaaccgcgcccgccgcgagcucccccgcuucaugaacuacacccucaacaacgccaagaagaccaacgucacccucuccaagaagcgcaagcgccgcuuccucggcuuccuccucggcgucggcuccgccaucgccuccggcgucgccgucuccaagguccuccaccucgagggcgaggucaacaagaucaaguccgcccuccucuccaccaacaaggccgucgucucccucuccaacggcgucuccguccucaccuccaagguccucgaccucaagaacuacaucgacaagcagcuccuccccaucgucaacaagcaguccugcuccaucuccaacaucgagaccgucaucgaguuccagcagaagaacaaccgccuccucgagaucacccgcgaguucuccgucaacgccggcgucaccacccccgucuccaccuacaugcucaccaacuccgagcuccucucccucaucaacgacaugcccaucaccaacgaccagaagaagcucauguccaacaacguccagaucguccgccagcaguccuacuccaucauguccaucaucaaggaggagguccucgccuacgucguccagcucccccucuacggcgucaucgacacccccugcuggaagcuccacaccuccccccucugcaccaccaacaccaaggagggcuccaacaucugccucacccgcaccgaccgcggcugguacugcgacaacgccggcuccgucuccuucuucccccaggccgagaccugcaagguccaguccaaccgcgucuucugcgacaccaugaacucccucacccuccccuccgaggucaaccucugcaacgucgacaucuucaaccccaaguacgacugcaagaucaugaccuccaagaccgacgucuccuccuccgucaucaccucccucggcgccaucgucuccugcuacggcaagaccaagugcaccgccuccaacaagaaccgcggcaucaucaagaccuucuccaacggcugcgacuacgucuccaacaagggcgucgacaccgucuccgucggcaacacccucuacuacgucaacaagcaggagggcaagucccucuacgucaagggcgagcccaucaucaacuucuacgacccccucgucuuccccuccgacgaguucgacgccuccaucucccaggucaacgagaagaucaaccagucccucgccuucauccgcaaguccgacgagcuccuccacaacgucaacgccggcaaguccaccaccaacaucaugaucaccaccaucaucaucgucaucaucgucauccuccucucccucaucgccgucggccuccuccucuacugcaaggcccgcuccacccccgucacccucuccaaggaccagcucuccggcaucaacaacaucgccuucuccaacugaggacuaguaauaaggaaacuguaugaaugucugugggcaggaagugaagagauccuucuguaaagguuuuuggaauuaugucugcugaauaauaaacuuuuuugaaauaauaaaucugguagaaaaaugagaucuaaaaaaaaaaaaaaaaaaaaaaaaaaaaaaaaaaaaaaaaaaaaaaaaaaaaaaaaaaaaaaaaugcaucccccccccccccccccccccccccccccccaaaggcucuuuucagagccaccagaauu

SEQ ID NO: 226 - RNA, 2078 nt, Artificial Sequence
  mRNA product Design d-2 comprising derived and/or modified sequence from HRSV(A2)__F0 (opt3)
gggagagcggcucggccauuuugucccagucaguccggaggcugcggcugcagaaguaccgccugcggaguaacugcaaagaagcuuaccauggagcugcucauccuuaaggccaacgcuauuaccacaauacugacugcagugacguucugcuuugccagcggccagaauaucaccgaagaguucuaccaauccacauguucugcggucucaaaaggguauuugagugcuuuaagaacuggaugguacaccagcguuauuacaaucgaacuguccaacauuaaggagaauaaaugcaacgguaccgacgccaaggugaaacuaaucaagcaggaacucgauaaguauaaaaaugcaguaacugagcugcagcuucugaugcagucuacacccgccaccaacaauagggcucggcgcgaguugccucgauuuaugaacuacacgcucaauaacgcaaagaaaacuaaugugacccugucgaagaaacguaagagaagguuccugggcuuucucuuaggggucggaucagccauagcuagcggcguggccguuaguaaggugcugcaccuugaaggugaggucaacaaaaucaaguccgcguugcugucuacaaauaaagcagugguaagccuauccaacgggguuucagugcucacuucuaagguccuggaccuuaaaaauuauauugauaagcaacuguugccaaucgugaacaaacagagcuguucuauuuccaacaucgaaaccgugauagaguuccagcagaagaauaaccggcuccuggagauuacacgcgaauuuucagucaaugccggaguuaccacgccggugagcacuuacauguuaacaaacagugagcugcucucucuuaucaaugacaugcccauuaccaacgaucaaaagaaacugauguccaauaacguacagaucgugagacagcagagcuauucgaucaugucuauuauaaaggaagaggucuuggcuuacgugguucaacuaccucuguacggcgugaucgacacuccaugcuggaaacuccauacauccccacuguguaccacgaauaccaaggaaggcucaaacauuugccuuacaaggacugaucgggggugguauugugacaaugccggaagugucagcuucuuuccucaggcagagaccugcaaagugcaguccaaccgcguauucugugauacaaugaauagucugacuuugccaagcgagguuaaccucugcaauguggacaucuuuaaccccaaguacgauuguaagauaaugaccucaaaaacagacgucaguuccagcgugauuaccucucugggugcuaucgucucaugcuauggcaagacuaaaugcacggccaguaacaagaaucgagggaucauuaaaacauucagcaacggaugugauuacguguccaauaagggcguugacaccgugucuguagguaacacuuuauauuacgucaauaagcaagaagggaaaucgcuguaugugaagggagagccuaucauuaacuuuuacgacccccuaguuuucccgagcgaugaauuugacgcguccauaucacaggugaaugagaaaaucaaccagagucucgccuucauuagaaagucugaugaacugcuucacaaugucaacgcaggcaaaagcaccacaaauaucaugaucaccacuauuauaaucgugauuaucguaauuuugcugucccucaucgcugugggccugcuucuguacugcaaggccaggucaacacccguuacguugagcaaggaccagcucucugggauaaacaauaucgcuuucuccaacugaggacuaguaauaaggaaacuguaugaaugucugugggcaggaagugaagagauccuucuguaaagguuuuuggaauuaugucugcugaauaauaaacuuuuuugaaauaauaaaucugguagaaaaaugagaucuaaaaaaaaaaaaaaaaaaaaaaaaaaaaaaaaaaaaaaaaaaaaaaaaaaaaaaaaaaaaaaaaugcaucccccccccccccccccccccccccccccccaaaggcucuuuucagagccaccagaauu

SEQ ID NO: 227 - RNA, 2078 nt, Artificial Sequence
  mRNA product Design d-2 comprising derived and/or modified sequence from HRSV(A2)__F0 (opt4)
gggagagcggcucggccauuuugucccagucaguccggaggcugcggcugcagaaguaccgccugcggaguaacugcaaagaagcuuaccauggagcugcugauccugaaggccaacgccaucaccaccauccugaccgccgugaccuucugcuucgccagcggccagaacaucaccgaggaguucuaccagagcaccugcagcgccgugagcaagggcuaccugagcgcccugagaaccggcugguacaccagcgugaucaccaucgagcugagcaacaucaaggagaacaagugcaacggcaccgacgccaaggugaagcugaucaagcaggagcuggacaaguacaagaacgccgugaccgagcugcagcugcugaugcagagcacccccgccaccaacaacagagccagaagagagcugcccagauucaugaacuacacccugaacaacgccaagaagaccaacgugacccugagcaagaagagaaagagaagauuccugggcuuccugcugggcgugggcagcgccaucgccagcggcguggccgugagcaaggugcugcaccuggagggcgaggugaacaagaucaagagcgcccugcugagcaccaacaaggccguggugagccugagcaacggcgugagcgugcugaccagcaaggugcuggaccugaagaacuacaucgacaagcagcugcugcccaucgugaacaagcagagcugcagcaucagcaacaucgagaccgugaucgaguuccagcagaagaacaacagacugcuggagaucaccagagaguucagcgugaacgccggcgugaccacccccgugagcaccuacaugcugaccaacagcgagcugcugagccugaucaacgacaugcccaucaccaacgaccagaagaagcugaugagcaacaacgugcagaucgugagacagcagagcuacagcaucaugagcaucaucaaggaggaggugcuggccuacguggugcagcugccccuguacggcgugaucgacacccccugcuggaagcugcacaccagcccccugugcaccaccaacaccaaggagggcagcaacaucugccugaccagaaccgacagaggcugguacugcgacaacgccggcagcgugagcuucuucccccaggccgagaccugcaaggugcagagcaacagaguguucugcgacaccaugaacagccugacccugcccagcgaggugaaccugugcaacguggacaucuucaaccccaaguacgacugcaagaucaugaccagcaagaccgacgugagcagcagcgugaucaccagccugggcgccaucgugagcugcuacggcaagaccaagugcaccgccagcaacaagaacagaggcaucaucaagaccuucagcaacggcugcgacuacgugagcaacaagggcguggacaccgugagcgugggcaacacccuguacuacgugaacaagcaggagggcaagagccuguacgugaagggcgagcccaucaucaacuucuacgacccccugguguuccccagcgacgaguucgacgccagcaucagccaggugaacgagaagaucaaccagagccuggccuucaucagaaagagcgacgagcugcugcacaacgugaacgccggcaagagcaccaccaacaucaugaucaccaccaucaucaucgugaucaucgugauccugcugagccugaucgccgugggccugcugcuguacugcaaggccagaagcacccccgugacccugagcaaggaccagcugagcggcaucaacaacaucgccuucagcaacugaggacuaguaauaaggaaacuguaugaaugucugugggcaggaagugaagagauccuucuguaaagguuuuuggaauuaugucugcugaauaauaaacuuuuuugaaauaauaaaucugguagaaaaaugagaucuaaaaaaaaaaaaaaaaaaaaaaaaaaaaaaaaaaaaaaaaaaaaaaaaaaaaaaaaaaaaaaaaugcaucccccccccccccccccccccccccccccccaaaggcucuuuucagagccaccagaauu

SEQ ID NO: 228 - RNA, 2078 nt, Artificial Sequence
  mRNA product Design d-2 comprising derived and/or modified sequence from HRSV(A2)__F0 (opt5)
gggagagcggcucggccauuuugucccagucaguccggaggcugcggcugcagaaguaccgccugcggaguaacugcaaagaagcuuaccauggagcugcucauccugaaggccaacgcuauuaccacaauccuuacggccgugaccuucugcuuugcgagcggccagaauauuacagaagaguucuaccaauccaccuguucugcugucagcaaaggguaucuguccgcccucagaacaggaugguacaccucuguuaucacaauugaacugagcaacaucaaggagaauaaaugcaacggcaccgacgccaaggugaaacuuaucaagcaggaacuggauaaguauaaaaaugcugugacggagcuccagcugcugaugcaguccacccccgccacaaacaaucgggcucgcagagagcucccucgguuuaugaacuacacccugaauaacgccaagaaaacaaaugucacccuuucuaagaaacgcaagagacgguuccugggguuucuccugggagugggcagcgcgauugccuccgggguugcugugagcaagguccuucaccuggaaggagaggugaacaaaaucaagucugcccuccuguccacgaauaaagcuguugugagccugucuaacggcgucuccgugcucacaagcaaggugcuggaccuuaaaaauuauauugauaagcaacugcucccgaucgucaacaaacagucuuguuccauuagcaacaucgaaaccguuauugaguuccagcagaagaauaaccgccugcuugagaucacaagagaauuuuccgugaaugccggcgugaccacccccgucucuacauacaugcugacgaacagcgagcuccugucccugaucaaugacaugccuauuaccaacgaucaaaagaaacucaugagcaauaacgugcagaucguucggcagcagucuuauuccauuaugagcaucauuaaggaagaggugcuggcguacgucgugcaacuuccccuguacgggguuaucgacacaccuugcuggaaacuccauaccucuccccuguguacaaccaauacgaaggaaggaagcaacaucugccuuacacgcaccgauagaggcugguauugugacaaugccggguccgugucuuucuuuccucaggcugagaccugcaaaguccagagcaaccggguguucugugauacaaugaacucccugacccucccgagcgaggucaaucugugcaauguggacauuuuuaaccccaaguacgauuguaagaucaugacaucuaaaacggacguuuccagcucugugauuaccucccugggagccaucgucagcugcuauggcaagacaaaaugcaccgcuuccaacaagaaucgcgggauuaucaaaacauucucuaacggaugugauuacgugagcaauaagggcguugacaccguguccgucggcaacacgcucuauuacgugaauaagcaagaagggaaaucucuguaugugaagggagagccuaucauuaacuuuuacgacccccuuguuuucccuagcgaugaauuugacgccuccaucagccaggucaaugagaaaauuaaccagucucuggccuucaucagaaaguccgaugaacuccugcacaaugugaacgcuggcaaaagcaccacaaauauuaugaucaccacaauuaucaucgugauuaucgucauucugcuuucucucaucgcgguggggcugcugcucuacugcaaggcccgguccacccccguuacgcugagcaaggaccagcuuucuggaauuaacaauaucgcuuucagcaacugaggacuaguaauaaggaaacuguaugaaugucugugggcaggaagugaagagauccuucuguaaagguuuuuggaauuaugucugcugaauaauaaacuuuuuugaaauaauaaaucugguagaaaaaugagaucuaaaaaaaaaaaaaaaaaaaaaaaaaaaaaaaaaaaaaaaaaaaaaaaaaaaaaaaaaaaaaaaaugcaucccccccccccccccccccccccccccccccaaaggcucuuuucagagccaccagaauu

SEQ ID NO: 229 - RNA, 2078 nt, Artificial Sequence
  mRNA product Design d-2 comprising derived and/or modified sequence from HRSV(A2)__F0 (opt6)
gggagagcggcucggccauuuugucccagucaguccggaggcugcggcugcagaaguaccgccugcggaguaacugcaaagaagcuuaccauggaacuucuaauauuaaaagcuaacgcaaucacuacuaucuuaaccgcaguaacauucuguuuugcauccggccaaaacauaacagaagaauuuuaccaaucaacuugcucugcagucucaaaagguuaucuaucugcauuaagaacaggcugguacaccucaguaauaacgaucgaacuaucaaacaucaaagaaaacaaauguaauggaacagacgcaaaaguaaaacuaaucaaacaagaacuagacaaauacaaaaacgcaguaaccgaacuccaacuccucaugcaaaguacaccagcaacaaauaacagagcaagacgugaacuaccacguuuuaugaauuacacgcucaauaacgcaaaaaaaacaaauguuacccuaucaaaaaaacgaaaaagaagauuccucggauuccuacuaggcguaggcucagcaauagcuucaggaguagcaguaucaaaaguacuccaccucgaaggagaaguaaacaaaaucaaaagcgcucuccucucaacaaacaaagcaguuguuucacucucaaacggaguaucaguacuaaccucaaaaguacuugaccuaaaaaauuauauagacaaacaacuauuaccaauaguaaacaaacaaagcugcuccaucuccaacaucgagacagucauagaauuucaacaaaaaaauaaccgccuauuagaaauaaccagagaauuuucaguaaacgcaggaguaacuaccccaguaucaacauauauguuaacaaacucagaacuccuaagucuaaucaacgacaugccaauaaccaacgaccaaaaaaaacuaaugagcaacaauguacaaauaguucgucaacaaucuuacuccauaaugucuauaauaaaagaagaaguacucgccuauguaguccaacuaccacuauacggagucaucgauacaccaugcuggaaacuccacacauccccacucuguacuacuaacaccaaagaagguucaaauauaugccuaaccagaacagauagagguugguacugcgauaaugcaggaucaguauccuuuuucccccaagccgaaacaugcaaaguucaauccaauagaguauuuugugauacaaugaacucuuuaacccucccauccgaagucaaucuauguaacgucgacauauuuaacccaaaauacgauugcaaaauaaugacaucaaaaacagacgucucauccucaguuauaacguccuuaggcgcuauaguaucaugcuacggcaaaacaaaauguacagcaucaaacaaaaacagaggaaucauaaaaacuuucucuaacgguugcgacuauguauccaacaaaggugucgacacaguauccguaggcaacacccuuuacuauguuaauaaacaagaaggaaaaucucuauauguaaaaggcgaaccaauuauaaauuuuuacgacccccuugucuuucccucugacgaauuugacgcuuccauaucacaagucaacgaaaaaaucaaccaaucccucgcauucauacgcaaaucagacgaacuacuacauaacgucaacgcaggcaaauccacaacaaacauaaugauaaccacaaucauaauuguaauaauaguaauacuacuuucucuaauagcagucggauuacucuuauacuguaaagcucgaucaacaccagucacccucucuaaagaucaacuauccggaaucaacaacauagcuuucucaaacuaaggacuaguaauaaggaaacuguaugaaugucugugggcaggaagugaagagauccuucuguaaagguuuuuggaauuaugucugcugaauaauaaacuuuuuugaaauaauaaaucugguagaaaaaugagaucuaaaaaaaaaaaaaaaaaaaaaaaaaaaaaaaaaaaaaaaaaaaaaaaaaaaaaaaaaaaaaaaaugcaucccccccccccccccccccccccccccccccaaaggcucuuuucagagccaccagaauu

SEQ ID NO: 230 - RNA, 2078 nt, Artificial Sequence
  mRNA product Design d-2 comprising derived and/or modified sequence from HRSV(A2)__F0 (opt11)
gggagagcggcucggccauuuugucccagucaguccggaggcugcggcugcagaaguaccgccugcggaguaacugcaaagaagcuuaccauggaacuccucauacucaaagccaacgcaaucacaaccauacucaccgccgucaccuucugcuuugcaucuggccagaacaucacugaagaguucuaccaauccacaugcuccgccguaagcaaaggcuaccuauccgcccuacgcaccggcugguacaccagcguaaucaccauagaacucuccaauauaaaagaaaacaaaugcaacggcaccgacgcaaaagucaagcuaauaaaacaagaacucgacaaauacaaaaacgccguuaccgaacuccagcuacucaugcaaucgaccccagcaaccaacaaccgugcgagacgcgaacucccccgcuucaugaacuacacccuaaacaacgccaaaaagaccaacguaacucuauccaagaaacgcaaacgccgcuuccucggauuccuccucggcgucggcuccgcaaucgccagcggcgucgccguuagcaaaguccuucaccucgaaggagaaguaaacaaaauuaaaagcgcccucuuauccacaaacaaggccguaguaucccugucaaacggcgucuccguccuuacauccaaaguccucgaccucaagaacuacauagacaaacagcuacuacccauuguaaauaaacaaagcugcucaauuagcaacaucgaaaccguaaucgaguuccagcagaaaaacaacagacuucucgaaaucacccgcgaguucagcgucaacgccggcguaaccaccccugucucaacauacaugcuaaccaacagcgaacugcucucccucaucaacgacaugcccaucaccaacgaccaaaagaaacucaugagcaacaacguacaaaucgugcgccaacaguccuacucaauaaugucaaucaucaaagaagaagugcuagcauacgucguacaacuaccacucuacggcguaauagauacccccugcuggaagcuccauaccuccccacucuguaccaccaacaccaaagaaggcucaaacaucugccuaacgcgcacagaccguggaugguacugugacaacgccggcuccgucuccuucuucccucaagccgaaacaugcaaaguccaauccaacagagucuucugcgauaccaugaacucccugacacucccaagcgaagucaaccuuugcaacgucgauaucuuuaaccccaaauacgacugcaagaucaugacaucaaaaaccgacguauccuccucuguaauaaccucccuaggcgcaaucguaucaugcuacggcaaaaccaaauguaccgccuccaacaaaaaucgcggcaucaucaaaaccuucucgaacggcugcgacuacgucuccaacaaaggcguagacacaguuuccguaggcaacacccucuacuacgucaauaaacaggaaggcaagucccucuacgucaaaggcgaacccaucaucaauuucuacgacccccucguuuuccccuccgaugaguucgacgcaagcaucagccaggucaacgaaaagauaaaccagucccucgccuucauccgcaaaucagaugaacuccuucacaacguuaacgcaggcaagagcaccaccaacaucaugaucacaacuauaaucaucgucauaaucgucauccuacucucacuaaucgccgucggucuccuacuauauuguaaagcccgaucaacaccggucacacucuccaaagaccaacucuccggaaucaacaauaucgcuuucucgaacuaaggacuaguaauaaggaaacuguaugaaugucugugggcaggaagugaagagauccuucuguaaagguuuuuggaauuaugucugcugaauaauaaacuuuuuugaaauaauaaaucugguagaaaaaugagaucuaaaaaaaaaaaaaaaaaaaaaaaaaaaaaaaaaaaaaaaaaaaaaaaaaaaaaaaaaaaaaaaaugcaucccccccccccccccccccccccccccccccaaaggcucuuuucagagccaccagaauu

SEQ ID NO: 231 - RNA, 2394 nt, Artificial Sequence
  mRNA product Design d-3 comprising derived and/or modified sequence from HRSV(A2)__F0 (artificial)
gggagagggcgcuuggcuugcaaggacccugagcugcggcauugaagcacacccaacccaacucgacugaagucagccucacugaaccggaucugagaaucuucucucucugggcuugccagggcucuccgaaccuagcuagcauccucuucaauuccaacuagaaagcuuaccauggaguugcuaauccucaaagcaaaugcaauuaccacaauccucacugcagucacauuuuguuuugcuucuggucaaaacaucacugaagaauuuuaucaaucaacaugcagugcaguuagcaaaggcuaucuuagugcucugagaacugguugguauaccaguguuauaacuauagaauuaaguaauaucaaggaaaauaaguguaauggaacagaugcuaagguaaaauugauaaaacaagaauuagauaaauauaaaaaugcuguaacagaauugcaguugcucaugcaaagcacaccagcaacaaacaaucgagccagaagagaacuaccaagguuuaugaauuauacacucaacaaugccaaaaaaaccaauguaacauuaagcaagaaaaggaaaagaagauuucuugguuuuuuguuagguguuggaucugcaaucgccaguggcguugcuguaucuaagguccugcaccuagaaggggaagugaacaagaucaaaagugcucuacuauccacaaacaaggcuguagucagcuuaucaaauggaguuagugucuuaaccagcaaaguguuagaccucaaaaacuauauagauaaacaauuguuaccuauugugaacaagcaaagcugcagcauaucaaauauagaaacugugauagaguuccaacaaaagaacaacagacuacuagagauuaccagggaauuuaguguuaaugcagguguaacuacaccuguaagcacuuacauguuaacuaauagugaauuauugucauuaaucaaugauaugccuauaacaaaugaucagaaaaaguuaauguccaacaauguucaaauaguuagacagcaaaguuacucuaucauguccauaauaaaagaggaagucuuagcauauguaguacaauuaccacuauaugguguuauagauacacccuguuggaaacuacacacauccccucuauguacaaccaacacaaaagaaggguccaacaucuguuuaacaagaacugacagaggaugguacugugacaaugcaggaucaguaucuuucuucccacaagcugaaacauguaaaguucaaucaaaucgaguauuuugugacacaaugaacaguuuaacauuaccaagugaaguaaaucucugcaauguugacauauucaaccccaaauaugauuguaaaauuaugacuucaaaaacagauguaagcagcuccguuaucacaucucuaggagccauugugucaugcuauggcaaaacuaaauguacagcauccaauaaaaaucguggaaucauaaagacauuuucuaacgggugcgauuauguaucaaauaaagggguggacacugugucuguagguaacacauuauauuauguaaauaagcaagaagguaaaagucucuauguaaaaggugaaccaauaauaaauuucuaugacccauuaguauuccccucugaugaauuugaugcaucaauaucucaagucaacgagaagauuaaccagagccuagcauuuauucguaaauccgaugaauuauuacauaauguaaaugcugguaaauccaccacaaauaucaugauaacuacuauaauuauagugauuauaguaauauuguuaucauuaauugcuguuggacugcucuuauacuguaaggccagaagcacaccagucacacuaagcaaagaucaacugagugguauaaauaauauugcauuuaguaacuaaggacuagugaagggaacacccaaauuuaauucagccuuaagcacaauuaauuaagagugaaacguaauuguacaagcaguuggucacccaccauagggcaugaucaacaccgcaaccuuuccuuuuucccccagugauucugaaaaaccccucuucccuucagcuugcuuagauguuccaaauuuaguaagcuuaaggcggccuacagaagaaaaagaaaaaaaaggccacaaaaguucccucucacuuucaguaaauaaaauaaaagcagcaacagaaauaaagaaauaaaugaaauucaaaaugaaauaaauauuguguugugcagcauuaaaaaaucaauaaaaauuaaaaaugagcaagaucuaaaaaaaaaaaaaaaaaaaaaaaaaaaaaaaaaaaaaaaaaaaaaaaaaaaaaaaaaaaaaaaaugcaucccccccccccccccccccccccccccccccaaaggcucuuuucagagccaccagaauu

SEQ ID NO: 232 - RNA, 2394 nt, Artificial Sequence
  mRNA product Design d-3 comprising derived and/or modified sequence from HRSV(A2)__F0 (opt1)
gggagagggcgcuuggcuugcaaggacccugagcugcggcauugaagcacacccaacccaacucgacugaagucagccucacugaaccggaucugagaaucuucucucucugggcuugccagggcucuccgaaccuagcuagcauccucuucaauuccaacuagaaagcuuaccauggagcugcucauccugaaggccaacgccaucaccaccauccugacggcggugaccuucugcuucgccagcggccagaacaucaccgaggaguucuaccaguccaccugcagcgccgucuccaagggguaccucagcgcccugcggacgggcugguacaccuccgugaucaccaucgagcugagcaacaucaaggagaacaagugcaacgggaccgacgccaaggugaagcucaucaagcaggagcuggacaaguacaagaacgcggucacggagcugcagcuccugaugcaguccaccccggcaaccaacaaccgcgcccggcgcgagcugccccgguucaugaacuacacccucaacaacgccaagaagacgaacgugacccugagcaagaagcgcaagcggcgcuuccugggcuuccuccugggggugggcuccgccaucgcgagcggcgucgccguguccaaggugcugcaccucgagggggaggucaacaagaucaagagcgcccugcuguccaccaacaaggccguggugagccucuccaacggcgucagcgugcugaccuccaaggugcuggaccucaagaacuacaucgacaagcagcugcugcccaucgucaacaagcagagcugcuccaucagcaacaucgagacggugaucgaguuccagcagaagaacaaccggcuccuggagaucacccgcgaguucagcgugaacgccggggucaccacccccguguccacguacaugcugaccaacagcgagcuccugucccugaucaacgacaugccgaucaccaacgaccagaagaagcucaugagcaacaacgugcagaucguccggcagcaguccuacagcaucauguccaucaucaaggaggaggugcuggcguacgugguccagcugccccucuacggcgugaucgacacccccugcuggaagcugcacacgagcccccugugcaccaccaacaccaaggagggguccaacaucugccucacgcgcaccgaccggggcugguacugcgacaacgccggcagcgucuccuucuucccgcaggccgagaccugcaaggugcagagcaaccgcguguucugcgacaccaugaacucccugacgcugcccagcgagguaaaccucugcaacgucgacaucuucaaccccaaguacgacugcaagaucaugaccuccaagaccgacgugagcuccagcgugaucaccucccugggggccaucgucagcugcuacggcaagacgaagugcaccgccagcaacaagaaccgggggaucaucaagaccuucuccaacggcugcgacuacgugagcaacaagggcguggacaccguguccgucgggaacacccuguacuacgugaacaagcaggagggcaagagccucuacgugaagggggagcccaucaucaacuucuacgacccgcuggucuuccccuccgacgaguucgacgcgagcaucucccaggugaacgagaagaucaaccagagccuggccuucauccgcaaguccgacgagcugcuccacaacgugaacgccggcaagagcacgaccaacaucaugaucaccaccaucaucaucgucaucaucgugauccugcugucccucaucgccguggggcugcugcucuacugcaaggcccggagcacgcccgucacccuguccaaggaccagcugagcggcaucaacaacaucgcguucuccaacugaggacuagugaagggaacacccaaauuuaauucagccuuaagcacaauuaauuaagagugaaacguaauuguacaagcaguuggucacccaccauagggcaugaucaacaccgcaaccuuuccuuuuucccccagugauucugaaaaaccccucuucccuucagcuugcuuagauguuccaaauuuaguaagcuuaaggcggccuacagaagaaaaagaaaaaaaaggccacaaaaguucccucucacuuucaguaaauaaaauaaaagcagcaacagaaauaaagaaauaaaugaaauucaaaaugaaauaaauauuguguugugcagcauuaaaaaaucaauaaaaauuaaaaaugagcaagaucuaaaaaaaaaaaaaaaaaaaaaaaaaaaaaaaaaaaaaaaaaaaaaaaaaaaaaaaaaaaaaaaaugcaucccccccccccccccccccccccccccccccaaaggcucuuuucagagccaccagaauu

SEQ ID NO: 233 - RNA, 2394 nt, Artificial Sequence
  mRNA product Design d-3 comprising derived and/or modified sequence from HRSV(A2)__F0 (opt1)
gggagagggcgcuuggcuugcaaggacccugagcugcggcauugaagcacacccaacccaacucgacugaagucagccucacugaaccggaucugagaaucuucucucucugggcuugccagggcucuccgaaccuagcuagcauccucuucaauuccaacuagaaagcuuaccauggagcugcucauccugaaggccaacgccaucaccaccauccugacggcggugaccuucugcuucgccagcggccagaacaucaccgaggaguucuaccaguccacgugcagcgccgucuccaagggguaccucagcgcccugcgcaccggcugguacaccuccgugaucaccaucgagcugagcaacaucaaggagaacaagugcaacgggaccgacgccaaggugaagcucaucaagcaggagcuggacaaguacaagaacgcggucacggagcugcagcuccugaugcaguccacccccgccaccaacaaccgggcccgccgggagcugccgcgcuucaugaacuacacccucaacaacgccaagaagacgaacgugacccugagcaagaagcggaagcgccgguuccugggcuuccuccugggggugggcuccgcgaucgccagcggcgucgccguguccaaggugcugcaccucgagggggaggucaacaagaucaagagcgcccugcuguccaccaacaaggccguggugagccucuccaacggcgucagcgugcugaccuccaaggugcuggaccucaagaacuacaucgacaagcagcugcugcccaucgucaacaagcagagcugcuccaucagcaacaucgagacggugaucgaguuccagcagaagaacaaccgccuccuggagaucacccgggaguucagcgugaacgcgggggucaccacccccguguccacguacaugcugaccaacagcgagcuccugucccugaucaacgacaugcccaucaccaacgaccagaagaagcucaugagcaacaacgugcagaucguccgccagcaguccuacagcaucauguccaucaucaaggaggaggugcuggccuacgugguccagcugccgcucuacggcgugaucgacacccccugcuggaagcugcacacgagcccccugugcaccaccaacaccaaggagggguccaacaucugccucacgcggaccgaccgcggcugguacugcgacaacgccggcagcgucuccuucuucccccaggccgagaccugcaaggugcagagcaaccggguguucugcgacaccaugaacucccugacgcugccgagcgaggucaaccucugcaacguggacaucuucaaccccaaguacgacugcaagaucaugaccuccaagaccgacgugagcuccagcgucaucaccucccugggggccaucgugagcugcuacggcaagacgaagugcaccgcgagcaacaagaaccgcgggaucaucaagaccuucuccaacggcugcgacuacgugagcaacaagggcgucgacaccguguccguggggaacacccuguacuacgucaacaagcaggagggcaagagccucuacgugaagggggagcccaucaucaacuucuacgacccccugguguucccguccgacgaguucgacgccagcaucucccaggucaacgagaagaucaaccagagccuggccuucauccggaaguccgacgagcuccugcacaacgugaacgccggcaagagcacgaccaacaucaugaucaccaccaucaucaucgugaucaucgucauccugcugucccucaucgccguggggcugcugcucuacugcaaggcgcgcagcacgcccgugacccuguccaaggaccagcugagcggcaucaacaacaucgccuucuccaacugaggacuagugaagggaacacccaaauuuaauucagccuuaagcacaauuaauuaagagugaaacguaauuguacaagcaguuggucacccaccauagggcaugaucaacaccgcaaccuuuccuuuuucccccagugauucugaaaaaccccucuucccuucagcuugcuuagauguuccaaauuuaguaagcuuaaggcggccuacagaagaaaaagaaaaaaaaggccacaaaaguucccucucacuuucaguaaauaaaauaaaagcagcaacagaaauaaagaaauaaaugaaauucaaaaugaaauaaauauuguguugugcagcauuaaaaaaucaauaaaaauuaaaaaugagcaagaucuaaaaaaaaaaaaaaaaaaaaaaaaaaaaaaaaaaaaaaaaaaaaaaaaaaaaaaaaaaaaaaaaugcaucccccccccccccccccccccccccccccccaaaggcucuuuucagagccaccagaauu

SEQ ID NO: 234 - RNA, 2394 nt, Artificial Sequence
  mRNA product Design d-3 comprising derived and/or modified sequence from HRSV(A2)__F0 (opt2)
gggagagggcgcuuggcuugcaaggacccugagcugcggcauugaagcacacccaacccaacucgacugaagucagccucacugaaccggaucugagaaucuucucucucugggcuugccagggcucuccgaaccuagcuagcauccucuucaauuccaacuagaaagcuuaccauggagcuccucauccucaaggccaacgccaucaccaccauccucaccgccgucaccuucugcuucgccuccggccagaacaucaccgaggaguucuaccaguccaccugcuccgccgucuccaagggcuaccucuccgcccuccgcaccggcugguacaccuccgucaucaccaucgagcucuccaacaucaaggagaacaagugcaacggcaccgacgccaaggucaagcucaucaagcaggagcucgacaaguacaagaacgccgucaccgagcuccagcuccucaugcaguccacccccgccaccaacaaccgcgcccgccgcgagcucccccgcuucaugaacuacacccucaacaacgccaagaagaccaacgucacccucuccaagaagcgcaagcgccgcuuccucggcuuccuccucggcgucggcuccgccaucgccuccggcgucgccgucuccaagguccuccaccucgagggcgaggucaacaagaucaaguccgcccuccucuccaccaacaaggccgucgucucccucuccaacggcgucuccguccucaccuccaagguccucgaccucaagaacuacaucgacaagcagcuccuccccaucgucaacaagcaguccugcuccaucuccaacaucgagaccgucaucgaguuccagcagaagaacaaccgccuccucgagaucacccgcgaguucuccgucaacgccggcgucaccacccccgucuccaccuacaugcucaccaacuccgagcuccucucccucaucaacgacaugcccaucaccaacgaccagaagaagcucauguccaacaacguccagaucguccgccagcaguccuacuccaucauguccaucaucaaggaggagguccucgccuacgucguccagcucccccucuacggcgucaucgacacccccugcuggaagcuccacaccuccccccucugcaccaccaacaccaaggagggcuccaacaucugccucacccgcaccgaccgcggcugguacugcgacaacgccggcuccgucuccuucuucccccaggccgagaccugcaagguccaguccaaccgcgucuucugcgacaccaugaacucccucacccuccccuccgaggucaaccucugcaacgucgacaucuucaaccccaaguacgacugcaagaucaugaccuccaagaccgacgucuccuccuccgucaucaccucccucggcgccaucgucuccugcuacggcaagaccaagugcaccgccuccaacaagaaccgcggcaucaucaagaccuucuccaacggcugcgacuacgucuccaacaagggcgucgacaccgucuccgucggcaacacccucuacuacgucaacaagcaggagggcaagucccucuacgucaagggcgagcccaucaucaacuucuacgacccccucgucuuccccuccgacgaguucgacgccuccaucucccaggucaacgagaagaucaaccagucccucgccuucauccgcaaguccgacgagcuccuccacaacgucaacgccggcaaguccaccaccaacaucaugaucaccaccaucaucaucgucaucaucgucauccuccucucccucaucgccgucggccuccuccucuacugcaaggcccgcuccacccccgucacccucuccaaggaccagcucuccggcaucaacaacaucgccuucuccaacugaggacuagugaagggaacacccaaauuuaauucagccuuaagcacaauuaauuaagagugaaacguaauuguacaagcaguuggucacccaccauagggcaugaucaacaccgcaaccuuuccuuuuucccccagugauucugaaaaaccccucuucccuucagcuugcuuagauguuccaaauuuaguaagcuuaaggcggccuacagaagaaaaagaaaaaaaaggccacaaaaguucccucucacuuucaguaaauaaaauaaaagcagcaacagaaauaaagaaauaaaugaaauucaaaaugaaauaaauauuguguugugcagcauuaaaaaaucaauaaaaauuaaaaaugagcaagaucuaaaaaaaaaaaaaaaaaaaaaaaaaaaaaaaaaaaaaaaaaaaaaaaaaaaaaaaaaaaaaaaaugcaucccccccccccccccccccccccccccccccaaaggcucuuuucagagccaccagaauu

SEQ ID NO: 235 - RNA, 2394 nt, Artificial Sequence
  mRNA product Design d-3 comprising derived and/or modified sequence from HRSV(A2)__F0 (opt3)
gggagagggcgcuuggcuugcaaggacccugagcugcggcauugaagcacacccaacccaacucgacugaagucagccucacugaaccggaucugagaaucuucucucucugggcuugccagggcucuccgaaccuagcuagcauccucuucaauuccaacuagaaagcuuaccauggagcugcucauccuuaaggccaacgcuauuaccacaauacugacugcagugacguucugcuuugccagcggccagaauaucaccgaagaguucuaccaauccacauguucugcggucucaaaaggguauuugagugcuuuaagaacuggaugguacaccagcguuauuacaaucgaacuguccaacauuaaggagaauaaaugcaacgguaccgacgccaaggugaaacuaaucaagcaggaacucgauaaguauaaaaaugcaguaacugagcugcagcuucugaugcagucuacacccgccaccaacaauagggcucggcgcgaguugccucgauuuaugaacuacacgcucaauaacgcaaagaaaacuaaugugacccugucgaagaaacguaagagaagguuccugggcuuucucuuaggggucggaucagccauagcuagcggcguggccguuaguaaggugcugcaccuugaaggugaggucaacaaaaucaaguccgcguugcugucuacaaauaaagcagugguaagccuauccaacgggguuucagugcucacuucuaagguccuggaccuuaaaaauuauauugauaagcaacuguugccaaucgugaacaaacagagcuguucuauuuccaacaucgaaaccgugauagaguuccagcagaagaauaaccggcuccuggagauuacacgcgaauuuucagucaaugccggaguuaccacgccggugagcacuuacauguuaacaaacagugagcugcucucucuuaucaaugacaugcccauuaccaacgaucaaaagaaacugauguccaauaacguacagaucgugagacagcagagcuauucgaucaugucuauuauaaaggaagaggucuuggcuuacgugguucaacuaccucuguacggcgugaucgacacuccaugcuggaaacuccauacauccccacuguguaccacgaauaccaaggaaggcucaaacauuugccuuacaaggacugaucgggggugguauugugacaaugccggaagugucagcuucuuuccucaggcagagaccugcaaagugcaguccaaccgcguauucugugauacaaugaauagucugacuuugccaagcgagguuaaccucugcaauguggacaucuuuaaccccaaguacgauuguaagauaaugaccucaaaaacagacgucaguuccagcgugauuaccucucugggugcuaucgucucaugcuauggcaagacuaaaugcacggccaguaacaagaaucgagggaucauuaaaacauucagcaacggaugugauuacguguccaauaagggcguugacaccgugucuguagguaacacuuuauauuacgucaauaagcaagaagggaaaucgcuguaugugaagggagagccuaucauuaacuuuuacgacccccuaguuuucccgagcgaugaauuugacgcguccauaucacaggugaaugagaaaaucaaccagagucucgccuucauuagaaagucugaugaacugcuucacaaugucaacgcaggcaaaagcaccacaaauaucaugaucaccacuauuauaaucgugauuaucguaauuuugcugucccucaucgcugugggccugcuucuguacugcaaggccaggucaacacccguuacguugagcaaggaccagcucucugggauaaacaauaucgcuuucuccaacugaggacuagugaagggaacacccaaauuuaauucagccuuaagcacaauuaauuaagagugaaacguaauuguacaagcaguuggucacccaccauagggcaugaucaacaccgcaaccuuuccuuuuucccccagugauucugaaaaaccccucuucccuucagcuugcuuagauguuccaaauuuaguaagcuuaaggcggccuacagaagaaaaagaaaaaaaaggccacaaaaguucccucucacuuucaguaaauaaaauaaaagcagcaacagaaauaaagaaauaaaugaaauucaaaaugaaauaaauauuguguugugcagcauuaaaaaaucaauaaaaauuaaaaaugagcaagaucuaaaaaaaaaaaaaaaaaaaaaaaaaaaaaaaaaaaaaaaaaaaaaaaaaaaaaaaaaaaaaaaaugcaucccccccccccccccccccccccccccccccaaaggcucuuuucagagccaccagaauu

SEQ ID NO: 236 - RNA, 2394 nt, Artificial Sequence
  mRNA product Design d-3 comprising derived and/or modified sequence from HRSV(A2)__F0 (opt4)
gggagagggcgcuuggcuugcaaggacccugagcugcggcauugaagcacacccaacccaacucgacugaagucagccucacugaaccggaucugagaaucuucucucucugggcuugccagggcucuccgaaccuagcuagcauccucuucaauuccaacuagaaagcuuaccauggagcugcugauccugaaggccaacgccaucaccaccauccugaccgccgugaccuucugcuucgccagcggccagaacaucaccgaggaguucuaccagagcaccugcagcgccgugagcaagggcuaccugagcgcccugagaaccggcugguacaccagcgugaucaccaucgagcugagcaacaucaaggagaacaagugcaacggcaccgacgccaaggugaagcugaucaagcaggagcuggacaaguacaagaacgccgugaccgagcugcagcugcugaugcagagcacccccgccaccaacaacagagccagaagagagcugcccagauucaugaacuacacccugaacaacgccaagaagaccaacgugacccugagcaagaagagaaagagaagauuccugggcuuccugcugggcgugggcagcgccaucgccagcggcguggccgugagcaaggugcugcaccuggagggcgaggugaacaagaucaagagcgcccugcugagcaccaacaaggccguggugagccugagcaacggcgugagcgugcugaccagcaaggugcuggaccugaagaacuacaucgacaagcagcugcugcccaucgugaacaagcagagcugcagcaucagcaacaucgagaccgugaucgaguuccagcagaagaacaacagacugcuggagaucaccagagaguucagcgugaacgccggcgugaccacccccgugagcaccuacaugcugaccaacagcgagcugcugagccugaucaacgacaugcccaucaccaacgaccagaagaagcugaugagcaacaacgugcagaucgugagacagcagagcuacagcaucaugagcaucaucaaggaggaggugcuggccuacguggugcagcugccccuguacggcgugaucgacacccccugcuggaagcugcacaccagcccccugugcaccaccaacaccaaggagggcagcaacaucugccugaccagaaccgacagaggcugguacugcgacaacgccggcagcgugagcuucuucccccaggccgagaccugcaaggugcagagcaacagaguguucugcgacaccaugaacagccugacccugcccagcgaggugaaccugugcaacguggacaucuucaaccccaaguacgacugcaagaucaugaccagcaagaccgacgugagcagcagcgugaucaccagccugggcgccaucgugagcugcuacggcaagaccaagugcaccgccagcaacaagaacagaggcaucaucaagaccuucagcaacggcugcgacuacgugagcaacaagggcguggacaccgugagcgugggcaacacccuguacuacgugaacaagcaggagggcaagagccuguacgugaagggcgagcccaucaucaacuucuacgacccccugguguuccccagcgacgaguucgacgccagcaucagccaggugaacgagaagaucaaccagagccuggccuucaucagaaagagcgacgagcugcugcacaacgugaacgccggcaagagcaccaccaacaucaugaucaccaccaucaucaucgugaucaucgugauccugcugagccugaucgccgugggccugcugcuguacugcaaggccagaagcacccccgugacccugagcaaggaccagcugagcggcaucaacaacaucgccuucagcaacugaggacuagugaagggaacacccaaauuuaauucagccuuaagcacaauuaauuaagagugaaacguaauuguacaagcaguuggucacccaccauagggcaugaucaacaccgcaaccuuuccuuuuucccccagugauucugaaaaaccccucuucccuucagcuugcuuagauguuccaaauuuaguaagcuuaaggcggccuacagaagaaaaagaaaaaaaaggccacaaaaguucccucucacuuucaguaaauaaaauaaaagcagcaacagaaauaaagaaauaaaugaaauucaaaaugaaauaaauauuguguugugcagcauuaaaaaaucaauaaaaauuaaaaaugagcaagaucuaaaaaaaaaaaaaaaaaaaaaaaaaaaaaaaaaaaaaaaaaaaaaaaaaaaaaaaaaaaaaaaaugcaucccccccccccccccccccccccccccccccaaaggcucuuuucagagccaccagaauu

SEQ ID NO: 237 - RNA, 2394 nt, Artificial Sequence
  mRNA product Design d-3 comprising derived and/or modified sequence from HRSV(A2)__F0 (opt5)
gggagagggcgcuuggcuugcaaggacccugagcugcggcauugaagcacacccaacccaacucgacugaagucagccucacugaaccggaucugagaaucuucucucucugggcuugccagggcucuccgaaccuagcuagcauccucuucaauuccaacuagaaagcuuaccauggagcugcucauccugaaggccaacgcuauuaccacaauccuuacggccgugaccuucugcuuugcgagcggccagaauauuacagaagaguucuaccaauccaccuguucugcugucagcaaaggguaucuguccgcccucagaacaggaugguacaccucuguuaucacaauugaacugagcaacaucaaggagaauaaaugcaacggcaccgacgccaaggugaaacuuaucaagcaggaacuggauaaguauaaaaaugcugugacggagcuccagcugcugaugcaguccacccccgccacaaacaaucgggcucgcagagagcucccucgguuuaugaacuacacccugaauaacgccaagaaaacaaaugucacccuuucuaagaaacgcaagagacgguuccugggguuucuccugggagugggcagcgcgauugccuccgggguugcugugagcaagguccuucaccuggaaggagaggugaacaaaaucaagucugcccuccuguccacgaauaaagcuguugugagccugucuaacggcgucuccgugcucacaagcaaggugcuggaccuuaaaaauuauauugauaagcaacugcucccgaucgucaacaaacagucuuguuccauuagcaacaucgaaaccguuauugaguuccagcagaagaauaaccgccugcuugagaucacaagagaauuuuccgugaaugccggcgugaccacccccgucucuacauacaugcugacgaacagcgagcuccugucccugaucaaugacaugccuauuaccaacgaucaaaagaaacucaugagcaauaacgugcagaucguucggcagcagucuuauuccauuaugagcaucauuaaggaagaggugcuggcguacgucgugcaacuuccccuguacgggguuaucgacacaccuugcuggaaacuccauaccucuccccuguguacaaccaauacgaaggaaggaagcaacaucugccuuacacgcaccgauagaggcugguauugugacaaugccggguccgugucuuucuuuccucaggcugagaccugcaaaguccagagcaaccggguguucugugauacaaugaacucccugacccucccgagcgaggucaaucugugcaauguggacauuuuuaaccccaaguacgauuguaagaucaugacaucuaaaacggacguuuccagcucugugauuaccucccugggagccaucgucagcugcuauggcaagacaaaaugcaccgcuuccaacaagaaucgcgggauuaucaaaacauucucuaacggaugugauuacgugagcaauaagggcguugacaccguguccgucggcaacacgcucuauuacgugaauaagcaagaagggaaaucucuguaugugaagggagagccuaucauuaacuuuuacgacccccuuguuuucccuagcgaugaauuugacgccuccaucagccaggucaaugagaaaauuaaccagucucuggccuucaucagaaaguccgaugaacuccugcacaaugugaacgcuggcaaaagcaccacaaauauuaugaucaccacaauuaucaucgugauuaucgucauucugcuuucucucaucgcgguggggcugcugcucuacugcaaggcccgguccacccccguuacgcugagcaaggaccagcuuucuggaauuaacaauaucgcuuucagcaacugaggacuagugaagggaacacccaaauuuaauucagccuuaagcacaauuaauuaagagugaaacguaauuguacaagcaguuggucacccaccauagggcaugaucaacaccgcaaccuuuccuuuuucccccagugauucugaaaaaccccucuucccuucagcuugcuuagauguuccaaauuuaguaagcuuaaggcggccuacagaagaaaaagaaaaaaaaggccacaaaaguucccucucacuuucaguaaauaaaauaaaagcagcaacagaaauaaagaaauaaaugaaauucaaaaugaaauaaauauuguguugugcagcauuaaaaaaucaauaaaaauuaaaaaugagcaagaucuaaaaaaaaaaaaaaaaaaaaaaaaaaaaaaaaaaaaaaaaaaaaaaaaaaaaaaaaaaaaaaaaugcaucccccccccccccccccccccccccccccccaaaggcucuuuucagagccaccagaauu

SEQ ID NO: 238 - RNA, 2394 nt, Artificial Sequence
  mRNA product Design d-3 comprising derived and/or modified sequence from HRSV(A2)__F0 (opt6)
gggagagggcgcuuggcuugcaaggacccugagcugcggcauugaagcacacccaacccaacucgacugaagucagccucacugaaccggaucugagaaucuucucucucugggcuugccagggcucuccgaaccuagcuagcauccucuucaauuccaacuagaaagcuuaccauggaacuucuaauauuaaaagcuaacgcaaucacuacuaucuuaaccgcaguaacauucuguuuugcauccggccaaaacauaacagaagaauuuuaccaaucaacuugcucugcagucucaaaagguuaucuaucugcauuaagaacaggcugguacaccucaguaauaacgaucgaacuaucaaacaucaaagaaaacaaauguaauggaacagacgcaaaaguaaaacuaaucaaacaagaacuagacaaauacaaaaacgcaguaaccgaacuccaacuccucaugcaaaguacaccagcaacaaauaacagagcaagacgugaacuaccacguuuuaugaauuacacgcucaauaacgcaaaaaaaacaaauguuacccuaucaaaaaaacgaaaaagaagauuccucggauuccuacuaggcguaggcucagcaauagcuucaggaguagcaguaucaaaaguacuccaccucgaaggagaaguaaacaaaaucaaaagcgcucuccucucaacaaacaaagcaguuguuucacucucaaacggaguaucaguacuaaccucaaaaguacuugaccuaaaaaauuauauagacaaacaacuauuaccaauaguaaacaaacaaagcugcuccaucuccaacaucgagacagucauagaauuucaacaaaaaaauaaccgccuauuagaaauaaccagagaauuuucaguaaacgcaggaguaacuaccccaguaucaacauauauguuaacaaacucagaacuccuaagucuaaucaacgacaugccaauaaccaacgaccaaaaaaaacuaaugagcaacaauguacaaauaguucgucaacaaucuuacuccauaaugucuauaauaaaagaagaaguacucgccuauguaguccaacuaccacuauacggagucaucgauacaccaugcuggaaacuccacacauccccacucuguacuacuaacaccaaagaagguucaaauauaugccuaaccagaacagauagagguugguacugcgauaaugcaggaucaguauccuuuuucccccaagccgaaacaugcaaaguucaauccaauagaguauuuugugauacaaugaacucuuuaacccucccauccgaagucaaucuauguaacgucgacauauuuaacccaaaauacgauugcaaaauaaugacaucaaaaacagacgucucauccucaguuauaacguccuuaggcgcuauaguaucaugcuacggcaaaacaaaauguacagcaucaaacaaaaacagaggaaucauaaaaacuuucucuaacgguugcgacuauguauccaacaaaggugucgacacaguauccguaggcaacacccuuuacuauguuaauaaacaagaaggaaaaucucuauauguaaaaggcgaaccaauuauaaauuuuuacgacccccuugucuuucccucugacgaauuugacgcuuccauaucacaagucaacgaaaaaaucaaccaaucccucgcauucauacgcaaaucagacgaacuacuacauaacgucaacgcaggcaaauccacaacaaacauaaugauaaccacaaucauaauuguaauaauaguaauacuacuuucucuaauagcagucggauuacucuuauacuguaaagcucgaucaacaccagucacccucucuaaagaucaacuauccggaaucaacaacauagcuuucucaaacuaaggacuagugaagggaacacccaaauuuaauucagccuuaagcacaauuaauuaagagugaaacguaauuguacaagcaguuggucacccaccauagggcaugaucaacaccgcaaccuuuccuuuuucccccagugauucugaaaaaccccucuucccuucagcuugcuuagauguuccaaauuuaguaagcuuaaggcggccuacagaagaaaaagaaaaaaaaggccacaaaaguucccucucacuuucaguaaauaaaauaaaagcagcaacagaaauaaagaaauaaaugaaauucaaaaugaaauaaauauuguguugugcagcauuaaaaaaucaauaaaaauuaaaaaugagcaagaucuaaaaaaaaaaaaaaaaaaaaaaaaaaaaaaaaaaaaaaaaaaaaaaaaaaaaaaaaaaaaaaaaugcaucccccccccccccccccccccccccccccccaaaggcucuuuucagagccaccagaauu

SEQ ID NO: 239 - RNA, 2394 nt, Artificial Sequence
  mRNA product Design d-3 comprising derived and/or modified sequence from HRSV(A2)__F0 (opt11)
gggagagggcgcuuggcuugcaaggacccugagcugcggcauugaagcacacccaacccaacucgacugaagucagccucacugaaccggaucugagaaucuucucucucugggcuugccagggcucuccgaaccuagcuagcauccucuucaauuccaacuagaaagcuuaccauggaacuccucauacucaaagccaacgcaaucacaaccauacucaccgccgucaccuucugcuuugcaucuggccagaacaucacugaagaguucuaccaauccacaugcuccgccguaagcaaaggcuaccuauccgcccuacgcaccggcugguacaccagcguaaucaccauagaacucuccaauauaaaagaaaacaaaugcaacggcaccgacgcaaaagucaagcuaauaaaacaagaacucgacaaauacaaaaacgccguuaccgaacuccagcuacucaugcaaucgaccccagcaaccaacaaccgugcgagacgcgaacucccccgcuucaugaacuacacccuaaacaacgccaaaaagaccaacguaacucuauccaagaaacgcaaacgccgcuuccucggauuccuccucggcgucggcuccgcaaucgccagcggcgucgccguuagcaaaguccuucaccucgaaggagaaguaaacaaaauuaaaagcgcccucuuauccacaaacaaggccguaguaucccugucaaacggcgucuccguccuuacauccaaaguccucgaccucaagaacuacauagacaaacagcuacuacccauuguaaauaaacaaagcugcucaauuagcaacaucgaaaccguaaucgaguuccagcagaaaaacaacagacuucucgaaaucacccgcgaguucagcgucaacgccggcguaaccaccccugucucaacauacaugcuaaccaacagcgaacugcucucccucaucaacgacaugcccaucaccaacgaccaaaagaaacucaugagcaacaacguacaaaucgugcgccaacaguccuacucaauaaugucaaucaucaaagaagaagugcuagcauacgucguacaacuaccacucuacggcguaauagauacccccugcuggaagcuccauaccuccccacucuguaccaccaacaccaaagaaggcucaaacaucugccuaacgcgcacagaccguggaugguacugugacaacgccggcuccgucuccuucuucccucaagccgaaacaugcaaaguccaauccaacagagucuucugcgauaccaugaacucccugacacucccaagcgaagucaaccuuugcaacgucgauaucuuuaaccccaaauacgacugcaagaucaugacaucaaaaaccgacguauccuccucuguaauaaccucccuaggcgcaaucguaucaugcuacggcaaaaccaaauguaccgccuccaacaaaaaucgcggcaucaucaaaaccuucucgaacggcugcgacuacgucuccaacaaaggcguagacacaguuuccguaggcaacacccucuacuacgucaauaaacaggaaggcaagucccucuacgucaaaggcgaacccaucaucaauuucuacgacccccucguuuuccccuccgaugaguucgacgcaagcaucagccaggucaacgaaaagauaaaccagucccucgccuucauccgcaaaucagaugaacuccuucacaacguuaacgcaggcaagagcaccaccaacaucaugaucacaacuauaaucaucgucauaaucgucauccuacucucacuaaucgccgucggucuccuacuauauuguaaagcccgaucaacaccggucacacucuccaaagaccaacucuccggaaucaacaauaucgcuuucucgaacuaaggacuagugaagggaacacccaaauuuaauucagccuuaagcacaauuaauuaagagugaaacguaauuguacaagcaguuggucacccaccauagggcaugaucaacaccgcaaccuuuccuuuuucccccagugauucugaaaaaccccucuucccuucagcuugcuuagauguuccaaauuuaguaagcuuaaggcggccuacagaagaaaaagaaaaaaaaggccacaaaaguucccucucacuuucaguaaauaaaauaaaagcagcaacagaaauaaagaaauaaaugaaauucaaaaugaaauaaauauuguguugugcagcauuaaaaaaucaauaaaaauuaaaaaugagcaagaucuaaaaaaaaaaaaaaaaaaaaaaaaaaaaaaaaaaaaaaaaaaaaaaaaaaaaaaaaaaaaaaaaugcaucccccccccccccccccccccccccccccccaaaggcucuuuucagagccaccagaauu

SEQ ID NO: 240 - RNA, 2077 nt, Artificial Sequence
  mRNA product Design d-4 comprising derived and/or modified sequence from HRSV(A2)__F0 (artificial)
gggagagucccgcagucggcguccagcggcucugcuuguucgugugugugucguugcaggccuuauucaagcuuaccauggaguugcuaauccucaaagcaaaugcaauuaccacaauccucacugcagucacauuuuguuuugcuucuggucaaaacaucacugaagaauuuuaucaaucaacaugcagugcaguuagcaaaggcuaucuuagugcucugagaacugguugguauaccaguguuauaacuauagaauuaaguaauaucaaggaaaauaaguguaauggaacagaugcuaagguaaaauugauaaaacaagaauuagauaaauauaaaaaugcuguaacagaauugcaguugcucaugcaaagcacaccagcaacaaacaaucgagccagaagagaacuaccaagguuuaugaauuauacacucaacaaugccaaaaaaaccaauguaacauuaagcaagaaaaggaaaagaagauuucuugguuuuuuguuagguguuggaucugcaaucgccaguggcguugcuguaucuaagguccugcaccuagaaggggaagugaacaagaucaaaagugcucuacuauccacaaacaaggcuguagucagcuuaucaaauggaguuagugucuuaaccagcaaaguguuagaccucaaaaacuauauagauaaacaauuguuaccuauugugaacaagcaaagcugcagcauaucaaauauagaaacugugauagaguuccaacaaaagaacaacagacuacuagagauuaccagggaauuuaguguuaaugcagguguaacuacaccuguaagcacuuacauguuaacuaauagugaauuauugucauuaaucaaugauaugccuauaacaaaugaucagaaaaaguuaauguccaacaauguucaaauaguuagacagcaaaguuacucuaucauguccauaauaaaagaggaagucuuagcauauguaguacaauuaccacuauaugguguuauagauacacccuguuggaaacuacacacauccccucuauguacaaccaacacaaaagaaggguccaacaucuguuuaacaagaacugacagaggaugguacugugacaaugcaggaucaguaucuuucuucccacaagcugaaacauguaaaguucaaucaaaucgaguauuuugugacacaaugaacaguuuaacauuaccaagugaaguaaaucucugcaauguugacauauucaaccccaaauaugauuguaaaauuaugacuucaaaaacagauguaagcagcuccguuaucacaucucuaggagccauugugucaugcuauggcaaaacuaaauguacagcauccaauaaaaaucguggaaucauaaagacauuuucuaacgggugcgauuauguaucaaauaaagggguggacacugugucuguagguaacacauuauauuauguaaauaagcaagaagguaaaagucucuauguaaaaggugaaccaauaauaaauuucuaugacccauuaguauuccccucugaugaauuugaugcaucaauaucucaagucaacgagaagauuaaccagagccuagcauuuauucguaaauccgaugaauuauuacauaauguaaaugcugguaaauccaccacaaauaucaugauaacuacuauaauuauagugauuauaguaauauuguuaucauuaauugcuguuggacugcucuuauacuguaaggccagaagcacaccagucacacuaagcaaagaucaacugagugguauaaauaauauugcauuuaguaacuaaggacuaguggaagcauuuuccuggcugauuaaaagaaauuacucagcuauggucaucuguuccuguuagaaggcuaugcagcauauuauauacuaugcgcauguuaugaaaugcauaauaaaaaauuuuaaaaaaucuaaaagaucuaaaaaaaaaaaaaaaaaaaaaaaaaaaaaaaaaaaaaaaaaaaaaaaaaaaaaaaaaaaaaaaaugcaucccccccccccccccccccccccccccccccaaaggcucuuuucagagccaccagaauu

SEQ ID NO: 241 - RNA, 2077 nt, Artificial Sequence
  mRNA product Design d-4 comprising derived and/or modified sequence from HRSV(A2)__F0 (opt1)
gggagagucccgcagucggcguccagcggcucugcuuguucgugugugugucguugcaggccuuauucaagcuuaccauggagcugcucauccugaaggccaacgccaucaccaccauccugacggcggugaccuucugcuucgccagcggccagaacaucaccgaggaguucuaccaguccaccugcagcgccgucuccaagggguaccucagcgcccugcggacgggcugguacaccuccgugaucaccaucgagcugagcaacaucaaggagaacaagugcaacgggaccgacgccaaggugaagcucaucaagcaggagcuggacaaguacaagaacgcggucacggagcugcagcuccugaugcaguccaccccggcaaccaacaaccgcgcccggcgcgagcugccccgguucaugaacuacacccucaacaacgccaagaagacgaacgugacccugagcaagaagcgcaagcggcgcuuccugggcuuccuccugggggugggcuccgccaucgcgagcggcgucgccguguccaaggugcugcaccucgagggggaggucaacaagaucaagagcgcccugcuguccaccaacaaggccguggugagccucuccaacggcgucagcgugcugaccuccaaggugcuggaccucaagaacuacaucgacaagcagcugcugcccaucgucaacaagcagagcugcuccaucagcaacaucgagacggugaucgaguuccagcagaagaacaaccggcuccuggagaucacccgcgaguucagcgugaacgccggggucaccacccccguguccacguacaugcugaccaacagcgagcuccugucccugaucaacgacaugccgaucaccaacgaccagaagaagcucaugagcaacaacgugcagaucguccggcagcaguccuacagcaucauguccaucaucaaggaggaggugcuggcguacgugguccagcugccccucuacggcgugaucgacacccccugcuggaagcugcacacgagcccccugugcaccaccaacaccaaggagggguccaacaucugccucacgcgcaccgaccggggcugguacugcgacaacgccggcagcgucuccuucuucccgcaggccgagaccugcaaggugcagagcaaccgcguguucugcgacaccaugaacucccugacgcugcccagcgagguaaaccucugcaacgucgacaucuucaaccccaaguacgacugcaagaucaugaccuccaagaccgacgugagcuccagcgugaucaccucccugggggccaucgucagcugcuacggcaagacgaagugcaccgccagcaacaagaaccgggggaucaucaagaccuucuccaacggcugcgacuacgugagcaacaagggcguggacaccguguccgucgggaacacccuguacuacgugaacaagcaggagggcaagagccucuacgugaagggggagcccaucaucaacuucuacgacccgcuggucuuccccuccgacgaguucgacgcgagcaucucccaggugaacgagaagaucaaccagagccuggccuucauccgcaaguccgacgagcugcuccacaacgugaacgccggcaagagcacgaccaacaucaugaucaccaccaucaucaucgucaucaucgugauccugcugucccucaucgccguggggcugcugcucuacugcaaggcccggagcacgcccgucacccuguccaaggaccagcugagcggcaucaacaacaucgcguucuccaacugaggacuaguggaagcauuuuccuggcugauuaaaagaaauuacucagcuauggucaucuguuccuguuagaaggcuaugcagcauauuauauacuaugcgcauguuaugaaaugcauaauaaaaaauuuuaaaaaaucuaaaagaucuaaaaaaaaaaaaaaaaaaaaaaaaaaaaaaaaaaaaaaaaaaaaaaaaaaaaaaaaaaaaaaaaugcaucccccccccccccccccccccccccccccccaaaggcucuuuucagagccaccagaauu

SEQ ID NO: 242 - RNA, 2077 nt, Artificial Sequence
  mRNA product Design d-4 comprising derived and/or modified sequence from HRSV(A2)__F0 (opt1)
gggagagucccgcagucggcguccagcggcucugcuuguucgugugugugucguugcaggccuuauucaagcuuaccauggagcugcucauccugaaggccaacgccaucaccaccauccugacggcggugaccuucugcuucgccagcggccagaacaucaccgaggaguucuaccaguccacgugcagcgccgucuccaagggguaccucagcgcccugcgcaccggcugguacaccuccgugaucaccaucgagcugagcaacaucaaggagaacaagugcaacgggaccgacgccaaggugaagcucaucaagcaggagcuggacaaguacaagaacgcggucacggagcugcagcuccugaugcaguccacccccgccaccaacaaccgggcccgccgggagcugccgcgcuucaugaacuacacccucaacaacgccaagaagacgaacgugacccugagcaagaagcggaagcgccgguuccugggcuuccuccugggggugggcuccgcgaucgccagcggcgucgccguguccaaggugcugcaccucgagggggaggucaacaagaucaagagcgcccugcuguccaccaacaaggccguggugagccucuccaacggcgucagcgugcugaccuccaaggugcuggaccucaagaacuacaucgacaagcagcugcugcccaucgucaacaagcagagcugcuccaucagcaacaucgagacggugaucgaguuccagcagaagaacaaccgccuccuggagaucacccgggaguucagcgugaacgcgggggucaccacccccguguccacguacaugcugaccaacagcgagcuccugucccugaucaacgacaugcccaucaccaacgaccagaagaagcucaugagcaacaacgugcagaucguccgccagcaguccuacagcaucauguccaucaucaaggaggaggugcuggccuacgugguccagcugccgcucuacggcgugaucgacacccccugcuggaagcugcacacgagcccccugugcaccaccaacaccaaggagggguccaacaucugccucacgcggaccgaccgcggcugguacugcgacaacgccggcagcgucuccuucuucccccaggccgagaccugcaaggugcagagcaaccggguguucugcgacaccaugaacucccugacgcugccgagcgaggucaaccucugcaacguggacaucuucaaccccaaguacgacugcaagaucaugaccuccaagaccgacgugagcuccagcgucaucaccucccugggggccaucgugagcugcuacggcaagacgaagugcaccgcgagcaacaagaaccgcgggaucaucaagaccuucuccaacggcugcgacuacgugagcaacaagggcgucgacaccguguccguggggaacacccuguacuacgucaacaagcaggagggcaagagccucuacgugaagggggagcccaucaucaacuucuacgacccccugguguucccguccgacgaguucgacgccagcaucucccaggucaacgagaagaucaaccagagccuggccuucauccggaaguccgacgagcuccugcacaacgugaacgccggcaagagcacgaccaacaucaugaucaccaccaucaucaucgugaucaucgucauccugcugucccucaucgccguggggcugcugcucuacugcaaggcgcgcagcacgcccgugacccuguccaaggaccagcugagcggcaucaacaacaucgccuucuccaacugaggacuaguggaagcauuuuccuggcugauuaaaagaaauuacucagcuauggucaucuguuccuguuagaaggcuaugcagcauauuauauacuaugcgcauguuaugaaaugcauaauaaaaaauuuuaaaaaaucuaaaagaucuaaaaaaaaaaaaaaaaaaaaaaaaaaaaaaaaaaaaaaaaaaaaaaaaaaaaaaaaaaaaaaaaugcaucccccccccccccccccccccccccccccccaaaggcucuuuucagagccaccagaauu

SEQ ID NO: 243 - RNA, 2077 nt, Artificial Sequence
  mRNA product Design d-4 comprising derived and/or modified sequence from HRSV(A2)__F0 (opt2)
gggagagucccgcagucggcguccagcggcucugcuuguucgugugugugucguugcaggccuuauucaagcuuaccauggagcuccucauccucaaggccaacgccaucaccaccauccucaccgccgucaccuucugcuucgccuccggccagaacaucaccgaggaguucuaccaguccaccugcuccgccgucuccaagggcuaccucuccgcccuccgcaccggcugguacaccuccgucaucaccaucgagcucuccaacaucaaggagaacaagugcaacggcaccgacgccaaggucaagcucaucaagcaggagcucgacaaguacaagaacgccgucaccgagcuccagcuccucaugcaguccacccccgccaccaacaaccgcgcccgccgcgagcucccccgcuucaugaacuacacccucaacaacgccaagaagaccaacgucacccucuccaagaagcgcaagcgccgcuuccucggcuuccuccucggcgucggcuccgccaucgccuccggcgucgccgucuccaagguccuccaccucgagggcgaggucaacaagaucaaguccgcccuccucuccaccaacaaggccgucgucucccucuccaacggcgucuccguccucaccuccaagguccucgaccucaagaacuacaucgacaagcagcuccuccccaucgucaacaagcaguccugcuccaucuccaacaucgagaccgucaucgaguuccagcagaagaacaaccgccuccucgagaucacccgcgaguucuccgucaacgccggcgucaccacccccgucuccaccuacaugcucaccaacuccgagcuccucucccucaucaacgacaugcccaucaccaacgaccagaagaagcucauguccaacaacguccagaucguccgccagcaguccuacuccaucauguccaucaucaaggaggagguccucgccuacgucguccagcucccccucuacggcgucaucgacacccccugcuggaagcuccacaccuccccccucugcaccaccaacaccaaggagggcuccaacaucugccucacccgcaccgaccgcggcugguacugcgacaacgccggcuccgucuccuucuucccccaggccgagaccugcaagguccaguccaaccgcgucuucugcgacaccaugaacucccucacccuccccuccgaggucaaccucugcaacgucgacaucuucaaccccaaguacgacugcaagaucaugaccuccaagaccgacgucuccuccuccgucaucaccucccucggcgccaucgucuccugcuacggcaagaccaagugcaccgccuccaacaagaaccgcggcaucaucaagaccuucuccaacggcugcgacuacgucuccaacaagggcgucgacaccgucuccgucggcaacacccucuacuacgucaacaagcaggagggcaagucccucuacgucaagggcgagcccaucaucaacuucuacgacccccucgucuuccccuccgacgaguucgacgccuccaucucccaggucaacgagaagaucaaccagucccucgccuucauccgcaaguccgacgagcuccuccacaacgucaacgccggcaaguccaccaccaacaucaugaucaccaccaucaucaucgucaucaucgucauccuccucucccucaucgccgucggccuccuccucuacugcaaggcccgcuccacccccgucacccucuccaaggaccagcucuccggcaucaacaacaucgccuucuccaacugaggacuaguggaagcauuuuccuggcugauuaaaagaaauuacucagcuauggucaucuguuccuguuagaaggcuaugcagcauauuauauacuaugcgcauguuaugaaaugcauaauaaaaaauuuuaaaaaaucuaaaagaucuaaaaaaaaaaaaaaaaaaaaaaaaaaaaaaaaaaaaaaaaaaaaaaaaaaaaaaaaaaaaaaaaugcaucccccccccccccccccccccccccccccccaaaggcucuuuucagagccaccagaauu

SEQ ID NO: 244 - RNA, 2077 nt, Artificial Sequence
  mRNA product Design d-4 comprising derived and/or modified sequence from HRSV(A2)__F0 (opt3)
gggagagucccgcagucggcguccagcggcucugcuuguucgugugugugucguugcaggccuuauucaagcuuaccauggagcugcucauccuuaaggccaacgcuauuaccacaauacugacugcagugacguucugcuuugccagcggccagaauaucaccgaagaguucuaccaauccacauguucugcggucucaaaaggguauuugagugcuuuaagaacuggaugguacaccagcguuauuacaaucgaacuguccaacauuaaggagaauaaaugcaacgguaccgacgccaaggugaaacuaaucaagcaggaacucgauaaguauaaaaaugcaguaacugagcugcagcuucugaugcagucuacacccgccaccaacaauagggcucggcgcgaguugccucgauuuaugaacuacacgcucaauaacgcaaagaaaacuaaugugacccugucgaagaaacguaagagaagguuccugggcuuucucuuaggggucggaucagccauagcuagcggcguggccguuaguaaggugcugcaccuugaaggugaggucaacaaaaucaaguccgcguugcugucuacaaauaaagcagugguaagccuauccaacgggguuucagugcucacuucuaagguccuggaccuuaaaaauuauauugauaagcaacuguugccaaucgugaacaaacagagcuguucuauuuccaacaucgaaaccgugauagaguuccagcagaagaauaaccggcuccuggagauuacacgcgaauuuucagucaaugccggaguuaccacgccggugagcacuuacauguuaacaaacagugagcugcucucucuuaucaaugacaugcccauuaccaacgaucaaaagaaacugauguccaauaacguacagaucgugagacagcagagcuauucgaucaugucuauuauaaaggaagaggucuuggcuuacgugguucaacuaccucuguacggcgugaucgacacuccaugcuggaaacuccauacauccccacuguguaccacgaauaccaaggaaggcucaaacauuugccuuacaaggacugaucgggggugguauugugacaaugccggaagugucagcuucuuuccucaggcagagaccugcaaagugcaguccaaccgcguauucugugauacaaugaauagucugacuuugccaagcgagguuaaccucugcaauguggacaucuuuaaccccaaguacgauuguaagauaaugaccucaaaaacagacgucaguuccagcgugauuaccucucugggugcuaucgucucaugcuauggcaagacuaaaugcacggccaguaacaagaaucgagggaucauuaaaacauucagcaacggaugugauuacguguccaauaagggcguugacaccgugucuguagguaacacuuuauauuacgucaauaagcaagaagggaaaucgcuguaugugaagggagagccuaucauuaacuuuuacgacccccuaguuuucccgagcgaugaauuugacgcguccauaucacaggugaaugagaaaaucaaccagagucucgccuucauuagaaagucugaugaacugcuucacaaugucaacgcaggcaaaagcaccacaaauaucaugaucaccacuauuauaaucgugauuaucguaauuuugcugucccucaucgcugugggccugcuucuguacugcaaggccaggucaacacccguuacguugagcaaggaccagcucucugggauaaacaauaucgcuuucuccaacugaggacuaguggaagcauuuuccuggcugauuaaaagaaauuacucagcuauggucaucuguuccuguuagaaggcuaugcagcauauuauauacuaugcgcauguuaugaaaugcauaauaaaaaauuuuaaaaaaucuaaaagaucuaaaaaaaaaaaaaaaaaaaaaaaaaaaaaaaaaaaaaaaaaaaaaaaaaaaaaaaaaaaaaaaaugcaucccccccccccccccccccccccccccccccaaaggcucuuuucagagccaccagaauu

SEQ ID NO: 245 - RNA, 2077 nt, Artificial Sequence
  mRNA product Design d-4 comprising derived and/or modified sequence from HRSV(A2)__F0 (opt4)
gggagagucccgcagucggcguccagcggcucugcuuguucgugugugugucguugcaggccuuauucaagcuuaccauggagcugcugauccugaaggccaacgccaucaccaccauccugaccgccgugaccuucugcuucgccagcggccagaacaucaccgaggaguucuaccagagcaccugcagcgccgugagcaagggcuaccugagcgcccugagaaccggcugguacaccagcgugaucaccaucgagcugagcaacaucaaggagaacaagugcaacggcaccgacgccaaggugaagcugaucaagcaggagcuggacaaguacaagaacgccgugaccgagcugcagcugcugaugcagagcacccccgccaccaacaacagagccagaagagagcugcccagauucaugaacuacacccugaacaacgccaagaagaccaacgugacccugagcaagaagagaaagagaagauuccugggcuuccugcugggcgugggcagcgccaucgccagcggcguggccgugagcaaggugcugcaccuggagggcgaggugaacaagaucaagagcgcccugcugagcaccaacaaggccguggugagccugagcaacggcgugagcgugcugaccagcaaggugcuggaccugaagaacuacaucgacaagcagcugcugcccaucgugaacaagcagagcugcagcaucagcaacaucgagaccgugaucgaguuccagcagaagaacaacagacugcuggagaucaccagagaguucagcgugaacgccggcgugaccacccccgugagcaccuacaugcugaccaacagcgagcugcugagccugaucaacgacaugcccaucaccaacgaccagaagaagcugaugagcaacaacgugcagaucgugagacagcagagcuacagcaucaugagcaucaucaaggaggaggugcuggccuacguggugcagcugccccuguacggcgugaucgacacccccugcuggaagcugcacaccagcccccugugcaccaccaacaccaaggagggcagcaacaucugccugaccagaaccgacagaggcugguacugcgacaacgccggcagcgugagcuucuucccccaggccgagaccugcaaggugcagagcaacagaguguucugcgacaccaugaacagccugacccugcccagcgaggugaaccugugcaacguggacaucuucaaccccaaguacgacugcaagaucaugaccagcaagaccgacgugagcagcagcgugaucaccagccugggcgccaucgugagcugcuacggcaagaccaagugcaccgccagcaacaagaacagaggcaucaucaagaccuucagcaacggcugcgacuacgugagcaacaagggcguggacaccgugagcgugggcaacacccuguacuacgugaacaagcaggagggcaagagccuguacgugaagggcgagcccaucaucaacuucuacgacccccugguguuccccagcgacgaguucgacgccagcaucagccaggugaacgagaagaucaaccagagccuggccuucaucagaaagagcgacgagcugcugcacaacgugaacgccggcaagagcaccaccaacaucaugaucaccaccaucaucaucgugaucaucgugauccugcugagccugaucgccgugggccugcugcuguacugcaaggccagaagcacccccgugacccugagcaaggaccagcugagcggcaucaacaacaucgccuucagcaacugaggacuaguggaagcauuuuccuggcugauuaaaagaaauuacucagcuauggucaucuguuccuguuagaaggcuaugcagcauauuauauacuaugcgcauguuaugaaaugcauaauaaaaaauuuuaaaaaaucuaaaagaucuaaaaaaaaaaaaaaaaaaaaaaaaaaaaaaaaaaaaaaaaaaaaaaaaaaaaaaaaaaaaaaaaugcaucccccccccccccccccccccccccccccccaaaggcucuuuucagagccaccagaauu

SEQ ID NO: 246 - RNA, 2077 nt, Artificial Sequence
  mRNA product Design d-4 comprising derived and/or modified sequence from HRSV(A2)__F0 (opt5)
gggagagucccgcagucggcguccagcggcucugcuuguucgugugugugucguugcaggccuuauucaagcuuaccauggagcugcucauccugaaggccaacgcuauuaccacaauccuuacggccgugaccuucugcuuugcgagcggccagaauauuacagaagaguucuaccaauccaccuguucugcugucagcaaaggguaucuguccgcccucagaacaggaugguacaccucuguuaucacaauugaacugagcaacaucaaggagaauaaaugcaacggcaccgacgccaaggugaaacuuaucaagcaggaacuggauaaguauaaaaaugcugugacggagcuccagcugcugaugcaguccacccccgccacaaacaaucgggcucgcagagagcucccucgguuuaugaacuacacccugaauaacgccaagaaaacaaaugucacccuuucuaagaaacgcaagagacgguuccugggguuucuccugggagugggcagcgcgauugccuccgggguugcugugagcaagguccuucaccuggaaggagaggugaacaaaaucaagucugcccuccuguccacgaauaaagcuguugugagccugucuaacggcgucuccgugcucacaagcaaggugcuggaccuuaaaaauuauauugauaagcaacugcucccgaucgucaacaaacagucuuguuccauuagcaacaucgaaaccguuauugaguuccagcagaagaauaaccgccugcuugagaucacaagagaauuuuccgugaaugccggcgugaccacccccgucucuacauacaugcugacgaacagcgagcuccugucccugaucaaugacaugccuauuaccaacgaucaaaagaaacucaugagcaauaacgugcagaucguucggcagcagucuuauuccauuaugagcaucauuaaggaagaggugcuggcguacgucgugcaacuuccccuguacgggguuaucgacacaccuugcuggaaacuccauaccucuccccuguguacaaccaauacgaaggaaggaagcaacaucugccuuacacgcaccgauagaggcugguauugugacaaugccggguccgugucuuucuuuccucaggcugagaccugcaaaguccagagcaaccggguguucugugauacaaugaacucccugacccucccgagcgaggucaaucugugcaauguggacauuuuuaaccccaaguacgauuguaagaucaugacaucuaaaacggacguuuccagcucugugauuaccucccugggagccaucgucagcugcuauggcaagacaaaaugcaccgcuuccaacaagaaucgcgggauuaucaaaacauucucuaacggaugugauuacgugagcaauaagggcguugacaccguguccgucggcaacacgcucuauuacgugaauaagcaagaagggaaaucucuguaugugaagggagagccuaucauuaacuuuuacgacccccuuguuuucccuagcgaugaauuugacgccuccaucagccaggucaaugagaaaauuaaccagucucuggccuucaucagaaaguccgaugaacuccugcacaaugugaacgcuggcaaaagcaccacaaauauuaugaucaccacaauuaucaucgugauuaucgucauucugcuuucucucaucgcgguggggcugcugcucuacugcaaggcccgguccacccccguuacgcugagcaaggaccagcuuucuggaauuaacaauaucgcuuucagcaacugaggacuaguggaagcauuuuccuggcugauuaaaagaaauuacucagcuauggucaucuguuccuguuagaaggcuaugcagcauauuauauacuaugcgcauguuaugaaaugcauaauaaaaaauuuuaaaaaaucuaaaagaucuaaaaaaaaaaaaaaaaaaaaaaaaaaaaaaaaaaaaaaaaaaaaaaaaaaaaaaaaaaaaaaaaugcaucccccccccccccccccccccccccccccccaaaggcucuuuucagagccaccagaauu

SEQ ID NO: 247 - RNA, 2077 nt, Artificial Sequence
  mRNA product Design d-4 comprising derived and/or modified sequence from HRSV(A2)__F0 (opt6)
gggagagucccgcagucggcguccagcggcucugcuuguucgugugugugucguugcaggccuuauucaagcuuaccauggaacuucuaauauuaaaagcuaacgcaaucacuacuaucuuaaccgcaguaacauucuguuuugcauccggccaaaacauaacagaagaauuuuaccaaucaacuugcucugcagucucaaaagguuaucuaucugcauuaagaacaggcugguacaccucaguaauaacgaucgaacuaucaaacaucaaagaaaacaaauguaauggaacagacgcaaaaguaaaacuaaucaaacaagaacuagacaaauacaaaaacgcaguaaccgaacuccaacuccucaugcaaaguacaccagcaacaaauaacagagcaagacgugaacuaccacguuuuaugaauuacacgcucaauaacgcaaaaaaaacaaauguuacccuaucaaaaaaacgaaaaagaagauuccucggauuccuacuaggcguaggcucagcaauagcuucaggaguagcaguaucaaaaguacuccaccucgaaggagaaguaaacaaaaucaaaagcgcucuccucucaacaaacaaagcaguuguuucacucucaaacggaguaucaguacuaaccucaaaaguacuugaccuaaaaaauuauauagacaaacaacuauuaccaauaguaaacaaacaaagcugcuccaucuccaacaucgagacagucauagaauuucaacaaaaaaauaaccgccuauuagaaauaaccagagaauuuucaguaaacgcaggaguaacuaccccaguaucaacauauauguuaacaaacucagaacuccuaagucuaaucaacgacaugccaauaaccaacgaccaaaaaaaacuaaugagcaacaauguacaaauaguucgucaacaaucuuacuccauaaugucuauaauaaaagaagaaguacucgccuauguaguccaacuaccacuauacggagucaucgauacaccaugcuggaaacuccacacauccccacucuguacuacuaacaccaaagaagguucaaauauaugccuaaccagaacagauagagguugguacugcgauaaugcaggaucaguauccuuuuucccccaagccgaaacaugcaaaguucaauccaauagaguauuuugugauacaaugaacucuuuaacccucccauccgaagucaaucuauguaacgucgacauauuuaacccaaaauacgauugcaaaauaaugacaucaaaaacagacgucucauccucaguuauaacguccuuaggcgcuauaguaucaugcuacggcaaaacaaaauguacagcaucaaacaaaaacagaggaaucauaaaaacuuucucuaacgguugcgacuauguauccaacaaaggugucgacacaguauccguaggcaacacccuuuacuauguuaauaaacaagaaggaaaaucucuauauguaaaaggcgaaccaauuauaaauuuuuacgacccccuugucuuucccucugacgaauuugacgcuuccauaucacaagucaacgaaaaaaucaaccaaucccucgcauucauacgcaaaucagacgaacuacuacauaacgucaacgcaggcaaauccacaacaaacauaaugauaaccacaaucauaauuguaauaauaguaauacuacuuucucuaauagcagucggauuacucuuauacuguaaagcucgaucaacaccagucacccucucuaaagaucaacuauccggaaucaacaacauagcuuucucaaacuaaggacuaguggaagcauuuuccuggcugauuaaaagaaauuacucagcuauggucaucuguuccuguuagaaggcuaugcagcauauuauauacuaugcgcauguuaugaaaugcauaauaaaaaauuuuaaaaaaucuaaaagaucuaaaaaaaaaaaaaaaaaaaaaaaaaaaaaaaaaaaaaaaaaaaaaaaaaaaaaaaaaaaaaaaaugcaucccccccccccccccccccccccccccccccaaaggcucuuuucagagccaccagaauu

SEQ ID NO: 248 - RNA, 2077 nt, Artificial Sequence
  mRNA product Design d-4 comprising derived and/or modified sequence from HRSV(A2)__F0 (opt11)
gggagagucccgcagucggcguccagcggcucugcuuguucgugugugugucguugcaggccuuauucaagcuuaccauggaacuccucauacucaaagccaacgcaaucacaaccauacucaccgccgucaccuucugcuuugcaucuggccagaacaucacugaagaguucuaccaauccacaugcuccgccguaagcaaaggcuaccuauccgcccuacgcaccggcugguacaccagcguaaucaccauagaacucuccaauauaaaagaaaacaaaugcaacggcaccgacgcaaaagucaagcuaauaaaacaagaacucgacaaauacaaaaacgccguuaccgaacuccagcuacucaugcaaucgaccccagcaaccaacaaccgugcgagacgcgaacucccccgcuucaugaacuacacccuaaacaacgccaaaaagaccaacguaacucuauccaagaaacgcaaacgccgcuuccucggauuccuccucggcgucggcuccgcaaucgccagcggcgucgccguuagcaaaguccuucaccucgaaggagaaguaaacaaaauuaaaagcgcccucuuauccacaaacaaggccguaguaucccugucaaacggcgucuccguccuuacauccaaaguccucgaccucaagaacuacauagacaaacagcuacuacccauuguaaauaaacaaagcugcucaauuagcaacaucgaaaccguaaucgaguuccagcagaaaaacaacagacuucucgaaaucacccgcgaguucagcgucaacgccggcguaaccaccccugucucaacauacaugcuaaccaacagcgaacugcucucccucaucaacgacaugcccaucaccaacgaccaaaagaaacucaugagcaacaacguacaaaucgugcgccaacaguccuacucaauaaugucaaucaucaaagaagaagugcuagcauacgucguacaacuaccacucuacggcguaauagauacccccugcuggaagcuccauaccuccccacucuguaccaccaacaccaaagaaggcucaaacaucugccuaacgcgcacagaccguggaugguacugugacaacgccggcuccgucuccuucuucccucaagccgaaacaugcaaaguccaauccaacagagucuucugcgauaccaugaacucccugacacucccaagcgaagucaaccuuugcaacgucgauaucuuuaaccccaaauacgacugcaagaucaugacaucaaaaaccgacguauccuccucuguaauaaccucccuaggcgcaaucguaucaugcuacggcaaaaccaaauguaccgccuccaacaaaaaucgcggcaucaucaaaaccuucucgaacggcugcgacuacgucuccaacaaaggcguagacacaguuuccguaggcaacacccucuacuacgucaauaaacaggaaggcaagucccucuacgucaaaggcgaacccaucaucaauuucuacgacccccucguuuuccccuccgaugaguucgacgcaagcaucagccaggucaacgaaaagauaaaccagucccucgccuucauccgcaaaucagaugaacuccuucacaacguuaacgcaggcaagagcaccaccaacaucaugaucacaacuauaaucaucgucauaaucgucauccuacucucacuaaucgccgucggucuccuacuauauuguaaagcccgaucaacaccggucacacucuccaaagaccaacucuccggaaucaacaauaucgcuuucucgaacuaaggacuaguggaagcauuuuccuggcugauuaaaagaaauuacucagcuauggucaucuguuccuguuagaaggcuaugcagcauauuauauacuaugcgcauguuaugaaaugcauaauaaaaaauuuuaaaaaaucuaaaagaucuaaaaaaaaaaaaaaaaaaaaaaaaaaaaaaaaaaaaaaaaaaaaaaaaaaaaaaaaaaaaaaaaugcaucccccccccccccccccccccccccccccccaaaggcucuuuucagagccaccagaauu

SEQ ID NO: 249 - RNA, 2174 nt, Artificial Sequence
  mRNA product Design d-5 comprising derived and/or modified sequence from HRSV(A2)__F0 (artificial)
gggagagggcgcuuggcuugcaaggacccugagcugcggcauugaagcacacccaacccaacucgacugaagucagccucacugaaccggaucugagaaucuucucucucugggcuugccagggcucuccgaaccuagcuagcauccucuucaauuccaacuagaaagcuuaccauggaguugcuaauccucaaagcaaaugcaauuaccacaauccucacugcagucacauuuuguuuugcuucuggucaaaacaucacugaagaauuuuaucaaucaacaugcagugcaguuagcaaaggcuaucuuagugcucugagaacugguugguauaccaguguuauaacuauagaauuaaguaauaucaaggaaaauaaguguaauggaacagaugcuaagguaaaauugauaaaacaagaauuagauaaauauaaaaaugcuguaacagaauugcaguugcucaugcaaagcacaccagcaacaaacaaucgagccagaagagaacuaccaagguuuaugaauuauacacucaacaaugccaaaaaaaccaauguaacauuaagcaagaaaaggaaaagaagauuucuugguuuuuuguuagguguuggaucugcaaucgccaguggcguugcuguaucuaagguccugcaccuagaaggggaagugaacaagaucaaaagugcucuacuauccacaaacaaggcuguagucagcuuaucaaauggaguuagugucuuaaccagcaaaguguuagaccucaaaaacuauauagauaaacaauuguuaccuauugugaacaagcaaagcugcagcauaucaaauauagaaacugugauagaguuccaacaaaagaacaacagacuacuagagauuaccagggaauuuaguguuaaugcagguguaacuacaccuguaagcacuuacauguuaacuaauagugaauuauugucauuaaucaaugauaugccuauaacaaaugaucagaaaaaguuaauguccaacaauguucaaauaguuagacagcaaaguuacucuaucauguccauaauaaaagaggaagucuuagcauauguaguacaauuaccacuauaugguguuauagauacacccuguuggaaacuacacacauccccucuauguacaaccaacacaaaagaaggguccaacaucuguuuaacaagaacugacagaggaugguacugugacaaugcaggaucaguaucuuucuucccacaagcugaaacauguaaaguucaaucaaaucgaguauuuugugacacaaugaacaguuuaacauuaccaagugaaguaaaucucugcaauguugacauauucaaccccaaauaugauuguaaaauuaugacuucaaaaacagauguaagcagcuccguuaucacaucucuaggagccauugugucaugcuauggcaaaacuaaauguacagcauccaauaaaaaucguggaaucauaaagacauuuucuaacgggugcgauuauguaucaaauaaagggguggacacugugucuguagguaacacauuauauuauguaaauaagcaagaagguaaaagucucuauguaaaaggugaaccaauaauaaauuucuaugacccauuaguauuccccucugaugaauuugaugcaucaauaucucaagucaacgagaagauuaaccagagccuagcauuuauucguaaauccgaugaauuauuacauaauguaaaugcugguaaauccaccacaaauaucaugauaacuacuauaauuauagugauuauaguaauauuguuaucauuaauugcuguuggacugcucuuauacuguaaggccagaagcacaccagucacacuaagcaaagaucaacugagugguauaaauaauauugcauuuaguaacuaaggacuaguggaagcauuuuccuggcugauuaaaagaaauuacucagcuauggucaucuguuccuguuagaaggcuaugcagcauauuauauacuaugcgcauguuaugaaaugcauaauaaaaaauuuuaaaaaaucuaaaagaucuaaaaaaaaaaaaaaaaaaaaaaaaaaaaaaaaaaaaaaaaaaaaaaaaaaaaaaaaaaaaaaaaugcaucccccccccccccccccccccccccccccccaaaggcucuuuucagagccaccagaauu

SEQ ID NO: 250 - RNA, 2174 nt, Artificial Sequence
  mRNA product Design d-5 comprising derived and/or modified sequence from HRSV(A2)__F0 (opt1)
gggagagggcgcuuggcuugcaaggacccugagcugcggcauugaagcacacccaacccaacucgacugaagucagccucacugaaccggaucugagaaucuucucucucugggcuugccagggcucuccgaaccuagcuagcauccucuucaauuccaacuagaaagcuuaccauggagcugcucauccugaaggccaacgccaucaccaccauccugacggcggugaccuucugcuucgccagcggccagaacaucaccgaggaguucuaccaguccaccugcagcgccgucuccaagggguaccucagcgcccugcggacgggcugguacaccuccgugaucaccaucgagcugagcaacaucaaggagaacaagugcaacgggaccgacgccaaggugaagcucaucaagcaggagcuggacaaguacaagaacgcggucacggagcugcagcuccugaugcaguccaccccggcaaccaacaaccgcgcccggcgcgagcugccccgguucaugaacuacacccucaacaacgccaagaagacgaacgugacccugagcaagaagcgcaagcggcgcuuccugggcuuccuccugggggugggcuccgccaucgcgagcggcgucgccguguccaaggugcugcaccucgagggggaggucaacaagaucaagagcgcccugcuguccaccaacaaggccguggugagccucuccaacggcgucagcgugcugaccuccaaggugcuggaccucaagaacuacaucgacaagcagcugcugcccaucgucaacaagcagagcugcuccaucagcaacaucgagacggugaucgaguuccagcagaagaacaaccggcuccuggagaucacccgcgaguucagcgugaacgccggggucaccacccccguguccacguacaugcugaccaacagcgagcuccugucccugaucaacgacaugccgaucaccaacgaccagaagaagcucaugagcaacaacgugcagaucguccggcagcaguccuacagcaucauguccaucaucaaggaggaggugcuggcguacgugguccagcugccccucuacggcgugaucgacacccccugcuggaagcugcacacgagcccccugugcaccaccaacaccaaggagggguccaacaucugccucacgcgcaccgaccggggcugguacugcgacaacgccggcagcgucuccuucuucccgcaggccgagaccugcaaggugcagagcaaccgcguguucugcgacaccaugaacucccugacgcugcccagcgagguaaaccucugcaacgucgacaucuucaaccccaaguacgacugcaagaucaugaccuccaagaccgacgugagcuccagcgugaucaccucccugggggccaucgucagcugcuacggcaagacgaagugcaccgccagcaacaagaaccgggggaucaucaagaccuucuccaacggcugcgacuacgugagcaacaagggcguggacaccguguccgucgggaacacccuguacuacgugaacaagcaggagggcaagagccucuacgugaagggggagcccaucaucaacuucuacgacccgcuggucuuccccuccgacgaguucgacgcgagcaucucccaggugaacgagaagaucaaccagagccuggccuucauccgcaaguccgacgagcugcuccacaacgugaacgccggcaagagcacgaccaacaucaugaucaccaccaucaucaucgucaucaucgugauccugcugucccucaucgccguggggcugcugcucuacugcaaggcccggagcacgcccgucacccuguccaaggaccagcugagcggcaucaacaacaucgcguucuccaacugaggacuaguggaagcauuuuccuggcugauuaaaagaaauuacucagcuauggucaucuguuccuguuagaaggcuaugcagcauauuauauacuaugcgcauguuaugaaaugcauaauaaaaaauuuuaaaaaaucuaaaagaucuaaaaaaaaaaaaaaaaaaaaaaaaaaaaaaaaaaaaaaaaaaaaaaaaaaaaaaaaaaaaaaaaugcaucccccccccccccccccccccccccccccccaaaggcucuuuucagagccaccagaauu

SEQ ID NO: 251 - RNA, 2174 nt, Artificial Sequence
  mRNA product Design d-5 comprising derived and/or modified sequence from HRSV(A2)__F0 (opt1)
gggagagggcgcuuggcuugcaaggacccugagcugcggcauugaagcacacccaacccaacucgacugaagucagccucacugaaccggaucugagaaucuucucucucugggcuugccagggcucuccgaaccuagcuagcauccucuucaauuccaacuagaaagcuuaccauggagcugcucauccugaaggccaacgccaucaccaccauccugacggcggugaccuucugcuucgccagcggccagaacaucaccgaggaguucuaccaguccacgugcagcgccgucuccaagggguaccucagcgcccugcgcaccggcugguacaccuccgugaucaccaucgagcugagcaacaucaaggagaacaagugcaacgggaccgacgccaaggugaagcucaucaagcaggagcuggacaaguacaagaacgcggucacggagcugcagcuccugaugcaguccacccccgccaccaacaaccgggcccgccgggagcugccgcgcuucaugaacuacacccucaacaacgccaagaagacgaacgugacccugagcaagaagcggaagcgccgguuccugggcuuccuccugggggugggcuccgcgaucgccagcggcgucgccguguccaaggugcugcaccucgagggggaggucaacaagaucaagagcgcccugcuguccaccaacaaggccguggugagccucuccaacggcgucagcgugcugaccuccaaggugcuggaccucaagaacuacaucgacaagcagcugcugcccaucgucaacaagcagagcugcuccaucagcaacaucgagacggugaucgaguuccagcagaagaacaaccgccuccuggagaucacccgggaguucagcgugaacgcgggggucaccacccccguguccacguacaugcugaccaacagcgagcuccugucccugaucaacgacaugcccaucaccaacgaccagaagaagcucaugagcaacaacgugcagaucguccgccagcaguccuacagcaucauguccaucaucaaggaggaggugcuggccuacgugguccagcugccgcucuacggcgugaucgacacccccugcuggaagcugcacacgagcccccugugcaccaccaacaccaaggagggguccaacaucugccucacgcggaccgaccgcggcugguacugcgacaacgccggcagcgucuccuucuucccccaggccgagaccugcaaggugcagagcaaccggguguucugcgacaccaugaacucccugacgcugccgagcgaggucaaccucugcaacguggacaucuucaaccccaaguacgacugcaagaucaugaccuccaagaccgacgugagcuccagcgucaucaccucccugggggccaucgugagcugcuacggcaagacgaagugcaccgcgagcaacaagaaccgcgggaucaucaagaccuucuccaacggcugcgacuacgugagcaacaagggcgucgacaccguguccguggggaacacccuguacuacgucaacaagcaggagggcaagagccucuacgugaagggggagcccaucaucaacuucuacgacccccugguguucccguccgacgaguucgacgccagcaucucccaggucaacgagaagaucaaccagagccuggccuucauccggaaguccgacgagcuccugcacaacgugaacgccggcaagagcacgaccaacaucaugaucaccaccaucaucaucgugaucaucgucauccugcugucccucaucgccguggggcugcugcucuacugcaaggcgcgcagcacgcccgugacccuguccaaggaccagcugagcggcaucaacaacaucgccuucuccaacugaggacuaguggaagcauuuuccuggcugauuaaaagaaauuacucagcuauggucaucuguuccuguuagaaggcuaugcagcauauuauauacuaugcgcauguuaugaaaugcauaauaaaaaauuuuaaaaaaucuaaaagaucuaaaaaaaaaaaaaaaaaaaaaaaaaaaaaaaaaaaaaaaaaaaaaaaaaaaaaaaaaaaaaaaaugcaucccccccccccccccccccccccccccccccaaaggcucuuuucagagccaccagaauu

SEQ ID NO: 252 - RNA, 2174 nt, Artificial Sequence
  mRNA product Design d-5 comprising derived and/or modified sequence from HRSV(A2)__F0 (opt2)
gggagagggcgcuuggcuugcaaggacccugagcugcggcauugaagcacacccaacccaacucgacugaagucagccucacugaaccggaucugagaaucuucucucucugggcuugccagggcucuccgaaccuagcuagcauccucuucaauuccaacuagaaagcuuaccauggagcuccucauccucaaggccaacgccaucaccaccauccucaccgccgucaccuucugcuucgccuccggccagaacaucaccgaggaguucuaccaguccaccugcuccgccgucuccaagggcuaccucuccgcccuccgcaccggcugguacaccuccgucaucaccaucgagcucuccaacaucaaggagaacaagugcaacggcaccgacgccaaggucaagcucaucaagcaggagcucgacaaguacaagaacgccgucaccgagcuccagcuccucaugcaguccacccccgccaccaacaaccgcgcccgccgcgagcucccccgcuucaugaacuacacccucaacaacgccaagaagaccaacgucacccucuccaagaagcgcaagcgccgcuuccucggcuuccuccucggcgucggcuccgccaucgccuccggcgucgccgucuccaagguccuccaccucgagggcgaggucaacaagaucaaguccgcccuccucuccaccaacaaggccgucgucucccucuccaacggcgucuccguccucaccuccaagguccucgaccucaagaacuacaucgacaagcagcuccuccccaucgucaacaagcaguccugcuccaucuccaacaucgagaccgucaucgaguuccagcagaagaacaaccgccuccucgagaucacccgcgaguucuccgucaacgccggcgucaccacccccgucuccaccuacaugcucaccaacuccgagcuccucucccucaucaacgacaugcccaucaccaacgaccagaagaagcucauguccaacaacguccagaucguccgccagcaguccuacuccaucauguccaucaucaaggaggagguccucgccuacgucguccagcucccccucuacggcgucaucgacacccccugcuggaagcuccacaccuccccccucugcaccaccaacaccaaggagggcuccaacaucugccucacccgcaccgaccgcggcugguacugcgacaacgccggcuccgucuccuucuucccccaggccgagaccugcaagguccaguccaaccgcgucuucugcgacaccaugaacucccucacccuccccuccgaggucaaccucugcaacgucgacaucuucaaccccaaguacgacugcaagaucaugaccuccaagaccgacgucuccuccuccgucaucaccucccucggcgccaucgucuccugcuacggcaagaccaagugcaccgccuccaacaagaaccgcggcaucaucaagaccuucuccaacggcugcgacuacgucuccaacaagggcgucgacaccgucuccgucggcaacacccucuacuacgucaacaagcaggagggcaagucccucuacgucaagggcgagcccaucaucaacuucuacgacccccucgucuuccccuccgacgaguucgacgccuccaucucccaggucaacgagaagaucaaccagucccucgccuucauccgcaaguccgacgagcuccuccacaacgucaacgccggcaaguccaccaccaacaucaugaucaccaccaucaucaucgucaucaucgucauccuccucucccucaucgccgucggccuccuccucuacugcaaggcccgcuccacccccgucacccucuccaaggaccagcucuccggcaucaacaacaucgccuucuccaacugaggacuaguggaagcauuuuccuggcugauuaaaagaaauuacucagcuauggucaucuguuccuguuagaaggcuaugcagcauauuauauacuaugcgcauguuaugaaaugcauaauaaaaaauuuuaaaaaaucuaaaagaucuaaaaaaaaaaaaaaaaaaaaaaaaaaaaaaaaaaaaaaaaaaaaaaaaaaaaaaaaaaaaaaaaugcaucccccccccccccccccccccccccccccccaaaggcucuuuucagagccaccagaauu

SEQ ID NO: 253 - RNA, 2174 nt, Artificial Sequence
  mRNA product Design d-5 comprising derived and/or modified sequence from HRSV(A2)__F0 (opt3)
gggagagggcgcuuggcuugcaaggacccugagcugcggcauugaagcacacccaacccaacucgacugaagucagccucacugaaccggaucugagaaucuucucucucugggcuugccagggcucuccgaaccuagcuagcauccucuucaauuccaacuagaaagcuuaccauggagcugcucauccuuaaggccaacgcuauuaccacaauacugacugcagugacguucugcuuugccagcggccagaauaucaccgaagaguucuaccaauccacauguucugcggucucaaaaggguauuugagugcuuuaagaacuggaugguacaccagcguuauuacaaucgaacuguccaacauuaaggagaauaaaugcaacgguaccgacgccaaggugaaacuaaucaagcaggaacucgauaaguauaaaaaugcaguaacugagcugcagcuucugaugcagucuacacccgccaccaacaauagggcucggcgcgaguugccucgauuuaugaacuacacgcucaauaacgcaaagaaaacuaaugugacccugucgaagaaacguaagagaagguuccugggcuuucucuuaggggucggaucagccauagcuagcggcguggccguuaguaaggugcugcaccuugaaggugaggucaacaaaaucaaguccgcguugcugucuacaaauaaagcagugguaagccuauccaacgggguuucagugcucacuucuaagguccuggaccuuaaaaauuauauugauaagcaacuguugccaaucgugaacaaacagagcuguucuauuuccaacaucgaaaccgugauagaguuccagcagaagaauaaccggcuccuggagauuacacgcgaauuuucagucaaugccggaguuaccacgccggugagcacuuacauguuaacaaacagugagcugcucucucuuaucaaugacaugcccauuaccaacgaucaaaagaaacugauguccaauaacguacagaucgugagacagcagagcuauucgaucaugucuauuauaaaggaagaggucuuggcuuacgugguucaacuaccucuguacggcgugaucgacacuccaugcuggaaacuccauacauccccacuguguaccacgaauaccaaggaaggcucaaacauuugccuuacaaggacugaucgggggugguauugugacaaugccggaagugucagcuucuuuccucaggcagagaccugcaaagugcaguccaaccgcguauucugugauacaaugaauagucugacuuugccaagcgagguuaaccucugcaauguggacaucuuuaaccccaaguacgauuguaagauaaugaccucaaaaacagacgucaguuccagcgugauuaccucucugggugcuaucgucucaugcuauggcaagacuaaaugcacggccaguaacaagaaucgagggaucauuaaaacauucagcaacggaugugauuacguguccaauaagggcguugacaccgugucuguagguaacacuuuauauuacgucaauaagcaagaagggaaaucgcuguaugugaagggagagccuaucauuaacuuuuacgacccccuaguuuucccgagcgaugaauuugacgcguccauaucacaggugaaugagaaaaucaaccagagucucgccuucauuagaaagucugaugaacugcuucacaaugucaacgcaggcaaaagcaccacaaauaucaugaucaccacuauuauaaucgugauuaucguaauuuugcugucccucaucgcugugggccugcuucuguacugcaaggccaggucaacacccguuacguugagcaaggaccagcucucugggauaaacaauaucgcuuucuccaacugaggacuaguggaagcauuuuccuggcugauuaaaagaaauuacucagcuauggucaucuguuccuguuagaaggcuaugcagcauauuauauacuaugcgcauguuaugaaaugcauaauaaaaaauuuuaaaaaaucuaaaagaucuaaaaaaaaaaaaaaaaaaaaaaaaaaaaaaaaaaaaaaaaaaaaaaaaaaaaaaaaaaaaaaaaugcaucccccccccccccccccccccccccccccccaaaggcucuuuucagagccaccagaauu

SEQ ID NO: 254 - RNA, 2174 nt, Artificial Sequence
  mRNA product Design d-5 comprising derived and/or modified sequence from HRSV(A2)__F0 (opt4)
gggagagggcgcuuggcuugcaaggacccugagcugcggcauugaagcacacccaacccaacucgacugaagucagccucacugaaccggaucugagaaucuucucucucugggcuugccagggcucuccgaaccuagcuagcauccucuucaauuccaacuagaaagcuuaccauggagcugcugauccugaaggccaacgccaucaccaccauccugaccgccgugaccuucugcuucgccagcggccagaacaucaccgaggaguucuaccagagcaccugcagcgccgugagcaagggcuaccugagcgcccugagaaccggcugguacaccagcgugaucaccaucgagcugagcaacaucaaggagaacaagugcaacggcaccgacgccaaggugaagcugaucaagcaggagcuggacaaguacaagaacgccgugaccgagcugcagcugcugaugcagagcacccccgccaccaacaacagagccagaagagagcugcccagauucaugaacuacacccugaacaacgccaagaagaccaacgugacccugagcaagaagagaaagagaagauuccugggcuuccugcugggcgugggcagcgccaucgccagcggcguggccgugagcaaggugcugcaccuggagggcgaggugaacaagaucaagagcgcccugcugagcaccaacaaggccguggugagccugagcaacggcgugagcgugcugaccagcaaggugcuggaccugaagaacuacaucgacaagcagcugcugcccaucgugaacaagcagagcugcagcaucagcaacaucgagaccgugaucgaguuccagcagaagaacaacagacugcuggagaucaccagagaguucagcgugaacgccggcgugaccacccccgugagcaccuacaugcugaccaacagcgagcugcugagccugaucaacgacaugcccaucaccaacgaccagaagaagcugaugagcaacaacgugcagaucgugagacagcagagcuacagcaucaugagcaucaucaaggaggaggugcuggccuacguggugcagcugccccuguacggcgugaucgacacccccugcuggaagcugcacaccagcccccugugcaccaccaacaccaaggagggcagcaacaucugccugaccagaaccgacagaggcugguacugcgacaacgccggcagcgugagcuucuucccccaggccgagaccugcaaggugcagagcaacagaguguucugcgacaccaugaacagccugacccugcccagcgaggugaaccugugcaacguggacaucuucaaccccaaguacgacugcaagaucaugaccagcaagaccgacgugagcagcagcgugaucaccagccugggcgccaucgugagcugcuacggcaagaccaagugcaccgccagcaacaagaacagaggcaucaucaagaccuucagcaacggcugcgacuacgugagcaacaagggcguggacaccgugagcgugggcaacacccuguacuacgugaacaagcaggagggcaagagccuguacgugaagggcgagcccaucaucaacuucuacgacccccugguguuccccagcgacgaguucgacgccagcaucagccaggugaacgagaagaucaaccagagccuggccuucaucagaaagagcgacgagcugcugcacaacgugaacgccggcaagagcaccaccaacaucaugaucaccaccaucaucaucgugaucaucgugauccugcugagccugaucgccgugggccugcugcuguacugcaaggccagaagcacccccgugacccugagcaaggaccagcugagcggcaucaacaacaucgccuucagcaacugaggacuaguggaagcauuuuccuggcugauuaaaagaaauuacucagcuauggucaucuguuccuguuagaaggcuaugcagcauauuauauacuaugcgcauguuaugaaaugcauaauaaaaaauuuuaaaaaaucuaaaagaucuaaaaaaaaaaaaaaaaaaaaaaaaaaaaaaaaaaaaaaaaaaaaaaaaaaaaaaaaaaaaaaaaugcaucccccccccccccccccccccccccccccccaaaggcucuuuucagagccaccagaauu

SEQ ID NO: 255 - RNA, 2174 nt, Artificial Sequence
  mRNA product Design d-5 comprising derived and/or modified sequence from HRSV(A2)__F0 (opt5)
gggagagggcgcuuggcuugcaaggacccugagcugcggcauugaagcacacccaacccaacucgacugaagucagccucacugaaccggaucugagaaucuucucucucugggcuugccagggcucuccgaaccuagcuagcauccucuucaauuccaacuagaaagcuuaccauggagcugcucauccugaaggccaacgcuauuaccacaauccuuacggccgugaccuucugcuuugcgagcggccagaauauuacagaagaguucuaccaauccaccuguucugcugucagcaaaggguaucuguccgcccucagaacaggaugguacaccucuguuaucacaauugaacugagcaacaucaaggagaauaaaugcaacggcaccgacgccaaggugaaacuuaucaagcaggaacuggauaaguauaaaaaugcugugacggagcuccagcugcugaugcaguccacccccgccacaaacaaucgggcucgcagagagcucccucgguuuaugaacuacacccugaauaacgccaagaaaacaaaugucacccuuucuaagaaacgcaagagacgguuccugggguuucuccugggagugggcagcgcgauugccuccgggguugcugugagcaagguccuucaccuggaaggagaggugaacaaaaucaagucugcccuccuguccacgaauaaagcuguugugagccugucuaacggcgucuccgugcucacaagcaaggugcuggaccuuaaaaauuauauugauaagcaacugcucccgaucgucaacaaacagucuuguuccauuagcaacaucgaaaccguuauugaguuccagcagaagaauaaccgccugcuugagaucacaagagaauuuuccgugaaugccggcgugaccacccccgucucuacauacaugcugacgaacagcgagcuccugucccugaucaaugacaugccuauuaccaacgaucaaaagaaacucaugagcaauaacgugcagaucguucggcagcagucuuauuccauuaugagcaucauuaaggaagaggugcuggcguacgucgugcaacuuccccuguacgggguuaucgacacaccuugcuggaaacuccauaccucuccccuguguacaaccaauacgaaggaaggaagcaacaucugccuuacacgcaccgauagaggcugguauugugacaaugccggguccgugucuuucuuuccucaggcugagaccugcaaaguccagagcaaccggguguucugugauacaaugaacucccugacccucccgagcgaggucaaucugugcaauguggacauuuuuaaccccaaguacgauuguaagaucaugacaucuaaaacggacguuuccagcucugugauuaccucccugggagccaucgucagcugcuauggcaagacaaaaugcaccgcuuccaacaagaaucgcgggauuaucaaaacauucucuaacggaugugauuacgugagcaauaagggcguugacaccguguccgucggcaacacgcucuauuacgugaauaagcaagaagggaaaucucuguaugugaagggagagccuaucauuaacuuuuacgacccccuuguuuucccuagcgaugaauuugacgccuccaucagccaggucaaugagaaaauuaaccagucucuggccuucaucagaaaguccgaugaacuccugcacaaugugaacgcuggcaaaagcaccacaaauauuaugaucaccacaauuaucaucgugauuaucgucauucugcuuucucucaucgcgguggggcugcugcucuacugcaaggcccgguccacccccguuacgcugagcaaggaccagcuuucuggaauuaacaauaucgcuuucagcaacugaggacuaguggaagcauuuuccuggcugauuaaaagaaauuacucagcuauggucaucuguuccuguuagaaggcuaugcagcauauuauauacuaugcgcauguuaugaaaugcauaauaaaaaauuuuaaaaaaucuaaaagaucuaaaaaaaaaaaaaaaaaaaaaaaaaaaaaaaaaaaaaaaaaaaaaaaaaaaaaaaaaaaaaaaaugcaucccccccccccccccccccccccccccccccaaaggcucuuuucagagccaccagaauu

SEQ ID NO: 256 - RNA, 2174 nt, Artificial Sequence
  mRNA product Design d-5 comprising derived and/or modified sequence from HRSV(A2)__F0 (opt6)
gggagagggcgcuuggcuugcaaggacccugagcugcggcauugaagcacacccaacccaacucgacugaagucagccucacugaaccggaucugagaaucuucucucucugggcuugccagggcucuccgaaccuagcuagcauccucuucaauuccaacuagaaagcuuaccauggaacuucuaauauuaaaagcuaacgcaaucacuacuaucuuaaccgcaguaacauucuguuuugcauccggccaaaacauaacagaagaauuuuaccaaucaacuugcucugcagucucaaaagguuaucuaucugcauuaagaacaggcugguacaccucaguaauaacgaucgaacuaucaaacaucaaagaaaacaaauguaauggaacagacgcaaaaguaaaacuaaucaaacaagaacuagacaaauacaaaaacgcaguaaccgaacuccaacuccucaugcaaaguacaccagcaacaaauaacagagcaagacgugaacuaccacguuuuaugaauuacacgcucaauaacgcaaaaaaaacaaauguuacccuaucaaaaaaacgaaaaagaagauuccucggauuccuacuaggcguaggcucagcaauagcuucaggaguagcaguaucaaaaguacuccaccucgaaggagaaguaaacaaaaucaaaagcgcucuccucucaacaaacaaagcaguuguuucacucucaaacggaguaucaguacuaaccucaaaaguacuugaccuaaaaaauuauauagacaaacaacuauuaccaauaguaaacaaacaaagcugcuccaucuccaacaucgagacagucauagaauuucaacaaaaaaauaaccgccuauuagaaauaaccagagaauuuucaguaaacgcaggaguaacuaccccaguaucaacauauauguuaacaaacucagaacuccuaagucuaaucaacgacaugccaauaaccaacgaccaaaaaaaacuaaugagcaacaauguacaaauaguucgucaacaaucuuacuccauaaugucuauaauaaaagaagaaguacucgccuauguaguccaacuaccacuauacggagucaucgauacaccaugcuggaaacuccacacauccccacucuguacuacuaacaccaaagaagguucaaauauaugccuaaccagaacagauagagguugguacugcgauaaugcaggaucaguauccuuuuucccccaagccgaaacaugcaaaguucaauccaauagaguauuuugugauacaaugaacucuuuaacccucccauccgaagucaaucuauguaacgucgacauauuuaacccaaaauacgauugcaaaauaaugacaucaaaaacagacgucucauccucaguuauaacguccuuaggcgcuauaguaucaugcuacggcaaaacaaaauguacagcaucaaacaaaaacagaggaaucauaaaaacuuucucuaacgguugcgacuauguauccaacaaaggugucgacacaguauccguaggcaacacccuuuacuauguuaauaaacaagaaggaaaaucucuauauguaaaaggcgaaccaauuauaaauuuuuacgacccccuugucuuucccucugacgaauuugacgcuuccauaucacaagucaacgaaaaaaucaaccaaucccucgcauucauacgcaaaucagacgaacuacuacauaacgucaacgcaggcaaauccacaacaaacauaaugauaaccacaaucauaauuguaauaauaguaauacuacuuucucuaauagcagucggauuacucuuauacuguaaagcucgaucaacaccagucacccucucuaaagaucaacuauccggaaucaacaacauagcuuucucaaacuaaggacuaguggaagcauuuuccuggcugauuaaaagaaauuacucagcuauggucaucuguuccuguuagaaggcuaugcagcauauuauauacuaugcgcauguuaugaaaugcauaauaaaaaauuuuaaaaaaucuaaaagaucuaaaaaaaaaaaaaaaaaaaaaaaaaaaaaaaaaaaaaaaaaaaaaaaaaaaaaaaaaaaaaaaaugcaucccccccccccccccccccccccccccccccaaaggcucuuuucagagccaccagaauu

SEQ ID NO: 257 - RNA, 2174 nt, Artificial Sequence
  mRNA product Design d-5 comprising derived and/or modified sequence from HRSV(A2)__F0 (opt11)
gggagagggcgcuuggcuugcaaggacccugagcugcggcauugaagcacacccaacccaacucgacugaagucagccucacugaaccggaucugagaaucuucucucucugggcuugccagggcucuccgaaccuagcuagcauccucuucaauuccaacuagaaagcuuaccauggaacuccucauacucaaagccaacgcaaucacaaccauacucaccgccgucaccuucugcuuugcaucuggccagaacaucacugaagaguucuaccaauccacaugcuccgccguaagcaaaggcuaccuauccgcccuacgcaccggcugguacaccagcguaaucaccauagaacucuccaauauaaaagaaaacaaaugcaacggcaccgacgcaaaagucaagcuaauaaaacaagaacucgacaaauacaaaaacgccguuaccgaacuccagcuacucaugcaaucgaccccagcaaccaacaaccgugcgagacgcgaacucccccgcuucaugaacuacacccuaaacaacgccaaaaagaccaacguaacucuauccaagaaacgcaaacgccgcuuccucggauuccuccucggcgucggcuccgcaaucgccagcggcgucgccguuagcaaaguccuucaccucgaaggagaaguaaacaaaauuaaaagcgcccucuuauccacaaacaaggccguaguaucccugucaaacggcgucuccguccuuacauccaaaguccucgaccucaagaacuacauagacaaacagcuacuacccauuguaaauaaacaaagcugcucaauuagcaacaucgaaaccguaaucgaguuccagcagaaaaacaacagacuucucgaaaucacccgcgaguucagcgucaacgccggcguaaccaccccugucucaacauacaugcuaaccaacagcgaacugcucucccucaucaacgacaugcccaucaccaacgaccaaaagaaacucaugagcaacaacguacaaaucgugcgccaacaguccuacucaauaaugucaaucaucaaagaagaagugcuagcauacgucguacaacuaccacucuacggcguaauagauacccccugcuggaagcuccauaccuccccacucuguaccaccaacaccaaagaaggcucaaacaucugccuaacgcgcacagaccguggaugguacugugacaacgccggcuccgucuccuucuucccucaagccgaaacaugcaaaguccaauccaacagagucuucugcgauaccaugaacucccugacacucccaagcgaagucaaccuuugcaacgucgauaucuuuaaccccaaauacgacugcaagaucaugacaucaaaaaccgacguauccuccucuguaauaaccucccuaggcgcaaucguaucaugcuacggcaaaaccaaauguaccgccuccaacaaaaaucgcggcaucaucaaaaccuucucgaacggcugcgacuacgucuccaacaaaggcguagacacaguuuccguaggcaacacccucuacuacgucaauaaacaggaaggcaagucccucuacgucaaaggcgaacccaucaucaauuucuacgacccccucguuuuccccuccgaugaguucgacgcaagcaucagccaggucaacgaaaagauaaaccagucccucgccuucauccgcaaaucagaugaacuccuucacaacguuaacgcaggcaagagcaccaccaacaucaugaucacaacuauaaucaucgucauaaucgucauccuacucucacuaaucgccgucggucuccuacuauauuguaaagcccgaucaacaccggucacacucuccaaagaccaacucuccggaaucaacaauaucgcuuucucgaacuaaggacuaguggaagcauuuuccuggcugauuaaaagaaauuacucagcuauggucaucuguuccuguuagaaggcuaugcagcauauuauauacuaugcgcauguuaugaaaugcauaauaaaaaauuuuaaaaaaucuaaaagaucuaaaaaaaaaaaaaaaaaaaaaaaaaaaaaaaaaaaaaaaaaaaaaaaaaaaaaaaaaaaaaaaaugcaucccccccccccccccccccccccccccccccaaaggcucuuuucagagccaccagaauu

SEQ ID NO: 258 - RNA, 2054 nt, Artificial Sequence
  mRNA product Design e-1 comprising derived and/or modified sequence from HRSV(A2)__F0 (artificial)
gggagaauauaagcguuggcggagcgucgguuguagcacucugcgcgcccgcucuucugcugcuguuugucuacuuccuccugcuuccccgccgccgccgccgccaucaagcuuaccauggaguugcuaauccucaaagcaaaugcaauuaccacaauccucacugcagucacauuuuguuuugcuucuggucaaaacaucacugaagaauuuuaucaaucaacaugcagugcaguuagcaaaggcuaucuuagugcucugagaacugguugguauaccaguguuauaacuauagaauuaaguaauaucaaggaaaauaaguguaauggaacagaugcuaagguaaaauugauaaaacaagaauuagauaaauauaaaaaugcuguaacagaauugcaguugcucaugcaaagcacaccagcaacaaacaaucgagccagaagagaacuaccaagguuuaugaauuauacacucaacaaugccaaaaaaaccaauguaacauuaagcaagaaaaggaaaagaagauuucuugguuuuuuguuagguguuggaucugcaaucgccaguggcguugcuguaucuaagguccugcaccuagaaggggaagugaacaagaucaaaagugcucuacuauccacaaacaaggcuguagucagcuuaucaaauggaguuagugucuuaaccagcaaaguguuagaccucaaaaacuauauagauaaacaauuguuaccuauugugaacaagcaaagcugcagcauaucaaauauagaaacugugauagaguuccaacaaaagaacaacagacuacuagagauuaccagggaauuuaguguuaaugcagguguaacuacaccuguaagcacuuacauguuaacuaauagugaauuauugucauuaaucaaugauaugccuauaacaaaugaucagaaaaaguuaauguccaacaauguucaaauaguuagacagcaaaguuacucuaucauguccauaauaaaagaggaagucuuagcauauguaguacaauuaccacuauaugguguuauagauacacccuguuggaaacuacacacauccccucuauguacaaccaacacaaaagaaggguccaacaucuguuuaacaagaacugacagaggaugguacugugacaaugcaggaucaguaucuuucuucccacaagcugaaacauguaaaguucaaucaaaucgaguauuuugugacacaaugaacaguuuaacauuaccaagugaaguaaaucucugcaauguugacauauucaaccccaaauaugauuguaaaauuaugacuucaaaaacagauguaagcagcuccguuaucacaucucuaggagccauugugucaugcuauggcaaaacuaaauguacagcauccaauaaaaaucguggaaucauaaagacauuuucuaacgggugcgauuauguaucaaauaaagggguggacacugugucuguagguaacacauuauauuauguaaauaagcaagaagguaaaagucucuauguaaaaggugaaccaauaauaaauuucuaugacccauuaguauuccccucugaugaauuugaugcaucaauaucucaagucaacgagaagauuaaccagagccuagcauuuauucguaaauccgaugaauuauuacauaauguaaaugcugguaaauccaccacaaauaucaugauaacuacuauaauuauagugauuauaguaauauuguuaucauuaauugcuguuggacugcucuuauacuguaaggccagaagcacaccagucacacuaagcaaagaucaacugagugguauaaauaauauugcauuuaguaacuaaggacuaguguccaccugucccuccugggcugcuggauugucucguuuuccugccaaauaaacaggaucagcgcuuuacagaucuaaaaaaaaaaaaaaaaaaaaaaaaaaaaaaaaaaaaaaaaaaaaaaaaaaaaaaaaaaaaaaaaugcaucccccccccccccccccccccccccccccccaaaggcucuuuucagagccaccagaauu

SEQ ID NO: 259 - RNA, 2054 nt, Artificial Sequence
  mRNA product Design e-1 comprising derived and/or modified sequence from HRSV(A2)__F0 (opt1)
gggagaauauaagcguuggcggagcgucgguuguagcacucugcgcgcccgcucuucugcugcuguuugucuacuuccuccugcuuccccgccgccgccgccgccaucaagcuuaccauggagcugcucauccugaaggccaacgccaucaccaccauccugacggcggugaccuucugcuucgccagcggccagaacaucaccgaggaguucuaccaguccaccugcagcgccgucuccaagggguaccucagcgcccugcggacgggcugguacaccuccgugaucaccaucgagcugagcaacaucaaggagaacaagugcaacgggaccgacgccaaggugaagcucaucaagcaggagcuggacaaguacaagaacgcggucacggagcugcagcuccugaugcaguccaccccggcaaccaacaaccgcgcccggcgcgagcugccccgguucaugaacuacacccucaacaacgccaagaagacgaacgugacccugagcaagaagcgcaagcggcgcuuccugggcuuccuccugggggugggcuccgccaucgcgagcggcgucgccguguccaaggugcugcaccucgagggggaggucaacaagaucaagagcgcccugcuguccaccaacaaggccguggugagccucuccaacggcgucagcgugcugaccuccaaggugcuggaccucaagaacuacaucgacaagcagcugcugcccaucgucaacaagcagagcugcuccaucagcaacaucgagacggugaucgaguuccagcagaagaacaaccggcuccuggagaucacccgcgaguucagcgugaacgccggggucaccacccccguguccacguacaugcugaccaacagcgagcuccugucccugaucaacgacaugccgaucaccaacgaccagaagaagcucaugagcaacaacgugcagaucguccggcagcaguccuacagcaucauguccaucaucaaggaggaggugcuggcguacgugguccagcugccccucuacggcgugaucgacacccccugcuggaagcugcacacgagcccccugugcaccaccaacaccaaggagggguccaacaucugccucacgcgcaccgaccggggcugguacugcgacaacgccggcagcgucuccuucuucccgcaggccgagaccugcaaggugcagagcaaccgcguguucugcgacaccaugaacucccugacgcugcccagcgagguaaaccucugcaacgucgacaucuucaaccccaaguacgacugcaagaucaugaccuccaagaccgacgugagcuccagcgugaucaccucccugggggccaucgucagcugcuacggcaagacgaagugcaccgccagcaacaagaaccgggggaucaucaagaccuucuccaacggcugcgacuacgugagcaacaagggcguggacaccguguccgucgggaacacccuguacuacgugaacaagcaggagggcaagagccucuacgugaagggggagcccaucaucaacuucuacgacccgcuggucuuccccuccgacgaguucgacgcgagcaucucccaggugaacgagaagaucaaccagagccuggccuucauccgcaaguccgacgagcugcuccacaacgugaacgccggcaagagcacgaccaacaucaugaucaccaccaucaucaucgucaucaucgugauccugcugucccucaucgccguggggcugcugcucuacugcaaggcccggagcacgcccgucacccuguccaaggaccagcugagcggcaucaacaacaucgcguucuccaacugaggacuaguguccaccugucccuccugggcugcuggauugucucguuuuccugccaaauaaacaggaucagcgcuuuacagaucuaaaaaaaaaaaaaaaaaaaaaaaaaaaaaaaaaaaaaaaaaaaaaaaaaaaaaaaaaaaaaaaaugcaucccccccccccccccccccccccccccccccaaaggcucuuuucagagccaccagaauu

SEQ ID NO: 260 - RNA, 2054 nt, Artificial Sequence
  mRNA product Design e-1 comprising derived and/or modified sequence from HRSV(A2)__F0 (opt1)
gggagaauauaagcguuggcggagcgucgguuguagcacucugcgcgcccgcucuucugcugcuguuugucuacuuccuccugcuuccccgccgccgccgccgccaucaagcuuaccauggagcugcucauccugaaggccaacgccaucaccaccauccugacggcggugaccuucugcuucgccagcggccagaacaucaccgaggaguucuaccaguccacgugcagcgccgucuccaagggguaccucagcgcccugcgcaccggcugguacaccuccgugaucaccaucgagcugagcaacaucaaggagaacaagugcaacgggaccgacgccaaggugaagcucaucaagcaggagcuggacaaguacaagaacgcggucacggagcugcagcuccugaugcaguccacccccgccaccaacaaccgggcccgccgggagcugccgcgcuucaugaacuacacccucaacaacgccaagaagacgaacgugacccugagcaagaagcggaagcgccgguuccugggcuuccuccugggggugggcuccgcgaucgccagcggcgucgccguguccaaggugcugcaccucgagggggaggucaacaagaucaagagcgcccugcuguccaccaacaaggccguggugagccucuccaacggcgucagcgugcugaccuccaaggugcuggaccucaagaacuacaucgacaagcagcugcugcccaucgucaacaagcagagcugcuccaucagcaacaucgagacggugaucgaguuccagcagaagaacaaccgccuccuggagaucacccgggaguucagcgugaacgcgggggucaccacccccguguccacguacaugcugaccaacagcgagcuccugucccugaucaacgacaugcccaucaccaacgaccagaagaagcucaugagcaacaacgugcagaucguccgccagcaguccuacagcaucauguccaucaucaaggaggaggugcuggccuacgugguccagcugccgcucuacggcgugaucgacacccccugcuggaagcugcacacgagcccccugugcaccaccaacaccaaggagggguccaacaucugccucacgcggaccgaccgcggcugguacugcgacaacgccggcagcgucuccuucuucccccaggccgagaccugcaaggugcagagcaaccggguguucugcgacaccaugaacucccugacgcugccgagcgaggucaaccucugcaacguggacaucuucaaccccaaguacgacugcaagaucaugaccuccaagaccgacgugagcuccagcgucaucaccucccugggggccaucgugagcugcuacggcaagacgaagugcaccgcgagcaacaagaaccgcgggaucaucaagaccuucuccaacggcugcgacuacgugagcaacaagggcgucgacaccguguccguggggaacacccuguacuacgucaacaagcaggagggcaagagccucuacgugaagggggagcccaucaucaacuucuacgacccccugguguucccguccgacgaguucgacgccagcaucucccaggucaacgagaagaucaaccagagccuggccuucauccggaaguccgacgagcuccugcacaacgugaacgccggcaagagcacgaccaacaucaugaucaccaccaucaucaucgugaucaucgucauccugcugucccucaucgccguggggcugcugcucuacugcaaggcgcgcagcacgcccgugacccuguccaaggaccagcugagcggcaucaacaacaucgccuucuccaacugaggacuaguguccaccugucccuccugggcugcuggauugucucguuuuccugccaaauaaacaggaucagcgcuuuacagaucuaaaaaaaaaaaaaaaaaaaaaaaaaaaaaaaaaaaaaaaaaaaaaaaaaaaaaaaaaaaaaaaaugcaucccccccccccccccccccccccccccccccaaaggcucuuuucagagccaccagaauu

SEQ ID NO: 261 - RNA, 2054 nt, Artificial Sequence
  mRNA product Design e-1 comprising derived and/or modified sequence from HRSV(A2)__F0 (opt2)
gggagaauauaagcguuggcggagcgucgguuguagcacucugcgcgcccgcucuucugcugcuguuugucuacuuccuccugcuuccccgccgccgccgccgccaucaagcuuaccauggagcuccucauccucaaggccaacgccaucaccaccauccucaccgccgucaccuucugcuucgccuccggccagaacaucaccgaggaguucuaccaguccaccugcuccgccgucuccaagggcuaccucuccgcccuccgcaccggcugguacaccuccgucaucaccaucgagcucuccaacaucaaggagaacaagugcaacggcaccgacgccaaggucaagcucaucaagcaggagcucgacaaguacaagaacgccgucaccgagcuccagcuccucaugcaguccacccccgccaccaacaaccgcgcccgccgcgagcucccccgcuucaugaacuacacccucaacaacgccaagaagaccaacgucacccucuccaagaagcgcaagcgccgcuuccucggcuuccuccucggcgucggcuccgccaucgccuccggcgucgccgucuccaagguccuccaccucgagggcgaggucaacaagaucaaguccgcccuccucuccaccaacaaggccgucgucucccucuccaacggcgucuccguccucaccuccaagguccucgaccucaagaacuacaucgacaagcagcuccuccccaucgucaacaagcaguccugcuccaucuccaacaucgagaccgucaucgaguuccagcagaagaacaaccgccuccucgagaucacccgcgaguucuccgucaacgccggcgucaccacccccgucuccaccuacaugcucaccaacuccgagcuccucucccucaucaacgacaugcccaucaccaacgaccagaagaagcucauguccaacaacguccagaucguccgccagcaguccuacuccaucauguccaucaucaaggaggagguccucgccuacgucguccagcucccccucuacggcgucaucgacacccccugcuggaagcuccacaccuccccccucugcaccaccaacaccaaggagggcuccaacaucugccucacccgcaccgaccgcggcugguacugcgacaacgccggcuccgucuccuucuucccccaggccgagaccugcaagguccaguccaaccgcgucuucugcgacaccaugaacucccucacccuccccuccgaggucaaccucugcaacgucgacaucuucaaccccaaguacgacugcaagaucaugaccuccaagaccgacgucuccuccuccgucaucaccucccucggcgccaucgucuccugcuacggcaagaccaagugcaccgccuccaacaagaaccgcggcaucaucaagaccuucuccaacggcugcgacuacgucuccaacaagggcgucgacaccgucuccgucggcaacacccucuacuacgucaacaagcaggagggcaagucccucuacgucaagggcgagcccaucaucaacuucuacgacccccucgucuuccccuccgacgaguucgacgccuccaucucccaggucaacgagaagaucaaccagucccucgccuucauccgcaaguccgacgagcuccuccacaacgucaacgccggcaaguccaccaccaacaucaugaucaccaccaucaucaucgucaucaucgucauccuccucucccucaucgccgucggccuccuccucuacugcaaggcccgcuccacccccgucacccucuccaaggaccagcucuccggcaucaacaacaucgccuucuccaacugaggacuaguguccaccugucccuccugggcugcuggauugucucguuuuccugccaaauaaacaggaucagcgcuuuacagaucuaaaaaaaaaaaaaaaaaaaaaaaaaaaaaaaaaaaaaaaaaaaaaaaaaaaaaaaaaaaaaaaaugcaucccccccccccccccccccccccccccccccaaaggcucuuuucagagccaccagaauu

SEQ ID NO: 262 - RNA, 2054 nt, Artificial Sequence
  mRNA product Design e-1 comprising derived and/or modified sequence from HRSV(A2)__F0 (opt3)
gggagaauauaagcguuggcggagcgucgguuguagcacucugcgcgcccgcucuucugcugcuguuugucuacuuccuccugcuuccccgccgccgccgccgccaucaagcuuaccauggagcugcucauccuuaaggccaacgcuauuaccacaauacugacugcagugacguucugcuuugccagcggccagaauaucaccgaagaguucuaccaauccacauguucugcggucucaaaaggguauuugagugcuuuaagaacuggaugguacaccagcguuauuacaaucgaacuguccaacauuaaggagaauaaaugcaacgguaccgacgccaaggugaaacuaaucaagcaggaacucgauaaguauaaaaaugcaguaacugagcugcagcuucugaugcagucuacacccgccaccaacaauagggcucggcgcgaguugccucgauuuaugaacuacacgcucaauaacgcaaagaaaacuaaugugacccugucgaagaaacguaagagaagguuccugggcuuucucuuaggggucggaucagccauagcuagcggcguggccguuaguaaggugcugcaccuugaaggugaggucaacaaaaucaaguccgcguugcugucuacaaauaaagcagugguaagccuauccaacgggguuucagugcucacuucuaagguccuggaccuuaaaaauuauauugauaagcaacuguugccaaucgugaacaaacagagcuguucuauuuccaacaucgaaaccgugauagaguuccagcagaagaauaaccggcuccuggagauuacacgcgaauuuucagucaaugccggaguuaccacgccggugagcacuuacauguuaacaaacagugagcugcucucucuuaucaaugacaugcccauuaccaacgaucaaaagaaacugauguccaauaacguacagaucgugagacagcagagcuauucgaucaugucuauuauaaaggaagaggucuuggcuuacgugguucaacuaccucuguacggcgugaucgacacuccaugcuggaaacuccauacauccccacuguguaccacgaauaccaaggaaggcucaaacauuugccuuacaaggacugaucgggggugguauugugacaaugccggaagugucagcuucuuuccucaggcagagaccugcaaagugcaguccaaccgcguauucugugauacaaugaauagucugacuuugccaagcgagguuaaccucugcaauguggacaucuuuaaccccaaguacgauuguaagauaaugaccucaaaaacagacgucaguuccagcgugauuaccucucugggugcuaucgucucaugcuauggcaagacuaaaugcacggccaguaacaagaaucgagggaucauuaaaacauucagcaacggaugugauuacguguccaauaagggcguugacaccgugucuguagguaacacuuuauauuacgucaauaagcaagaagggaaaucgcuguaugugaagggagagccuaucauuaacuuuuacgacccccuaguuuucccgagcgaugaauuugacgcguccauaucacaggugaaugagaaaaucaaccagagucucgccuucauuagaaagucugaugaacugcuucacaaugucaacgcaggcaaaagcaccacaaauaucaugaucaccacuauuauaaucgugauuaucguaauuuugcugucccucaucgcugugggccugcuucuguacugcaaggccaggucaacacccguuacguugagcaaggaccagcucucugggauaaacaauaucgcuuucuccaacugaggacuaguguccaccugucccuccugggcugcuggauugucucguuuuccugccaaauaaacaggaucagcgcuuuacagaucuaaaaaaaaaaaaaaaaaaaaaaaaaaaaaaaaaaaaaaaaaaaaaaaaaaaaaaaaaaaaaaaaugcaucccccccccccccccccccccccccccccccaaaggcucuuuucagagccaccagaauu

SEQ ID NO: 263 - RNA, 2054 nt, Artificial Sequence
  mRNA product Design e-1 comprising derived and/or modified sequence from HRSV(A2)__F0 (opt4)
gggagaauauaagcguuggcggagcgucgguuguagcacucugcgcgcccgcucuucugcugcuguuugucuacuuccuccugcuuccccgccgccgccgccgccaucaagcuuaccauggagcugcugauccugaaggccaacgccaucaccaccauccugaccgccgugaccuucugcuucgccagcggccagaacaucaccgaggaguucuaccagagcaccugcagcgccgugagcaagggcuaccugagcgcccugagaaccggcugguacaccagcgugaucaccaucgagcugagcaacaucaaggagaacaagugcaacggcaccgacgccaaggugaagcugaucaagcaggagcuggacaaguacaagaacgccgugaccgagcugcagcugcugaugcagagcacccccgccaccaacaacagagccagaagagagcugcccagauucaugaacuacacccugaacaacgccaagaagaccaacgugacccugagcaagaagagaaagagaagauuccugggcuuccugcugggcgugggcagcgccaucgccagcggcguggccgugagcaaggugcugcaccuggagggcgaggugaacaagaucaagagcgcccugcugagcaccaacaaggccguggugagccugagcaacggcgugagcgugcugaccagcaaggugcuggaccugaagaacuacaucgacaagcagcugcugcccaucgugaacaagcagagcugcagcaucagcaacaucgagaccgugaucgaguuccagcagaagaacaacagacugcuggagaucaccagagaguucagcgugaacgccggcgugaccacccccgugagcaccuacaugcugaccaacagcgagcugcugagccugaucaacgacaugcccaucaccaacgaccagaagaagcugaugagcaacaacgugcagaucgugagacagcagagcuacagcaucaugagcaucaucaaggaggaggugcuggccuacguggugcagcugccccuguacggcgugaucgacacccccugcuggaagcugcacaccagcccccugugcaccaccaacaccaaggagggcagcaacaucugccugaccagaaccgacagaggcugguacugcgacaacgccggcagcgugagcuucuucccccaggccgagaccugcaaggugcagagcaacagaguguucugcgacaccaugaacagccugacccugcccagcgaggugaaccugugcaacguggacaucuucaaccccaaguacgacugcaagaucaugaccagcaagaccgacgugagcagcagcgugaucaccagccugggcgccaucgugagcugcuacggcaagaccaagugcaccgccagcaacaagaacagaggcaucaucaagaccuucagcaacggcugcgacuacgugagcaacaagggcguggacaccgugagcgugggcaacacccuguacuacgugaacaagcaggagggcaagagccuguacgugaagggcgagcccaucaucaacuucuacgacccccugguguuccccagcgacgaguucgacgccagcaucagccaggugaacgagaagaucaaccagagccuggccuucaucagaaagagcgacgagcugcugcacaacgugaacgccggcaagagcaccaccaacaucaugaucaccaccaucaucaucgugaucaucgugauccugcugagccugaucgccgugggccugcugcuguacugcaaggccagaagcacccccgugacccugagcaaggaccagcugagcggcaucaacaacaucgccuucagcaacugaggacuaguguccaccugucccuccugggcugcuggauugucucguuuuccugccaaauaaacaggaucagcgcuuuacagaucuaaaaaaaaaaaaaaaaaaaaaaaaaaaaaaaaaaaaaaaaaaaaaaaaaaaaaaaaaaaaaaaaugcaucccccccccccccccccccccccccccccccaaaggcucuuuucagagccaccagaauu

SEQ ID NO: 264 - RNA, 2054 nt, Artificial Sequence
  mRNA product Design e-1 comprising derived and/or modified sequence from HRSV(A2)__F0 (opt5)
gggagaauauaagcguuggcggagcgucgguuguagcacucugcgcgcccgcucuucugcugcuguuugucuacuuccuccugcuuccccgccgccgccgccgccaucaagcuuaccauggagcugcucauccugaaggccaacgcuauuaccacaauccuuacggccgugaccuucugcuuugcgagcggccagaauauuacagaagaguucuaccaauccaccuguucugcugucagcaaaggguaucuguccgcccucagaacaggaugguacaccucuguuaucacaauugaacugagcaacaucaaggagaauaaaugcaacggcaccgacgccaaggugaaacuuaucaagcaggaacuggauaaguauaaaaaugcugugacggagcuccagcugcugaugcaguccacccccgccacaaacaaucgggcucgcagagagcucccucgguuuaugaacuacacccugaauaacgccaagaaaacaaaugucacccuuucuaagaaacgcaagagacgguuccugggguuucuccugggagugggcagcgcgauugccuccgggguugcugugagcaagguccuucaccuggaaggagaggugaacaaaaucaagucugcccuccuguccacgaauaaagcuguugugagccugucuaacggcgucuccgugcucacaagcaaggugcuggaccuuaaaaauuauauugauaagcaacugcucccgaucgucaacaaacagucuuguuccauuagcaacaucgaaaccguuauugaguuccagcagaagaauaaccgccugcuugagaucacaagagaauuuuccgugaaugccggcgugaccacccccgucucuacauacaugcugacgaacagcgagcuccugucccugaucaaugacaugccuauuaccaacgaucaaaagaaacucaugagcaauaacgugcagaucguucggcagcagucuuauuccauuaugagcaucauuaaggaagaggugcuggcguacgucgugcaacuuccccuguacgggguuaucgacacaccuugcuggaaacuccauaccucuccccuguguacaaccaauacgaaggaaggaagcaacaucugccuuacacgcaccgauagaggcugguauugugacaaugccggguccgugucuuucuuuccucaggcugagaccugcaaaguccagagcaaccggguguucugugauacaaugaacucccugacccucccgagcgaggucaaucugugcaauguggacauuuuuaaccccaaguacgauuguaagaucaugacaucuaaaacggacguuuccagcucugugauuaccucccugggagccaucgucagcugcuauggcaagacaaaaugcaccgcuuccaacaagaaucgcgggauuaucaaaacauucucuaacggaugugauuacgugagcaauaagggcguugacaccguguccgucggcaacacgcucuauuacgugaauaagcaagaagggaaaucucuguaugugaagggagagccuaucauuaacuuuuacgacccccuuguuuucccuagcgaugaauuugacgccuccaucagccaggucaaugagaaaauuaaccagucucuggccuucaucagaaaguccgaugaacuccugcacaaugugaacgcuggcaaaagcaccacaaauauuaugaucaccacaauuaucaucgugauuaucgucauucugcuuucucucaucgcgguggggcugcugcucuacugcaaggcccgguccacccccguuacgcugagcaaggaccagcuuucuggaauuaacaauaucgcuuucagcaacugaggacuaguguccaccugucccuccugggcugcuggauugucucguuuuccugccaaauaaacaggaucagcgcuuuacagaucuaaaaaaaaaaaaaaaaaaaaaaaaaaaaaaaaaaaaaaaaaaaaaaaaaaaaaaaaaaaaaaaaugcaucccccccccccccccccccccccccccccccaaaggcucuuuucagagccaccagaauu

SEQ ID NO: 265 - RNA, 2054 nt, Artificial Sequence
  mRNA product Design e-1 comprising derived and/or modified sequence from HRSV(A2)__F0 (opt6)
gggagaauauaagcguuggcggagcgucgguuguagcacucugcgcgcccgcucuucugcugcuguuugucuacuuccuccugcuuccccgccgccgccgccgccaucaagcuuaccauggaacuucuaauauuaaaagcuaacgcaaucacuacuaucuuaaccgcaguaacauucuguuuugcauccggccaaaacauaacagaagaauuuuaccaaucaacuugcucugcagucucaaaagguuaucuaucugcauuaagaacaggcugguacaccucaguaauaacgaucgaacuaucaaacaucaaagaaaacaaauguaauggaacagacgcaaaaguaaaacuaaucaaacaagaacuagacaaauacaaaaacgcaguaaccgaacuccaacuccucaugcaaaguacaccagcaacaaauaacagagcaagacgugaacuaccacguuuuaugaauuacacgcucaauaacgcaaaaaaaacaaauguuacccuaucaaaaaaacgaaaaagaagauuccucggauuccuacuaggcguaggcucagcaauagcuucaggaguagcaguaucaaaaguacuccaccucgaaggagaaguaaacaaaaucaaaagcgcucuccucucaacaaacaaagcaguuguuucacucucaaacggaguaucaguacuaaccucaaaaguacuugaccuaaaaaauuauauagacaaacaacuauuaccaauaguaaacaaacaaagcugcuccaucuccaacaucgagacagucauagaauuucaacaaaaaaauaaccgccuauuagaaauaaccagagaauuuucaguaaacgcaggaguaacuaccccaguaucaacauauauguuaacaaacucagaacuccuaagucuaaucaacgacaugccaauaaccaacgaccaaaaaaaacuaaugagcaacaauguacaaauaguucgucaacaaucuuacuccauaaugucuauaauaaaagaagaaguacucgccuauguaguccaacuaccacuauacggagucaucgauacaccaugcuggaaacuccacacauccccacucuguacuacuaacaccaaagaagguucaaauauaugccuaaccagaacagauagagguugguacugcgauaaugcaggaucaguauccuuuuucccccaagccgaaacaugcaaaguucaauccaauagaguauuuugugauacaaugaacucuuuaacccucccauccgaagucaaucuauguaacgucgacauauuuaacccaaaauacgauugcaaaauaaugacaucaaaaacagacgucucauccucaguuauaacguccuuaggcgcuauaguaucaugcuacggcaaaacaaaauguacagcaucaaacaaaaacagaggaaucauaaaaacuuucucuaacgguugcgacuauguauccaacaaaggugucgacacaguauccguaggcaacacccuuuacuauguuaauaaacaagaaggaaaaucucuauauguaaaaggcgaaccaauuauaaauuuuuacgacccccuugucuuucccucugacgaauuugacgcuuccauaucacaagucaacgaaaaaaucaaccaaucccucgcauucauacgcaaaucagacgaacuacuacauaacgucaacgcaggcaaauccacaacaaacauaaugauaaccacaaucauaauuguaauaauaguaauacuacuuucucuaauagcagucggauuacucuuauacuguaaagcucgaucaacaccagucacccucucuaaagaucaacuauccggaaucaacaacauagcuuucucaaacuaaggacuaguguccaccugucccuccugggcugcuggauugucucguuuuccugccaaauaaacaggaucagcgcuuuacagaucuaaaaaaaaaaaaaaaaaaaaaaaaaaaaaaaaaaaaaaaaaaaaaaaaaaaaaaaaaaaaaaaaugcaucccccccccccccccccccccccccccccccaaaggcucuuuucagagccaccagaauu

SEQ ID NO: 266 - RNA, 2054 nt, Artificial Sequence
  mRNA product Design e-1 comprising derived and/or modified sequence from HRSV(A2)__F0 (opt11)
gggagaauauaagcguuggcggagcgucgguuguagcacucugcgcgcccgcucuucugcugcuguuugucuacuuccuccugcuuccccgccgccgccgccgccaucaagcuuaccauggaacuccucauacucaaagccaacgcaaucacaaccauacucaccgccgucaccuucugcuuugcaucuggccagaacaucacugaagaguucuaccaauccacaugcuccgccguaagcaaaggcuaccuauccgcccuacgcaccggcugguacaccagcguaaucaccauagaacucuccaauauaaaagaaaacaaaugcaacggcaccgacgcaaaagucaagcuaauaaaacaagaacucgacaaauacaaaaacgccguuaccgaacuccagcuacucaugcaaucgaccccagcaaccaacaaccgugcgagacgcgaacucccccgcuucaugaacuacacccuaaacaacgccaaaaagaccaacguaacucuauccaagaaacgcaaacgccgcuuccucggauuccuccucggcgucggcuccgcaaucgccagcggcgucgccguuagcaaaguccuucaccucgaaggagaaguaaacaaaauuaaaagcgcccucuuauccacaaacaaggccguaguaucccugucaaacggcgucuccguccuuacauccaaaguccucgaccucaagaacuacauagacaaacagcuacuacccauuguaaauaaacaaagcugcucaauuagcaacaucgaaaccguaaucgaguuccagcagaaaaacaacagacuucucgaaaucacccgcgaguucagcgucaacgccggcguaaccaccccugucucaacauacaugcuaaccaacagcgaacugcucucccucaucaacgacaugcccaucaccaacgaccaaaagaaacucaugagcaacaacguacaaaucgugcgccaacaguccuacucaauaaugucaaucaucaaagaagaagugcuagcauacgucguacaacuaccacucuacggcguaauagauacccccugcuggaagcuccauaccuccccacucuguaccaccaacaccaaagaaggcucaaacaucugccuaacgcgcacagaccguggaugguacugugacaacgccggcuccgucuccuucuucccucaagccgaaacaugcaaaguccaauccaacagagucuucugcgauaccaugaacucccugacacucccaagcgaagucaaccuuugcaacgucgauaucuuuaaccccaaauacgacugcaagaucaugacaucaaaaaccgacguauccuccucuguaauaaccucccuaggcgcaaucguaucaugcuacggcaaaaccaaauguaccgccuccaacaaaaaucgcggcaucaucaaaaccuucucgaacggcugcgacuacgucuccaacaaaggcguagacacaguuuccguaggcaacacccucuacuacgucaauaaacaggaaggcaagucccucuacgucaaaggcgaacccaucaucaauuucuacgacccccucguuuuccccuccgaugaguucgacgcaagcaucagccaggucaacgaaaagauaaaccagucccucgccuucauccgcaaaucagaugaacuccuucacaacguuaacgcaggcaagagcaccaccaacaucaugaucacaacuauaaucaucgucauaaucgucauccuacucucacuaaucgccgucggucuccuacuauauuguaaagcccgaucaacaccggucacacucuccaaagaccaacucuccggaaucaacaauaucgcuuucucgaacuaaggacuaguguccaccugucccuccugggcugcuggauugucucguuuuccugccaaauaaacaggaucagcgcuuuacagaucuaaaaaaaaaaaaaaaaaaaaaaaaaaaaaaaaaaaaaaaaaaaaaaaaaaaaaaaaaaaaaaaaugcaucccccccccccccccccccccccccccccccaaaggcucuuuucagagccaccagaauu

SEQ ID NO: 267 - RNA, 2036 nt, Artificial Sequence
  mRNA product Design e-2 comprising derived and/or modified sequence from HRSV(A2)__F0 (artificial)
gggagacccgugacccggaaguuguacggcuacgcgacuuucccucccacaaacccucgcgcccuuccuuuccuacuugggcccggcagaaagcuuaccauggaguugcuaauccucaaagcaaaugcaauuaccacaauccucacugcagucacauuuuguuuugcuucuggucaaaacaucacugaagaauuuuaucaaucaacaugcagugcaguuagcaaaggcuaucuuagugcucugagaacugguugguauaccaguguuauaacuauagaauuaaguaauaucaaggaaaauaaguguaauggaacagaugcuaagguaaaauugauaaaacaagaauuagauaaauauaaaaaugcuguaacagaauugcaguugcucaugcaaagcacaccagcaacaaacaaucgagccagaagagaacuaccaagguuuaugaauuauacacucaacaaugccaaaaaaaccaauguaacauuaagcaagaaaaggaaaagaagauuucuugguuuuuuguuagguguuggaucugcaaucgccaguggcguugcuguaucuaagguccugcaccuagaaggggaagugaacaagaucaaaagugcucuacuauccacaaacaaggcuguagucagcuuaucaaauggaguuagugucuuaaccagcaaaguguuagaccucaaaaacuauauagauaaacaauuguuaccuauugugaacaagcaaagcugcagcauaucaaauauagaaacugugauagaguuccaacaaaagaacaacagacuacuagagauuaccagggaauuuaguguuaaugcagguguaacuacaccuguaagcacuuacauguuaacuaauagugaauuauugucauuaaucaaugauaugccuauaacaaaugaucagaaaaaguuaauguccaacaauguucaaauaguuagacagcaaaguuacucuaucauguccauaauaaaagaggaagucuuagcauauguaguacaauuaccacuauaugguguuauagauacacccuguuggaaacuacacacauccccucuauguacaaccaacacaaaagaaggguccaacaucuguuuaacaagaacugacagaggaugguacugugacaaugcaggaucaguaucuuucuucccacaagcugaaacauguaaaguucaaucaaaucgaguauuuugugacacaaugaacaguuuaacauuaccaagugaaguaaaucucugcaauguugacauauucaaccccaaauaugauuguaaaauuaugacuucaaaaacagauguaagcagcuccguuaucacaucucuaggagccauugugucaugcuauggcaaaacuaaauguacagcauccaauaaaaaucguggaaucauaaagacauuuucuaacgggugcgauuauguaucaaauaaagggguggacacugugucuguagguaacacauuauauuauguaaauaagcaagaagguaaaagucucuauguaaaaggugaaccaauaauaaauuucuaugacccauuaguauuccccucugaugaauuugaugcaucaauaucucaagucaacgagaagauuaaccagagccuagcauuuauucguaaauccgaugaauuauuacauaauguaaaugcugguaaauccaccacaaauaucaugauaacuacuauaauuauagugauuauaguaauauuguuaucauuaauugcuguuggacugcucuuauacuguaaggccagaagcacaccagucacacuaagcaaagaucaacugagugguauaaauaauauugcauuuaguaacuaaggacuaguguccaccugucccuccugggcugcuggauugucucguuuuccugccaaauaaacaggaucagcgcuuuacagaucuaaaaaaaaaaaaaaaaaaaaaaaaaaaaaaaaaaaaaaaaaaaaaaaaaaaaaaaaaaaaaaaaugcaucccccccccccccccccccccccccccccccaaaggcucuuuucagagccaccagaauu

SEQ ID NO: 268 - RNA, 2036 nt, Artificial Sequence
  mRNA product Design e-2 comprising derived and/or modified sequence from HRSV(A2)__F0 (opt1)
gggagacccgugacccggaaguuguacggcuacgcgacuuucccucccacaaacccucgcgcccuuccuuuccuacuugggcccggcagaaagcuuaccauggagcugcucauccugaaggccaacgccaucaccaccauccugacggcggugaccuucugcuucgccagcggccagaacaucaccgaggaguucuaccaguccaccugcagcgccgucuccaagggguaccucagcgcccugcggacgggcugguacaccuccgugaucaccaucgagcugagcaacaucaaggagaacaagugcaacgggaccgacgccaaggugaagcucaucaagcaggagcuggacaaguacaagaacgcggucacggagcugcagcuccugaugcaguccaccccggcaaccaacaaccgcgcccggcgcgagcugccccgguucaugaacuacacccucaacaacgccaagaagacgaacgugacccugagcaagaagcgcaagcggcgcuuccugggcuuccuccugggggugggcuccgccaucgcgagcggcgucgccguguccaaggugcugcaccucgagggggaggucaacaagaucaagagcgcccugcuguccaccaacaaggccguggugagccucuccaacggcgucagcgugcugaccuccaaggugcuggaccucaagaacuacaucgacaagcagcugcugcccaucgucaacaagcagagcugcuccaucagcaacaucgagacggugaucgaguuccagcagaagaacaaccggcuccuggagaucacccgcgaguucagcgugaacgccggggucaccacccccguguccacguacaugcugaccaacagcgagcuccugucccugaucaacgacaugccgaucaccaacgaccagaagaagcucaugagcaacaacgugcagaucguccggcagcaguccuacagcaucauguccaucaucaaggaggaggugcuggcguacgugguccagcugccccucuacggcgugaucgacacccccugcuggaagcugcacacgagcccccugugcaccaccaacaccaaggagggguccaacaucugccucacgcgcaccgaccggggcugguacugcgacaacgccggcagcgucuccuucuucccgcaggccgagaccugcaaggugcagagcaaccgcguguucugcgacaccaugaacucccugacgcugcccagcgagguaaaccucugcaacgucgacaucuucaaccccaaguacgacugcaagaucaugaccuccaagaccgacgugagcuccagcgugaucaccucccugggggccaucgucagcugcuacggcaagacgaagugcaccgccagcaacaagaaccgggggaucaucaagaccuucuccaacggcugcgacuacgugagcaacaagggcguggacaccguguccgucgggaacacccuguacuacgugaacaagcaggagggcaagagccucuacgugaagggggagcccaucaucaacuucuacgacccgcuggucuuccccuccgacgaguucgacgcgagcaucucccaggugaacgagaagaucaaccagagccuggccuucauccgcaaguccgacgagcugcuccacaacgugaacgccggcaagagcacgaccaacaucaugaucaccaccaucaucaucgucaucaucgugauccugcugucccucaucgccguggggcugcugcucuacugcaaggcccggagcacgcccgucacccuguccaaggaccagcugagcggcaucaacaacaucgcguucuccaacugaggacuaguguccaccugucccuccugggcugcuggauugucucguuuuccugccaaauaaacaggaucagcgcuuuacagaucuaaaaaaaaaaaaaaaaaaaaaaaaaaaaaaaaaaaaaaaaaaaaaaaaaaaaaaaaaaaaaaaaugcaucccccccccccccccccccccccccccccccaaaggcucuuuucagagccaccagaauu

SEQ ID NO: 269 - RNA, 2036 nt, Artificial Sequence
  mRNA product Design e-2 comprising derived and/or modified sequence from HRSV(A2)__F0 (opt1)
gggagacccgugacccggaaguuguacggcuacgcgacuuucccucccacaaacccucgcgcccuuccuuuccuacuugggcccggcagaaagcuuaccauggagcugcucauccugaaggccaacgccaucaccaccauccugacggcggugaccuucugcuucgccagcggccagaacaucaccgaggaguucuaccaguccacgugcagcgccgucuccaagggguaccucagcgcccugcgcaccggcugguacaccuccgugaucaccaucgagcugagcaacaucaaggagaacaagugcaacgggaccgacgccaaggugaagcucaucaagcaggagcuggacaaguacaagaacgcggucacggagcugcagcuccugaugcaguccacccccgccaccaacaaccgggcccgccgggagcugccgcgcuucaugaacuacacccucaacaacgccaagaagacgaacgugacccugagcaagaagcggaagcgccgguuccugggcuuccuccugggggugggcuccgcgaucgccagcggcgucgccguguccaaggugcugcaccucgagggggaggucaacaagaucaagagcgcccugcuguccaccaacaaggccguggugagccucuccaacggcgucagcgugcugaccuccaaggugcuggaccucaagaacuacaucgacaagcagcugcugcccaucgucaacaagcagagcugcuccaucagcaacaucgagacggugaucgaguuccagcagaagaacaaccgccuccuggagaucacccgggaguucagcgugaacgcgggggucaccacccccguguccacguacaugcugaccaacagcgagcuccugucccugaucaacgacaugcccaucaccaacgaccagaagaagcucaugagcaacaacgugcagaucguccgccagcaguccuacagcaucauguccaucaucaaggaggaggugcuggccuacgugguccagcugccgcucuacggcgugaucgacacccccugcuggaagcugcacacgagcccccugugcaccaccaacaccaaggagggguccaacaucugccucacgcggaccgaccgcggcugguacugcgacaacgccggcagcgucuccuucuucccccaggccgagaccugcaaggugcagagcaaccggguguucugcgacaccaugaacucccugacgcugccgagcgaggucaaccucugcaacguggacaucuucaaccccaaguacgacugcaagaucaugaccuccaagaccgacgugagcuccagcgucaucaccucccugggggccaucgugagcugcuacggcaagacgaagugcaccgcgagcaacaagaaccgcgggaucaucaagaccuucuccaacggcugcgacuacgugagcaacaagggcgucgacaccguguccguggggaacacccuguacuacgucaacaagcaggagggcaagagccucuacgugaagggggagcccaucaucaacuucuacgacccccugguguucccguccgacgaguucgacgccagcaucucccaggucaacgagaagaucaaccagagccuggccuucauccggaaguccgacgagcuccugcacaacgugaacgccggcaagagcacgaccaacaucaugaucaccaccaucaucaucgugaucaucgucauccugcugucccucaucgccguggggcugcugcucuacugcaaggcgcgcagcacgcccgugacccuguccaaggaccagcugagcggcaucaacaacaucgccuucuccaacugaggacuaguguccaccugucccuccugggcugcuggauugucucguuuuccugccaaauaaacaggaucagcgcuuuacagaucuaaaaaaaaaaaaaaaaaaaaaaaaaaaaaaaaaaaaaaaaaaaaaaaaaaaaaaaaaaaaaaaaugcaucccccccccccccccccccccccccccccccaaaggcucuuuucagagccaccagaauu

SEQ ID NO: 270 - RNA, 2036 nt, Artificial Sequence
  mRNA product Design e-2 comprising derived and/or modified sequence from HRSV(A2)__F0 (opt2)
gggagacccgugacccggaaguuguacggcuacgcgacuuucccucccacaaacccucgcgcccuuccuuuccuacuugggcccggcagaaagcuuaccauggagcuccucauccucaaggccaacgccaucaccaccauccucaccgccgucaccuucugcuucgccuccggccagaacaucaccgaggaguucuaccaguccaccugcuccgccgucuccaagggcuaccucuccgcccuccgcaccggcugguacaccuccgucaucaccaucgagcucuccaacaucaaggagaacaagugcaacggcaccgacgccaaggucaagcucaucaagcaggagcucgacaaguacaagaacgccgucaccgagcuccagcuccucaugcaguccacccccgccaccaacaaccgcgcccgccgcgagcucccccgcuucaugaacuacacccucaacaacgccaagaagaccaacgucacccucuccaagaagcgcaagcgccgcuuccucggcuuccuccucggcgucggcuccgccaucgccuccggcgucgccgucuccaagguccuccaccucgagggcgaggucaacaagaucaaguccgcccuccucuccaccaacaaggccgucgucucccucuccaacggcgucuccguccucaccuccaagguccucgaccucaagaacuacaucgacaagcagcuccuccccaucgucaacaagcaguccugcuccaucuccaacaucgagaccgucaucgaguuccagcagaagaacaaccgccuccucgagaucacccgcgaguucuccgucaacgccggcgucaccacccccgucuccaccuacaugcucaccaacuccgagcuccucucccucaucaacgacaugcccaucaccaacgaccagaagaagcucauguccaacaacguccagaucguccgccagcaguccuacuccaucauguccaucaucaaggaggagguccucgccuacgucguccagcucccccucuacggcgucaucgacacccccugcuggaagcuccacaccuccccccucugcaccaccaacaccaaggagggcuccaacaucugccucacccgcaccgaccgcggcugguacugcgacaacgccggcuccgucuccuucuucccccaggccgagaccugcaagguccaguccaaccgcgucuucugcgacaccaugaacucccucacccuccccuccgaggucaaccucugcaacgucgacaucuucaaccccaaguacgacugcaagaucaugaccuccaagaccgacgucuccuccuccgucaucaccucccucggcgccaucgucuccugcuacggcaagaccaagugcaccgccuccaacaagaaccgcggcaucaucaagaccuucuccaacggcugcgacuacgucuccaacaagggcgucgacaccgucuccgucggcaacacccucuacuacgucaacaagcaggagggcaagucccucuacgucaagggcgagcccaucaucaacuucuacgacccccucgucuuccccuccgacgaguucgacgccuccaucucccaggucaacgagaagaucaaccagucccucgccuucauccgcaaguccgacgagcuccuccacaacgucaacgccggcaaguccaccaccaacaucaugaucaccaccaucaucaucgucaucaucgucauccuccucucccucaucgccgucggccuccuccucuacugcaaggcccgcuccacccccgucacccucuccaaggaccagcucuccggcaucaacaacaucgccuucuccaacugaggacuaguguccaccugucccuccugggcugcuggauugucucguuuuccugccaaauaaacaggaucagcgcuuuacagaucuaaaaaaaaaaaaaaaaaaaaaaaaaaaaaaaaaaaaaaaaaaaaaaaaaaaaaaaaaaaaaaaaugcaucccccccccccccccccccccccccccccccaaaggcucuuuucagagccaccagaauu

SEQ ID NO: 271 - RNA, 2036 nt, Artificial Sequence
  mRNA product Design e-2 comprising derived and/or modified sequence from HRSV(A2)__F0 (opt3)
gggagacccgugacccggaaguuguacggcuacgcgacuuucccucccacaaacccucgcgcccuuccuuuccuacuugggcccggcagaaagcuuaccauggagcugcucauccuuaaggccaacgcuauuaccacaauacugacugcagugacguucugcuuugccagcggccagaauaucaccgaagaguucuaccaauccacauguucugcggucucaaaaggguauuugagugcuuuaagaacuggaugguacaccagcguuauuacaaucgaacuguccaacauuaaggagaauaaaugcaacgguaccgacgccaaggugaaacuaaucaagcaggaacucgauaaguauaaaaaugcaguaacugagcugcagcuucugaugcagucuacacccgccaccaacaauagggcucggcgcgaguugccucgauuuaugaacuacacgcucaauaacgcaaagaaaacuaaugugacccugucgaagaaacguaagagaagguuccugggcuuucucuuaggggucggaucagccauagcuagcggcguggccguuaguaaggugcugcaccuugaaggugaggucaacaaaaucaaguccgcguugcugucuacaaauaaagcagugguaagccuauccaacgggguuucagugcucacuucuaagguccuggaccuuaaaaauuauauugauaagcaacuguugccaaucgugaacaaacagagcuguucuauuuccaacaucgaaaccgugauagaguuccagcagaagaauaaccggcuccuggagauuacacgcgaauuuucagucaaugccggaguuaccacgccggugagcacuuacauguuaacaaacagugagcugcucucucuuaucaaugacaugcccauuaccaacgaucaaaagaaacugauguccaauaacguacagaucgugagacagcagagcuauucgaucaugucuauuauaaaggaagaggucuuggcuuacgugguucaacuaccucuguacggcgugaucgacacuccaugcuggaaacuccauacauccccacuguguaccacgaauaccaaggaaggcucaaacauuugccuuacaaggacugaucgggggugguauugugacaaugccggaagugucagcuucuuuccucaggcagagaccugcaaagugcaguccaaccgcguauucugugauacaaugaauagucugacuuugccaagcgagguuaaccucugcaauguggacaucuuuaaccccaaguacgauuguaagauaaugaccucaaaaacagacgucaguuccagcgugauuaccucucugggugcuaucgucucaugcuauggcaagacuaaaugcacggccaguaacaagaaucgagggaucauuaaaacauucagcaacggaugugauuacguguccaauaagggcguugacaccgugucuguagguaacacuuuauauuacgucaauaagcaagaagggaaaucgcuguaugugaagggagagccuaucauuaacuuuuacgacccccuaguuuucccgagcgaugaauuugacgcguccauaucacaggugaaugagaaaaucaaccagagucucgccuucauuagaaagucugaugaacugcuucacaaugucaacgcaggcaaaagcaccacaaauaucaugaucaccacuauuauaaucgugauuaucguaauuuugcugucccucaucgcugugggccugcuucuguacugcaaggccaggucaacacccguuacguugagcaaggaccagcucucugggauaaacaauaucgcuuucuccaacugaggacuaguguccaccugucccuccugggcugcuggauugucucguuuuccugccaaauaaacaggaucagcgcuuuacagaucuaaaaaaaaaaaaaaaaaaaaaaaaaaaaaaaaaaaaaaaaaaaaaaaaaaaaaaaaaaaaaaaaugcaucccccccccccccccccccccccccccccccaaaggcucuuuucagagccaccagaauu

SEQ ID NO: 272 - RNA, 2036 nt, Artificial Sequence
  mRNA product Design e-2 comprising derived and/or modified sequence from HRSV(A2)__F0 (opt4)
gggagacccgugacccggaaguuguacggcuacgcgacuuucccucccacaaacccucgcgcccuuccuuuccuacuugggcccggcagaaagcuuaccauggagcugcugauccugaaggccaacgccaucaccaccauccugaccgccgugaccuucugcuucgccagcggccagaacaucaccgaggaguucuaccagagcaccugcagcgccgugagcaagggcuaccugagcgcccugagaaccggcugguacaccagcgugaucaccaucgagcugagcaacaucaaggagaacaagugcaacggcaccgacgccaaggugaagcugaucaagcaggagcuggacaaguacaagaacgccgugaccgagcugcagcugcugaugcagagcacccccgccaccaacaacagagccagaagagagcugcccagauucaugaacuacacccugaacaacgccaagaagaccaacgugacccugagcaagaagagaaagagaagauuccugggcuuccugcugggcgugggcagcgccaucgccagcggcguggccgugagcaaggugcugcaccuggagggcgaggugaacaagaucaagagcgcccugcugagcaccaacaaggccguggugagccugagcaacggcgugagcgugcugaccagcaaggugcuggaccugaagaacuacaucgacaagcagcugcugcccaucgugaacaagcagagcugcagcaucagcaacaucgagaccgugaucgaguuccagcagaagaacaacagacugcuggagaucaccagagaguucagcgugaacgccggcgugaccacccccgugagcaccuacaugcugaccaacagcgagcugcugagccugaucaacgacaugcccaucaccaacgaccagaagaagcugaugagcaacaacgugcagaucgugagacagcagagcuacagcaucaugagcaucaucaaggaggaggugcuggccuacguggugcagcugccccuguacggcgugaucgacacccccugcuggaagcugcacaccagcccccugugcaccaccaacaccaaggagggcagcaacaucugccugaccagaaccgacagaggcugguacugcgacaacgccggcagcgugagcuucuucccccaggccgagaccugcaaggugcagagcaacagaguguucugcgacaccaugaacagccugacccugcccagcgaggugaaccugugcaacguggacaucuucaaccccaaguacgacugcaagaucaugaccagcaagaccgacgugagcagcagcgugaucaccagccugggcgccaucgugagcugcuacggcaagaccaagugcaccgccagcaacaagaacagaggcaucaucaagaccuucagcaacggcugcgacuacgugagcaacaagggcguggacaccgugagcgugggcaacacccuguacuacgugaacaagcaggagggcaagagccuguacgugaagggcgagcccaucaucaacuucuacgacccccugguguuccccagcgacgaguucgacgccagcaucagccaggugaacgagaagaucaaccagagccuggccuucaucagaaagagcgacgagcugcugcacaacgugaacgccggcaagagcaccaccaacaucaugaucaccaccaucaucaucgugaucaucgugauccugcugagccugaucgccgugggccugcugcuguacugcaaggccagaagcacccccgugacccugagcaaggaccagcugagcggcaucaacaacaucgccuucagcaacugaggacuaguguccaccugucccuccugggcugcuggauugucucguuuuccugccaaauaaacaggaucagcgcuuuacagaucuaaaaaaaaaaaaaaaaaaaaaaaaaaaaaaaaaaaaaaaaaaaaaaaaaaaaaaaaaaaaaaaaugcaucccccccccccccccccccccccccccccccaaaggcucuuuucagagccaccagaauu

SEQ ID NO: 273 - RNA, 2036 nt, Artificial Sequence
  mRNA product Design e-2 comprising derived and/or modified sequence from HRSV(A2)__F0 (opt5)
gggagacccgugacccggaaguuguacggcuacgcgacuuucccucccacaaacccucgcgcccuuccuuuccuacuugggcccggcagaaagcuuaccauggagcugcucauccugaaggccaacgcuauuaccacaauccuuacggccgugaccuucugcuuugcgagcggccagaauauuacagaagaguucuaccaauccaccuguucugcugucagcaaaggguaucuguccgcccucagaacaggaugguacaccucuguuaucacaauugaacugagcaacaucaaggagaauaaaugcaacggcaccgacgccaaggugaaacuuaucaagcaggaacuggauaaguauaaaaaugcugugacggagcuccagcugcugaugcaguccacccccgccacaaacaaucgggcucgcagagagcucccucgguuuaugaacuacacccugaauaacgccaagaaaacaaaugucacccuuucuaagaaacgcaagagacgguuccugggguuucuccugggagugggcagcgcgauugccuccgggguugcugugagcaagguccuucaccuggaaggagaggugaacaaaaucaagucugcccuccuguccacgaauaaagcuguugugagccugucuaacggcgucuccgugcucacaagcaaggugcuggaccuuaaaaauuauauugauaagcaacugcucccgaucgucaacaaacagucuuguuccauuagcaacaucgaaaccguuauugaguuccagcagaagaauaaccgccugcuugagaucacaagagaauuuuccgugaaugccggcgugaccacccccgucucuacauacaugcugacgaacagcgagcuccugucccugaucaaugacaugccuauuaccaacgaucaaaagaaacucaugagcaauaacgugcagaucguucggcagcagucuuauuccauuaugagcaucauuaaggaagaggugcuggcguacgucgugcaacuuccccuguacgggguuaucgacacaccuugcuggaaacuccauaccucuccccuguguacaaccaauacgaaggaaggaagcaacaucugccuuacacgcaccgauagaggcugguauugugacaaugccggguccgugucuuucuuuccucaggcugagaccugcaaaguccagagcaaccggguguucugugauacaaugaacucccugacccucccgagcgaggucaaucugugcaauguggacauuuuuaaccccaaguacgauuguaagaucaugacaucuaaaacggacguuuccagcucugugauuaccucccugggagccaucgucagcugcuauggcaagacaaaaugcaccgcuuccaacaagaaucgcgggauuaucaaaacauucucuaacggaugugauuacgugagcaauaagggcguugacaccguguccgucggcaacacgcucuauuacgugaauaagcaagaagggaaaucucuguaugugaagggagagccuaucauuaacuuuuacgacccccuuguuuucccuagcgaugaauuugacgccuccaucagccaggucaaugagaaaauuaaccagucucuggccuucaucagaaaguccgaugaacuccugcacaaugugaacgcuggcaaaagcaccacaaauauuaugaucaccacaauuaucaucgugauuaucgucauucugcuuucucucaucgcgguggggcugcugcucuacugcaaggcccgguccacccccguuacgcugagcaaggaccagcuuucuggaauuaacaauaucgcuuucagcaacugaggacuaguguccaccugucccuccugggcugcuggauugucucguuuuccugccaaauaaacaggaucagcgcuuuacagaucuaaaaaaaaaaaaaaaaaaaaaaaaaaaaaaaaaaaaaaaaaaaaaaaaaaaaaaaaaaaaaaaaugcaucccccccccccccccccccccccccccccccaaaggcucuuuucagagccaccagaauu

SEQ ID NO: 274 - RNA, 2036 nt, Artificial Sequence
  mRNA product Design e-2 comprising derived and/or modified sequence from HRSV(A2)__F0 (opt6)
gggagacccgugacccggaaguuguacggcuacgcgacuuucccucccacaaacccucgcgcccuuccuuuccuacuugggcccggcagaaagcuuaccauggaacuucuaauauuaaaagcuaacgcaaucacuacuaucuuaaccgcaguaacauucuguuuugcauccggccaaaacauaacagaagaauuuuaccaaucaacuugcucugcagucucaaaagguuaucuaucugcauuaagaacaggcugguacaccucaguaauaacgaucgaacuaucaaacaucaaagaaaacaaauguaauggaacagacgcaaaaguaaaacuaaucaaacaagaacuagacaaauacaaaaacgcaguaaccgaacuccaacuccucaugcaaaguacaccagcaacaaauaacagagcaagacgugaacuaccacguuuuaugaauuacacgcucaauaacgcaaaaaaaacaaauguuacccuaucaaaaaaacgaaaaagaagauuccucggauuccuacuaggcguaggcucagcaauagcuucaggaguagcaguaucaaaaguacuccaccucgaaggagaaguaaacaaaaucaaaagcgcucuccucucaacaaacaaagcaguuguuucacucucaaacggaguaucaguacuaaccucaaaaguacuugaccuaaaaaauuauauagacaaacaacuauuaccaauaguaaacaaacaaagcugcuccaucuccaacaucgagacagucauagaauuucaacaaaaaaauaaccgccuauuagaaauaaccagagaauuuucaguaaacgcaggaguaacuaccccaguaucaacauauauguuaacaaacucagaacuccuaagucuaaucaacgacaugccaauaaccaacgaccaaaaaaaacuaaugagcaacaauguacaaauaguucgucaacaaucuuacuccauaaugucuauaauaaaagaagaaguacucgccuauguaguccaacuaccacuauacggagucaucgauacaccaugcuggaaacuccacacauccccacucuguacuacuaacaccaaagaagguucaaauauaugccuaaccagaacagauagagguugguacugcgauaaugcaggaucaguauccuuuuucccccaagccgaaacaugcaaaguucaauccaauagaguauuuugugauacaaugaacucuuuaacccucccauccgaagucaaucuauguaacgucgacauauuuaacccaaaauacgauugcaaaauaaugacaucaaaaacagacgucucauccucaguuauaacguccuuaggcgcuauaguaucaugcuacggcaaaacaaaauguacagcaucaaacaaaaacagaggaaucauaaaaacuuucucuaacgguugcgacuauguauccaacaaaggugucgacacaguauccguaggcaacacccuuuacuauguuaauaaacaagaaggaaaaucucuauauguaaaaggcgaaccaauuauaaauuuuuacgacccccuugucuuucccucugacgaauuugacgcuuccauaucacaagucaacgaaaaaaucaaccaaucccucgcauucauacgcaaaucagacgaacuacuacauaacgucaacgcaggcaaauccacaacaaacauaaugauaaccacaaucauaauuguaauaauaguaauacuacuuucucuaauagcagucggauuacucuuauacuguaaagcucgaucaacaccagucacccucucuaaagaucaacuauccggaaucaacaacauagcuuucucaaacuaaggacuaguguccaccugucccuccugggcugcuggauugucucguuuuccugccaaauaaacaggaucagcgcuuuacagaucuaaaaaaaaaaaaaaaaaaaaaaaaaaaaaaaaaaaaaaaaaaaaaaaaaaaaaaaaaaaaaaaaugcaucccccccccccccccccccccccccccccccaaaggcucuuuucagagccaccagaauu

SEQ ID NO: 275 - RNA, 2036 nt, Artificial Sequence
  mRNA product Design e-2 comprising derived and/or modified sequence from HRSV(A2)__F0 (opt11)
gggagacccgugacccggaaguuguacggcuacgcgacuuucccucccacaaacccucgcgcccuuccuuuccuacuugggcccggcagaaagcuuaccauggaacuccucauacucaaagccaacgcaaucacaaccauacucaccgccgucaccuucugcuuugcaucuggccagaacaucacugaagaguucuaccaauccacaugcuccgccguaagcaaaggcuaccuauccgcccuacgcaccggcugguacaccagcguaaucaccauagaacucuccaauauaaaagaaaacaaaugcaacggcaccgacgcaaaagucaagcuaauaaaacaagaacucgacaaauacaaaaacgccguuaccgaacuccagcuacucaugcaaucgaccccagcaaccaacaaccgugcgagacgcgaacucccccgcuucaugaacuacacccuaaacaacgccaaaaagaccaacguaacucuauccaagaaacgcaaacgccgcuuccucggauuccuccucggcgucggcuccgcaaucgccagcggcgucgccguuagcaaaguccuucaccucgaaggagaaguaaacaaaauuaaaagcgcccucuuauccacaaacaaggccguaguaucccugucaaacggcgucuccguccuuacauccaaaguccucgaccucaagaacuacauagacaaacagcuacuacccauuguaaauaaacaaagcugcucaauuagcaacaucgaaaccguaaucgaguuccagcagaaaaacaacagacuucucgaaaucacccgcgaguucagcgucaacgccggcguaaccaccccugucucaacauacaugcuaaccaacagcgaacugcucucccucaucaacgacaugcccaucaccaacgaccaaaagaaacucaugagcaacaacguacaaaucgugcgccaacaguccuacucaauaaugucaaucaucaaagaagaagugcuagcauacgucguacaacuaccacucuacggcguaauagauacccccugcuggaagcuccauaccuccccacucuguaccaccaacaccaaagaaggcucaaacaucugccuaacgcgcacagaccguggaugguacugugacaacgccggcuccgucuccuucuucccucaagccgaaacaugcaaaguccaauccaacagagucuucugcgauaccaugaacucccugacacucccaagcgaagucaaccuuugcaacgucgauaucuuuaaccccaaauacgacugcaagaucaugacaucaaaaaccgacguauccuccucuguaauaaccucccuaggcgcaaucguaucaugcuacggcaaaaccaaauguaccgccuccaacaaaaaucgcggcaucaucaaaaccuucucgaacggcugcgacuacgucuccaacaaaggcguagacacaguuuccguaggcaacacccucuacuacgucaauaaacaggaaggcaagucccucuacgucaaaggcgaacccaucaucaauuucuacgacccccucguuuuccccuccgaugaguucgacgcaagcaucagccaggucaacgaaaagauaaaccagucccucgccuucauccgcaaaucagaugaacuccuucacaacguuaacgcaggcaagagcaccaccaacaucaugaucacaacuauaaucaucgucauaaucgucauccuacucucacuaaucgccgucggucuccuacuauauuguaaagcccgaucaacaccggucacacucuccaaagaccaacucuccggaaucaacaauaucgcuuucucgaacuaaggacuaguguccaccugucccuccugggcugcuggauugucucguuuuccugccaaauaaacaggaucagcgcuuuacagaucuaaaaaaaaaaaaaaaaaaaaaaaaaaaaaaaaaaaaaaaaaaaaaaaaaaaaaaaaaaaaaaaaugcaucccccccccccccccccccccccccccccccaaaggcucuuuucagagccaccagaauu

SEQ ID NO: 276 - RNA, 2006 nt, Artificial Sequence
  mRNA product Design e-3 comprising derived and/or modified sequence from HRSV(A2)__F0 (artificial)
gggagacuuucccauucuguagcagaauuugguguugccuguggucuuggucccgcggagaagcuuaccauggaguugcuaauccucaaagcaaaugcaauuaccacaauccucacugcagucacauuuuguuuugcuucuggucaaaacaucacugaagaauuuuaucaaucaacaugcagugcaguuagcaaaggcuaucuuagugcucugagaacugguugguauaccaguguuauaacuauagaauuaaguaauaucaaggaaaauaaguguaauggaacagaugcuaagguaaaauugauaaaacaagaauuagauaaauauaaaaaugcuguaacagaauugcaguugcucaugcaaagcacaccagcaacaaacaaucgagccagaagagaacuaccaagguuuaugaauuauacacucaacaaugccaaaaaaaccaauguaacauuaagcaagaaaaggaaaagaagauuucuugguuuuuuguuagguguuggaucugcaaucgccaguggcguugcuguaucuaagguccugcaccuagaaggggaagugaacaagaucaaaagugcucuacuauccacaaacaaggcuguagucagcuuaucaaauggaguuagugucuuaaccagcaaaguguuagaccucaaaaacuauauagauaaacaauuguuaccuauugugaacaagcaaagcugcagcauaucaaauauagaaacugugauagaguuccaacaaaagaacaacagacuacuagagauuaccagggaauuuaguguuaaugcagguguaacuacaccuguaagcacuuacauguuaacuaauagugaauuauugucauuaaucaaugauaugccuauaacaaaugaucagaaaaaguuaauguccaacaauguucaaauaguuagacagcaaaguuacucuaucauguccauaauaaaagaggaagucuuagcauauguaguacaauuaccacuauaugguguuauagauacacccuguuggaaacuacacacauccccucuauguacaaccaacacaaaagaaggguccaacaucuguuuaacaagaacugacagaggaugguacugugacaaugcaggaucaguaucuuucuucccacaagcugaaacauguaaaguucaaucaaaucgaguauuuugugacacaaugaacaguuuaacauuaccaagugaaguaaaucucugcaauguugacauauucaaccccaaauaugauuguaaaauuaugacuucaaaaacagauguaagcagcuccguuaucacaucucuaggagccauugugucaugcuauggcaaaacuaaauguacagcauccaauaaaaaucguggaaucauaaagacauuuucuaacgggugcgauuauguaucaaauaaagggguggacacugugucuguagguaacacauuauauuauguaaauaagcaagaagguaaaagucucuauguaaaaggugaaccaauaauaaauuucuaugacccauuaguauuccccucugaugaauuugaugcaucaauaucucaagucaacgagaagauuaaccagagccuagcauuuauucguaaauccgaugaauuauuacauaauguaaaugcugguaaauccaccacaaauaucaugauaacuacuauaauuauagugauuauaguaauauuguuaucauuaauugcuguuggacugcucuuauacuguaaggccagaagcacaccagucacacuaagcaaagaucaacugagugguauaaauaauauugcauuuaguaacuaaggacuaguguccaccugucccuccugggcugcuggauugucucguuuuccugccaaauaaacaggaucagcgcuuuacagaucuaaaaaaaaaaaaaaaaaaaaaaaaaaaaaaaaaaaaaaaaaaaaaaaaaaaaaaaaaaaaaaaaugcaucccccccccccccccccccccccccccccccaaaggcucuuuucagagccaccagaauu

SEQ ID NO: 277 - RNA, 2006 nt, Artificial Sequence
  mRNA product Design e-3 comprising derived and/or modified sequence from HRSV(A2)__F0 (opt1)
gggagacuuucccauucuguagcagaauuugguguugccuguggucuuggucccgcggagaagcuuaccauggagcugcucauccugaaggccaacgccaucaccaccauccugacggcggugaccuucugcuucgccagcggccagaacaucaccgaggaguucuaccaguccaccugcagcgccgucuccaagggguaccucagcgcccugcggacgggcugguacaccuccgugaucaccaucgagcugagcaacaucaaggagaacaagugcaacgggaccgacgccaaggugaagcucaucaagcaggagcuggacaaguacaagaacgcggucacggagcugcagcuccugaugcaguccaccccggcaaccaacaaccgcgcccggcgcgagcugccccgguucaugaacuacacccucaacaacgccaagaagacgaacgugacccugagcaagaagcgcaagcggcgcuuccugggcuuccuccugggggugggcuccgccaucgcgagcggcgucgccguguccaaggugcugcaccucgagggggaggucaacaagaucaagagcgcccugcuguccaccaacaaggccguggugagccucuccaacggcgucagcgugcugaccuccaaggugcuggaccucaagaacuacaucgacaagcagcugcugcccaucgucaacaagcagagcugcuccaucagcaacaucgagacggugaucgaguuccagcagaagaacaaccggcuccuggagaucacccgcgaguucagcgugaacgccggggucaccacccccguguccacguacaugcugaccaacagcgagcuccugucccugaucaacgacaugccgaucaccaacgaccagaagaagcucaugagcaacaacgugcagaucguccggcagcaguccuacagcaucauguccaucaucaaggaggaggugcuggcguacgugguccagcugccccucuacggcgugaucgacacccccugcuggaagcugcacacgagcccccugugcaccaccaacaccaaggagggguccaacaucugccucacgcgcaccgaccggggcugguacugcgacaacgccggcagcgucuccuucuucccgcaggccgagaccugcaaggugcagagcaaccgcguguucugcgacaccaugaacucccugacgcugcccagcgagguaaaccucugcaacgucgacaucuucaaccccaaguacgacugcaagaucaugaccuccaagaccgacgugagcuccagcgugaucaccucccugggggccaucgucagcugcuacggcaagacgaagugcaccgccagcaacaagaaccgggggaucaucaagaccuucuccaacggcugcgacuacgugagcaacaagggcguggacaccguguccgucgggaacacccuguacuacgugaacaagcaggagggcaagagccucuacgugaagggggagcccaucaucaacuucuacgacccgcuggucuuccccuccgacgaguucgacgcgagcaucucccaggugaacgagaagaucaaccagagccuggccuucauccgcaaguccgacgagcugcuccacaacgugaacgccggcaagagcacgaccaacaucaugaucaccaccaucaucaucgucaucaucgugauccugcugucccucaucgccguggggcugcugcucuacugcaaggcccggagcacgcccgucacccuguccaaggaccagcugagcggcaucaacaacaucgcguucuccaacugaggacuaguguccaccugucccuccugggcugcuggauugucucguuuuccugccaaauaaacaggaucagcgcuuuacagaucuaaaaaaaaaaaaaaaaaaaaaaaaaaaaaaaaaaaaaaaaaaaaaaaaaaaaaaaaaaaaaaaaugcaucccccccccccccccccccccccccccccccaaaggcucuuuucagagccaccagaauu

SEQ ID NO: 278 - RNA, 2006 nt, Artificial Sequence
  mRNA product Design e-3 comprising derived and/or modified sequence from HRSV(A2)__F0 (opt1)
gggagacuuucccauucuguagcagaauuugguguugccuguggucuuggucccgcggagaagcuuaccauggagcugcucauccugaaggccaacgccaucaccaccauccugacggcggugaccuucugcuucgccagcggccagaacaucaccgaggaguucuaccaguccacgugcagcgccgucuccaagggguaccucagcgcccugcgcaccggcugguacaccuccgugaucaccaucgagcugagcaacaucaaggagaacaagugcaacgggaccgacgccaaggugaagcucaucaagcaggagcuggacaaguacaagaacgcggucacggagcugcagcuccugaugcaguccacccccgccaccaacaaccgggcccgccgggagcugccgcgcuucaugaacuacacccucaacaacgccaagaagacgaacgugacccugagcaagaagcggaagcgccgguuccugggcuuccuccugggggugggcuccgcgaucgccagcggcgucgccguguccaaggugcugcaccucgagggggaggucaacaagaucaagagcgcccugcuguccaccaacaaggccguggugagccucuccaacggcgucagcgugcugaccuccaaggugcuggaccucaagaacuacaucgacaagcagcugcugcccaucgucaacaagcagagcugcuccaucagcaacaucgagacggugaucgaguuccagcagaagaacaaccgccuccuggagaucacccgggaguucagcgugaacgcgggggucaccacccccguguccacguacaugcugaccaacagcgagcuccugucccugaucaacgacaugcccaucaccaacgaccagaagaagcucaugagcaacaacgugcagaucguccgccagcaguccuacagcaucauguccaucaucaaggaggaggugcuggccuacgugguccagcugccgcucuacggcgugaucgacacccccugcuggaagcugcacacgagcccccugugcaccaccaacaccaaggagggguccaacaucugccucacgcggaccgaccgcggcugguacugcgacaacgccggcagcgucuccuucuucccccaggccgagaccugcaaggugcagagcaaccggguguucugcgacaccaugaacucccugacgcugccgagcgaggucaaccucugcaacguggacaucuucaaccccaaguacgacugcaagaucaugaccuccaagaccgacgugagcuccagcgucaucaccucccugggggccaucgugagcugcuacggcaagacgaagugcaccgcgagcaacaagaaccgcgggaucaucaagaccuucuccaacggcugcgacuacgugagcaacaagggcgucgacaccguguccguggggaacacccuguacuacgucaacaagcaggagggcaagagccucuacgugaagggggagcccaucaucaacuucuacgacccccugguguucccguccgacgaguucgacgccagcaucucccaggucaacgagaagaucaaccagagccuggccuucauccggaaguccgacgagcuccugcacaacgugaacgccggcaagagcacgaccaacaucaugaucaccaccaucaucaucgugaucaucgucauccugcugucccucaucgccguggggcugcugcucuacugcaaggcgcgcagcacgcccgugacccuguccaaggaccagcugagcggcaucaacaacaucgccuucuccaacugaggacuaguguccaccugucccuccugggcugcuggauugucucguuuuccugccaaauaaacaggaucagcgcuuuacagaucuaaaaaaaaaaaaaaaaaaaaaaaaaaaaaaaaaaaaaaaaaaaaaaaaaaaaaaaaaaaaaaaaugcaucccccccccccccccccccccccccccccccaaaggcucuuuucagagccaccagaauu

SEQ ID NO: 279 - RNA, 2006 nt, Artificial Sequence
  mRNA product Design e-3 comprising derived and/or modified sequence from HRSV(A2)__F0 (opt2)
gggagacuuucccauucuguagcagaauuugguguugccuguggucuuggucccgcggagaagcuuaccauggagcuccucauccucaaggccaacgccaucaccaccauccucaccgccgucaccuucugcuucgccuccggccagaacaucaccgaggaguucuaccaguccaccugcuccgccgucuccaagggcuaccucuccgcccuccgcaccggcugguacaccuccgucaucaccaucgagcucuccaacaucaaggagaacaagugcaacggcaccgacgccaaggucaagcucaucaagcaggagcucgacaaguacaagaacgccgucaccgagcuccagcuccucaugcaguccacccccgccaccaacaaccgcgcccgccgcgagcucccccgcuucaugaacuacacccucaacaacgccaagaagaccaacgucacccucuccaagaagcgcaagcgccgcuuccucggcuuccuccucggcgucggcuccgccaucgccuccggcgucgccgucuccaagguccuccaccucgagggcgaggucaacaagaucaaguccgcccuccucuccaccaacaaggccgucgucucccucuccaacggcgucuccguccucaccuccaagguccucgaccucaagaacuacaucgacaagcagcuccuccccaucgucaacaagcaguccugcuccaucuccaacaucgagaccgucaucgaguuccagcagaagaacaaccgccuccucgagaucacccgcgaguucuccgucaacgccggcgucaccacccccgucuccaccuacaugcucaccaacuccgagcuccucucccucaucaacgacaugcccaucaccaacgaccagaagaagcucauguccaacaacguccagaucguccgccagcaguccuacuccaucauguccaucaucaaggaggagguccucgccuacgucguccagcucccccucuacggcgucaucgacacccccugcuggaagcuccacaccuccccccucugcaccaccaacaccaaggagggcuccaacaucugccucacccgcaccgaccgcggcugguacugcgacaacgccggcuccgucuccuucuucccccaggccgagaccugcaagguccaguccaaccgcgucuucugcgacaccaugaacucccucacccuccccuccgaggucaaccucugcaacgucgacaucuucaaccccaaguacgacugcaagaucaugaccuccaagaccgacgucuccuccuccgucaucaccucccucggcgccaucgucuccugcuacggcaagaccaagugcaccgccuccaacaagaaccgcggcaucaucaagaccuucuccaacggcugcgacuacgucuccaacaagggcgucgacaccgucuccgucggcaacacccucuacuacgucaacaagcaggagggcaagucccucuacgucaagggcgagcccaucaucaacuucuacgacccccucgucuuccccuccgacgaguucgacgccuccaucucccaggucaacgagaagaucaaccagucccucgccuucauccgcaaguccgacgagcuccuccacaacgucaacgccggcaaguccaccaccaacaucaugaucaccaccaucaucaucgucaucaucgucauccuccucucccucaucgccgucggccuccuccucuacugcaaggcccgcuccacccccgucacccucuccaaggaccagcucuccggcaucaacaacaucgccuucuccaacugaggacuaguguccaccugucccuccugggcugcuggauugucucguuuuccugccaaauaaacaggaucagcgcuuuacagaucuaaaaaaaaaaaaaaaaaaaaaaaaaaaaaaaaaaaaaaaaaaaaaaaaaaaaaaaaaaaaaaaaugcaucccccccccccccccccccccccccccccccaaaggcucuuuucagagccaccagaauu

SEQ ID NO: 280 - RNA, 2006 nt, Artificial Sequence
  mRNA product Design e-3 comprising derived and/or modified sequence from HRSV(A2)__F0 (opt3)
gggagacuuucccauucuguagcagaauuugguguugccuguggucuuggucccgcggagaagcuuaccauggagcugcucauccuuaaggccaacgcuauuaccacaauacugacugcagugacguucugcuuugccagcggccagaauaucaccgaagaguucuaccaauccacauguucugcggucucaaaaggguauuugagugcuuuaagaacuggaugguacaccagcguuauuacaaucgaacuguccaacauuaaggagaauaaaugcaacgguaccgacgccaaggugaaacuaaucaagcaggaacucgauaaguauaaaaaugcaguaacugagcugcagcuucugaugcagucuacacccgccaccaacaauagggcucggcgcgaguugccucgauuuaugaacuacacgcucaauaacgcaaagaaaacuaaugugacccugucgaagaaacguaagagaagguuccugggcuuucucuuaggggucggaucagccauagcuagcggcguggccguuaguaaggugcugcaccuugaaggugaggucaacaaaaucaaguccgcguugcugucuacaaauaaagcagugguaagccuauccaacgggguuucagugcucacuucuaagguccuggaccuuaaaaauuauauugauaagcaacuguugccaaucgugaacaaacagagcuguucuauuuccaacaucgaaaccgugauagaguuccagcagaagaauaaccggcuccuggagauuacacgcgaauuuucagucaaugccggaguuaccacgccggugagcacuuacauguuaacaaacagugagcugcucucucuuaucaaugacaugcccauuaccaacgaucaaaagaaacugauguccaauaacguacagaucgugagacagcagagcuauucgaucaugucuauuauaaaggaagaggucuuggcuuacgugguucaacuaccucuguacggcgugaucgacacuccaugcuggaaacuccauacauccccacuguguaccacgaauaccaaggaaggcucaaacauuugccuuacaaggacugaucgggggugguauugugacaaugccggaagugucagcuucuuuccucaggcagagaccugcaaagugcaguccaaccgcguauucugugauacaaugaauagucugacuuugccaagcgagguuaaccucugcaauguggacaucuuuaaccccaaguacgauuguaagauaaugaccucaaaaacagacgucaguuccagcgugauuaccucucugggugcuaucgucucaugcuauggcaagacuaaaugcacggccaguaacaagaaucgagggaucauuaaaacauucagcaacggaugugauuacguguccaauaagggcguugacaccgugucuguagguaacacuuuauauuacgucaauaagcaagaagggaaaucgcuguaugugaagggagagccuaucauuaacuuuuacgacccccuaguuuucccgagcgaugaauuugacgcguccauaucacaggugaaugagaaaaucaaccagagucucgccuucauuagaaagucugaugaacugcuucacaaugucaacgcaggcaaaagcaccacaaauaucaugaucaccacuauuauaaucgugauuaucguaauuuugcugucccucaucgcugugggccugcuucuguacugcaaggccaggucaacacccguuacguugagcaaggaccagcucucugggauaaacaauaucgcuuucuccaacugaggacuaguguccaccugucccuccugggcugcuggauugucucguuuuccugccaaauaaacaggaucagcgcuuuacagaucuaaaaaaaaaaaaaaaaaaaaaaaaaaaaaaaaaaaaaaaaaaaaaaaaaaaaaaaaaaaaaaaaugcaucccccccccccccccccccccccccccccccaaaggcucuuuucagagccaccagaauu

SEQ ID NO: 281 - RNA, 2006 nt, Artificial Sequence
  mRNA product Design e-3 comprising derived and/or modified sequence from HRSV(A2)__F0 (opt4)
gggagacuuucccauucuguagcagaauuugguguugccuguggucuuggucccgcggagaagcuuaccauggagcugcugauccugaaggccaacgccaucaccaccauccugaccgccgugaccuucugcuucgccagcggccagaacaucaccgaggaguucuaccagagcaccugcagcgccgugagcaagggcuaccugagcgcccugagaaccggcugguacaccagcgugaucaccaucgagcugagcaacaucaaggagaacaagugcaacggcaccgacgccaaggugaagcugaucaagcaggagcuggacaaguacaagaacgccgugaccgagcugcagcugcugaugcagagcacccccgccaccaacaacagagccagaagagagcugcccagauucaugaacuacacccugaacaacgccaagaagaccaacgugacccugagcaagaagagaaagagaagauuccugggcuuccugcugggcgugggcagcgccaucgccagcggcguggccgugagcaaggugcugcaccuggagggcgaggugaacaagaucaagagcgcccugcugagcaccaacaaggccguggugagccugagcaacggcgugagcgugcugaccagcaaggugcuggaccugaagaacuacaucgacaagcagcugcugcccaucgugaacaagcagagcugcagcaucagcaacaucgagaccgugaucgaguuccagcagaagaacaacagacugcuggagaucaccagagaguucagcgugaacgccggcgugaccacccccgugagcaccuacaugcugaccaacagcgagcugcugagccugaucaacgacaugcccaucaccaacgaccagaagaagcugaugagcaacaacgugcagaucgugagacagcagagcuacagcaucaugagcaucaucaaggaggaggugcuggccuacguggugcagcugccccuguacggcgugaucgacacccccugcuggaagcugcacaccagcccccugugcaccaccaacaccaaggagggcagcaacaucugccugaccagaaccgacagaggcugguacugcgacaacgccggcagcgugagcuucuucccccaggccgagaccugcaaggugcagagcaacagaguguucugcgacaccaugaacagccugacccugcccagcgaggugaaccugugcaacguggacaucuucaaccccaaguacgacugcaagaucaugaccagcaagaccgacgugagcagcagcgugaucaccagccugggcgccaucgugagcugcuacggcaagaccaagugcaccgccagcaacaagaacagaggcaucaucaagaccuucagcaacggcugcgacuacgugagcaacaagggcguggacaccgugagcgugggcaacacccuguacuacgugaacaagcaggagggcaagagccuguacgugaagggcgagcccaucaucaacuucuacgacccccugguguuccccagcgacgaguucgacgccagcaucagccaggugaacgagaagaucaaccagagccuggccuucaucagaaagagcgacgagcugcugcacaacgugaacgccggcaagagcaccaccaacaucaugaucaccaccaucaucaucgugaucaucgugauccugcugagccugaucgccgugggccugcugcuguacugcaaggccagaagcacccccgugacccugagcaaggaccagcugagcggcaucaacaacaucgccuucagcaacugaggacuaguguccaccugucccuccugggcugcuggauugucucguuuuccugccaaauaaacaggaucagcgcuuuacagaucuaaaaaaaaaaaaaaaaaaaaaaaaaaaaaaaaaaaaaaaaaaaaaaaaaaaaaaaaaaaaaaaaugcaucccccccccccccccccccccccccccccccaaaggcucuuuucagagccaccagaauu

SEQ ID NO: 282 - RNA, 2006 nt, Artificial Sequence
  mRNA product Design e-3 comprising derived and/or modified sequence from HRSV(A2)__F0 (opt5)
gggagacuuucccauucuguagcagaauuugguguugccuguggucuuggucccgcggagaagcuuaccauggagcugcucauccugaaggccaacgcuauuaccacaauccuuacggccgugaccuucugcuuugcgagcggccagaauauuacagaagaguucuaccaauccaccuguucugcugucagcaaaggguaucuguccgcccucagaacaggaugguacaccucuguuaucacaauugaacugagcaacaucaaggagaauaaaugcaacggcaccgacgccaaggugaaacuuaucaagcaggaacuggauaaguauaaaaaugcugugacggagcuccagcugcugaugcaguccacccccgccacaaacaaucgggcucgcagagagcucccucgguuuaugaacuacacccugaauaacgccaagaaaacaaaugucacccuuucuaagaaacgcaagagacgguuccugggguuucuccugggagugggcagcgcgauugccuccgggguugcugugagcaagguccuucaccuggaaggagaggugaacaaaaucaagucugcccuccuguccacgaauaaagcuguugugagccugucuaacggcgucuccgugcucacaagcaaggugcuggaccuuaaaaauuauauugauaagcaacugcucccgaucgucaacaaacagucuuguuccauuagcaacaucgaaaccguuauugaguuccagcagaagaauaaccgccugcuugagaucacaagagaauuuuccgugaaugccggcgugaccacccccgucucuacauacaugcugacgaacagcgagcuccugucccugaucaaugacaugccuauuaccaacgaucaaaagaaacucaugagcaauaacgugcagaucguucggcagcagucuuauuccauuaugagcaucauuaaggaagaggugcuggcguacgucgugcaacuuccccuguacgggguuaucgacacaccuugcuggaaacuccauaccucuccccuguguacaaccaauacgaaggaaggaagcaacaucugccuuacacgcaccgauagaggcugguauugugacaaugccggguccgugucuuucuuuccucaggcugagaccugcaaaguccagagcaaccggguguucugugauacaaugaacucccugacccucccgagcgaggucaaucugugcaauguggacauuuuuaaccccaaguacgauuguaagaucaugacaucuaaaacggacguuuccagcucugugauuaccucccugggagccaucgucagcugcuauggcaagacaaaaugcaccgcuuccaacaagaaucgcgggauuaucaaaacauucucuaacggaugugauuacgugagcaauaagggcguugacaccguguccgucggcaacacgcucuauuacgugaauaagcaagaagggaaaucucuguaugugaagggagagccuaucauuaacuuuuacgacccccuuguuuucccuagcgaugaauuugacgccuccaucagccaggucaaugagaaaauuaaccagucucuggccuucaucagaaaguccgaugaacuccugcacaaugugaacgcuggcaaaagcaccacaaauauuaugaucaccacaauuaucaucgugauuaucgucauucugcuuucucucaucgcgguggggcugcugcucuacugcaaggcccgguccacccccguuacgcugagcaaggaccagcuuucuggaauuaacaauaucgcuuucagcaacugaggacuaguguccaccugucccuccugggcugcuggauugucucguuuuccugccaaauaaacaggaucagcgcuuuacagaucuaaaaaaaaaaaaaaaaaaaaaaaaaaaaaaaaaaaaaaaaaaaaaaaaaaaaaaaaaaaaaaaaugcaucccccccccccccccccccccccccccccccaaaggcucuuuucagagccaccagaauu

SEQ ID NO: 283 - RNA, 2006 nt, Artificial Sequence
  mRNA product Design e-3 comprising derived and/or modified sequence from HRSV(A2)__F0 (opt6)
gggagacuuucccauucuguagcagaauuugguguugccuguggucuuggucccgcggagaagcuuaccauggaacuucuaauauuaaaagcuaacgcaaucacuacuaucuuaaccgcaguaacauucuguuuugcauccggccaaaacauaacagaagaauuuuaccaaucaacuugcucugcagucucaaaagguuaucuaucugcauuaagaacaggcugguacaccucaguaauaacgaucgaacuaucaaacaucaaagaaaacaaauguaauggaacagacgcaaaaguaaaacuaaucaaacaagaacuagacaaauacaaaaacgcaguaaccgaacuccaacuccucaugcaaaguacaccagcaacaaauaacagagcaagacgugaacuaccacguuuuaugaauuacacgcucaauaacgcaaaaaaaacaaauguuacccuaucaaaaaaacgaaaaagaagauuccucggauuccuacuaggcguaggcucagcaauagcuucaggaguagcaguaucaaaaguacuccaccucgaaggagaaguaaacaaaaucaaaagcgcucuccucucaacaaacaaagcaguuguuucacucucaaacggaguaucaguacuaaccucaaaaguacuugaccuaaaaaauuauauagacaaacaacuauuaccaauaguaaacaaacaaagcugcuccaucuccaacaucgagacagucauagaauuucaacaaaaaaauaaccgccuauuagaaauaaccagagaauuuucaguaaacgcaggaguaacuaccccaguaucaacauauauguuaacaaacucagaacuccuaagucuaaucaacgacaugccaauaaccaacgaccaaaaaaaacuaaugagcaacaauguacaaauaguucgucaacaaucuuacuccauaaugucuauaauaaaagaagaaguacucgccuauguaguccaacuaccacuauacggagucaucgauacaccaugcuggaaacuccacacauccccacucuguacuacuaacaccaaagaagguucaaauauaugccuaaccagaacagauagagguugguacugcgauaaugcaggaucaguauccuuuuucccccaagccgaaacaugcaaaguucaauccaauagaguauuuugugauacaaugaacucuuuaacccucccauccgaagucaaucuauguaacgucgacauauuuaacccaaaauacgauugcaaaauaaugacaucaaaaacagacgucucauccucaguuauaacguccuuaggcgcuauaguaucaugcuacggcaaaacaaaauguacagcaucaaacaaaaacagaggaaucauaaaaacuuucucuaacgguugcgacuauguauccaacaaaggugucgacacaguauccguaggcaacacccuuuacuauguuaauaaacaagaaggaaaaucucuauauguaaaaggcgaaccaauuauaaauuuuuacgacccccuugucuuucccucugacgaauuugacgcuuccauaucacaagucaacgaaaaaaucaaccaaucccucgcauucauacgcaaaucagacgaacuacuacauaacgucaacgcaggcaaauccacaacaaacauaaugauaaccacaaucauaauuguaauaauaguaauacuacuuucucuaauagcagucggauuacucuuauacuguaaagcucgaucaacaccagucacccucucuaaagaucaacuauccggaaucaacaacauagcuuucucaaacuaaggacuaguguccaccugucccuccugggcugcuggauugucucguuuuccugccaaauaaacaggaucagcgcuuuacagaucuaaaaaaaaaaaaaaaaaaaaaaaaaaaaaaaaaaaaaaaaaaaaaaaaaaaaaaaaaaaaaaaaugcaucccccccccccccccccccccccccccccccaaaggcucuuuucagagccaccagaauu

SEQ ID NO: 284 - RNA, 2006 nt, Artificial Sequence
  mRNA product Design e-3 comprising derived and/or modified sequence from HRSV(A2)__F0 (opt11)
gggagacuuucccauucuguagcagaauuugguguugccuguggucuuggucccgcggagaagcuuaccauggaacuccucauacucaaagccaacgcaaucacaaccauacucaccgccgucaccuucugcuuugcaucuggccagaacaucacugaagaguucuaccaauccacaugcuccgccguaagcaaaggcuaccuauccgcccuacgcaccggcugguacaccagcguaaucaccauagaacucuccaauauaaaagaaaacaaaugcaacggcaccgacgcaaaagucaagcuaauaaaacaagaacucgacaaauacaaaaacgccguuaccgaacuccagcuacucaugcaaucgaccccagcaaccaacaaccgugcgagacgcgaacucccccgcuucaugaacuacacccuaaacaacgccaaaaagaccaacguaacucuauccaagaaacgcaaacgccgcuuccucggauuccuccucggcgucggcuccgcaaucgccagcggcgucgccguuagcaaaguccuucaccucgaaggagaaguaaacaaaauuaaaagcgcccucuuauccacaaacaaggccguaguaucccugucaaacggcgucuccguccuuacauccaaaguccucgaccucaagaacuacauagacaaacagcuacuacccauuguaaauaaacaaagcugcucaauuagcaacaucgaaaccguaaucgaguuccagcagaaaaacaacagacuucucgaaaucacccgcgaguucagcgucaacgccggcguaaccaccccugucucaacauacaugcuaaccaacagcgaacugcucucccucaucaacgacaugcccaucaccaacgaccaaaagaaacucaugagcaacaacguacaaaucgugcgccaacaguccuacucaauaaugucaaucaucaaagaagaagugcuagcauacgucguacaacuaccacucuacggcguaauagauacccccugcuggaagcuccauaccuccccacucuguaccaccaacaccaaagaaggcucaaacaucugccuaacgcgcacagaccguggaugguacugugacaacgccggcuccgucuccuucuucccucaagccgaaacaugcaaaguccaauccaacagagucuucugcgauaccaugaacucccugacacucccaagcgaagucaaccuuugcaacgucgauaucuuuaaccccaaauacgacugcaagaucaugacaucaaaaaccgacguauccuccucuguaauaaccucccuaggcgcaaucguaucaugcuacggcaaaaccaaauguaccgccuccaacaaaaaucgcggcaucaucaaaaccuucucgaacggcugcgacuacgucuccaacaaaggcguagacacaguuuccguaggcaacacccucuacuacgucaauaaacaggaaggcaagucccucuacgucaaaggcgaacccaucaucaauuucuacgacccccucguuuuccccuccgaugaguucgacgcaagcaucagccaggucaacgaaaagauaaaccagucccucgccuucauccgcaaaucagaugaacuccuucacaacguuaacgcaggcaagagcaccaccaacaucaugaucacaacuauaaucaucgucauaaucgucauccuacucucacuaaucgccgucggucuccuacuauauuguaaagcccgaucaacaccggucacacucuccaaagaccaacucuccggaaucaacaauaucgcuuucucgaacuaaggacuaguguccaccugucccuccugggcugcuggauugucucguuuuccugccaaauaaacaggaucagcgcuuuacagaucuaaaaaaaaaaaaaaaaaaaaaaaaaaaaaaaaaaaaaaaaaaaaaaaaaaaaaaaaaaaaaaaaugcaucccccccccccccccccccccccccccccccaaaggcucuuuucagagccaccagaauu

SEQ ID NO: 285 - RNA, 2060 nt, Artificial Sequence
  mRNA product Design e-4 comprising derived and/or modified sequence from HRSV(A2)__F0 (artificial)
gggagacuccugucgggcggaaguaggaggaguagaguuuaaaaacaguacucuuuuuccgguucgggacguaguugaagcaacgacaagccggauaaccgcucuugagacaggaagcuuaccauggaguugcuaauccucaaagcaaaugcaauuaccacaauccucacugcagucacauuuuguuuugcuucuggucaaaacaucacugaagaauuuuaucaaucaacaugcagugcaguuagcaaaggcuaucuuagugcucugagaacugguugguauaccaguguuauaacuauagaauuaaguaauaucaaggaaaauaaguguaauggaacagaugcuaagguaaaauugauaaaacaagaauuagauaaauauaaaaaugcuguaacagaauugcaguugcucaugcaaagcacaccagcaacaaacaaucgagccagaagagaacuaccaagguuuaugaauuauacacucaacaaugccaaaaaaaccaauguaacauuaagcaagaaaaggaaaagaagauuucuugguuuuuuguuagguguuggaucugcaaucgccaguggcguugcuguaucuaagguccugcaccuagaaggggaagugaacaagaucaaaagugcucuacuauccacaaacaaggcuguagucagcuuaucaaauggaguuagugucuuaaccagcaaaguguuagaccucaaaaacuauauagauaaacaauuguuaccuauugugaacaagcaaagcugcagcauaucaaauauagaaacugugauagaguuccaacaaaagaacaacagacuacuagagauuaccagggaauuuaguguuaaugcagguguaacuacaccuguaagcacuuacauguuaacuaauagugaauuauugucauuaaucaaugauaugccuauaacaaaugaucagaaaaaguuaauguccaacaauguucaaauaguuagacagcaaaguuacucuaucauguccauaauaaaagaggaagucuuagcauauguaguacaauuaccacuauaugguguuauagauacacccuguuggaaacuacacacauccccucuauguacaaccaacacaaaagaaggguccaacaucuguuuaacaagaacugacagaggaugguacugugacaaugcaggaucaguaucuuucuucccacaagcugaaacauguaaaguucaaucaaaucgaguauuuugugacacaaugaacaguuuaacauuaccaagugaaguaaaucucugcaauguugacauauucaaccccaaauaugauuguaaaauuaugacuucaaaaacagauguaagcagcuccguuaucacaucucuaggagccauugugucaugcuauggcaaaacuaaauguacagcauccaauaaaaaucguggaaucauaaagacauuuucuaacgggugcgauuauguaucaaauaaagggguggacacugugucuguagguaacacauuauauuauguaaauaagcaagaagguaaaagucucuauguaaaaggugaaccaauaauaaauuucuaugacccauuaguauuccccucugaugaauuugaugcaucaauaucucaagucaacgagaagauuaaccagagccuagcauuuauucguaaauccgaugaauuauuacauaauguaaaugcugguaaauccaccacaaauaucaugauaacuacuauaauuauagugauuauaguaauauuguuaucauuaauugcuguuggacugcucuuauacuguaaggccagaagcacaccagucacacuaagcaaagaucaacugagugguauaaauaauauugcauuuaguaacuaaggacuaguguccaccugucccuccugggcugcuggauugucucguuuuccugccaaauaaacaggaucagcgcuuuacagaucuaaaaaaaaaaaaaaaaaaaaaaaaaaaaaaaaaaaaaaaaaaaaaaaaaaaaaaaaaaaaaaaaugcaucccccccccccccccccccccccccccccccaaaggcucuuuucagagccaccagaauu

SEQ ID NO: 286 - RNA, 2060 nt, Artificial Sequence
  mRNA product Design e-4 comprising derived and/or modified sequence from HRSV(A2)__F0 (opt1)
gggagacuccugucgggcggaaguaggaggaguagaguuuaaaaacaguacucuuuuuccgguucgggacguaguugaagcaacgacaagccggauaaccgcucuugagacaggaagcuuaccauggagcugcucauccugaaggccaacgccaucaccaccauccugacggcggugaccuucugcuucgccagcggccagaacaucaccgaggaguucuaccaguccaccugcagcgccgucuccaagggguaccucagcgcccugcggacgggcugguacaccuccgugaucaccaucgagcugagcaacaucaaggagaacaagugcaacgggaccgacgccaaggugaagcucaucaagcaggagcuggacaaguacaagaacgcggucacggagcugcagcuccugaugcaguccaccccggcaaccaacaaccgcgcccggcgcgagcugccccgguucaugaacuacacccucaacaacgccaagaagacgaacgugacccugagcaagaagcgcaagcggcgcuuccugggcuuccuccugggggugggcuccgccaucgcgagcggcgucgccguguccaaggugcugcaccucgagggggaggucaacaagaucaagagcgcccugcuguccaccaacaaggccguggugagccucuccaacggcgucagcgugcugaccuccaaggugcuggaccucaagaacuacaucgacaagcagcugcugcccaucgucaacaagcagagcugcuccaucagcaacaucgagacggugaucgaguuccagcagaagaacaaccggcuccuggagaucacccgcgaguucagcgugaacgccggggucaccacccccguguccacguacaugcugaccaacagcgagcuccugucccugaucaacgacaugccgaucaccaacgaccagaagaagcucaugagcaacaacgugcagaucguccggcagcaguccuacagcaucauguccaucaucaaggaggaggugcuggcguacgugguccagcugccccucuacggcgugaucgacacccccugcuggaagcugcacacgagcccccugugcaccaccaacaccaaggagggguccaacaucugccucacgcgcaccgaccggggcugguacugcgacaacgccggcagcgucuccuucuucccgcaggccgagaccugcaaggugcagagcaaccgcguguucugcgacaccaugaacucccugacgcugcccagcgagguaaaccucugcaacgucgacaucuucaaccccaaguacgacugcaagaucaugaccuccaagaccgacgugagcuccagcgugaucaccucccugggggccaucgucagcugcuacggcaagacgaagugcaccgccagcaacaagaaccgggggaucaucaagaccuucuccaacggcugcgacuacgugagcaacaagggcguggacaccguguccgucgggaacacccuguacuacgugaacaagcaggagggcaagagccucuacgugaagggggagcccaucaucaacuucuacgacccgcuggucuuccccuccgacgaguucgacgcgagcaucucccaggugaacgagaagaucaaccagagccuggccuucauccgcaaguccgacgagcugcuccacaacgugaacgccggcaagagcacgaccaacaucaugaucaccaccaucaucaucgucaucaucgugauccugcugucccucaucgccguggggcugcugcucuacugcaaggcccggagcacgcccgucacccuguccaaggaccagcugagcggcaucaacaacaucgcguucuccaacugaggacuaguguccaccugucccuccugggcugcuggauugucucguuuuccugccaaauaaacaggaucagcgcuuuacagaucuaaaaaaaaaaaaaaaaaaaaaaaaaaaaaaaaaaaaaaaaaaaaaaaaaaaaaaaaaaaaaaaaugcaucccccccccccccccccccccccccccccccaaaggcucuuuucagagccaccagaauu

SEQ ID NO: 287 - RNA, 2060 nt, Artificial Sequence
  mRNA product Design e-4 comprising derived and/or modified sequence from HRSV(A2)__F0 (opt1)
gggagacuccugucgggcggaaguaggaggaguagaguuuaaaaacaguacucuuuuuccgguucgggacguaguugaagcaacgacaagccggauaaccgcucuugagacaggaagcuuaccauggagcugcucauccugaaggccaacgccaucaccaccauccugacggcggugaccuucugcuucgccagcggccagaacaucaccgaggaguucuaccaguccacgugcagcgccgucuccaagggguaccucagcgcccugcgcaccggcugguacaccuccgugaucaccaucgagcugagcaacaucaaggagaacaagugcaacgggaccgacgccaaggugaagcucaucaagcaggagcuggacaaguacaagaacgcggucacggagcugcagcuccugaugcaguccacccccgccaccaacaaccgggcccgccgggagcugccgcgcuucaugaacuacacccucaacaacgccaagaagacgaacgugacccugagcaagaagcggaagcgccgguuccugggcuuccuccugggggugggcuccgcgaucgccagcggcgucgccguguccaaggugcugcaccucgagggggaggucaacaagaucaagagcgcccugcuguccaccaacaaggccguggugagccucuccaacggcgucagcgugcugaccuccaaggugcuggaccucaagaacuacaucgacaagcagcugcugcccaucgucaacaagcagagcugcuccaucagcaacaucgagacggugaucgaguuccagcagaagaacaaccgccuccuggagaucacccgggaguucagcgugaacgcgggggucaccacccccguguccacguacaugcugaccaacagcgagcuccugucccugaucaacgacaugcccaucaccaacgaccagaagaagcucaugagcaacaacgugcagaucguccgccagcaguccuacagcaucauguccaucaucaaggaggaggugcuggccuacgugguccagcugccgcucuacggcgugaucgacacccccugcuggaagcugcacacgagcccccugugcaccaccaacaccaaggagggguccaacaucugccucacgcggaccgaccgcggcugguacugcgacaacgccggcagcgucuccuucuucccccaggccgagaccugcaaggugcagagcaaccggguguucugcgacaccaugaacucccugacgcugccgagcgaggucaaccucugcaacguggacaucuucaaccccaaguacgacugcaagaucaugaccuccaagaccgacgugagcuccagcgucaucaccucccugggggccaucgugagcugcuacggcaagacgaagugcaccgcgagcaacaagaaccgcgggaucaucaagaccuucuccaacggcugcgacuacgugagcaacaagggcgucgacaccguguccguggggaacacccuguacuacgucaacaagcaggagggcaagagccucuacgugaagggggagcccaucaucaacuucuacgacccccugguguucccguccgacgaguucgacgccagcaucucccaggucaacgagaagaucaaccagagccuggccuucauccggaaguccgacgagcuccugcacaacgugaacgccggcaagagcacgaccaacaucaugaucaccaccaucaucaucgugaucaucgucauccugcugucccucaucgccguggggcugcugcucuacugcaaggcgcgcagcacgcccgugacccuguccaaggaccagcugagcggcaucaacaacaucgccuucuccaacugaggacuaguguccaccugucccuccugggcugcuggauugucucguuuuccugccaaauaaacaggaucagcgcuuuacagaucuaaaaaaaaaaaaaaaaaaaaaaaaaaaaaaaaaaaaaaaaaaaaaaaaaaaaaaaaaaaaaaaaugcaucccccccccccccccccccccccccccccccaaaggcucuuuucagagccaccagaauu

SEQ ID NO: 288 - RNA, 2060 nt, Artificial Sequence
  mRNA product Design e-4 comprising derived and/or modified sequence from HRSV(A2)__F0 (opt2)
gggagacuccugucgggcggaaguaggaggaguagaguuuaaaaacaguacucuuuuuccgguucgggacguaguugaagcaacgacaagccggauaaccgcucuugagacaggaagcuuaccauggagcuccucauccucaaggccaacgccaucaccaccauccucaccgccgucaccuucugcuucgccuccggccagaacaucaccgaggaguucuaccaguccaccugcuccgccgucuccaagggcuaccucuccgcccuccgcaccggcugguacaccuccgucaucaccaucgagcucuccaacaucaaggagaacaagugcaacggcaccgacgccaaggucaagcucaucaagcaggagcucgacaaguacaagaacgccgucaccgagcuccagcuccucaugcaguccacccccgccaccaacaaccgcgcccgccgcgagcucccccgcuucaugaacuacacccucaacaacgccaagaagaccaacgucacccucuccaagaagcgcaagcgccgcuuccucggcuuccuccucggcgucggcuccgccaucgccuccggcgucgccgucuccaagguccuccaccucgagggcgaggucaacaagaucaaguccgcccuccucuccaccaacaaggccgucgucucccucuccaacggcgucuccguccucaccuccaagguccucgaccucaagaacuacaucgacaagcagcuccuccccaucgucaacaagcaguccugcuccaucuccaacaucgagaccgucaucgaguuccagcagaagaacaaccgccuccucgagaucacccgcgaguucuccgucaacgccggcgucaccacccccgucuccaccuacaugcucaccaacuccgagcuccucucccucaucaacgacaugcccaucaccaacgaccagaagaagcucauguccaacaacguccagaucguccgccagcaguccuacuccaucauguccaucaucaaggaggagguccucgccuacgucguccagcucccccucuacggcgucaucgacacccccugcuggaagcuccacaccuccccccucugcaccaccaacaccaaggagggcuccaacaucugccucacccgcaccgaccgcggcugguacugcgacaacgccggcuccgucuccuucuucccccaggccgagaccugcaagguccaguccaaccgcgucuucugcgacaccaugaacucccucacccuccccuccgaggucaaccucugcaacgucgacaucuucaaccccaaguacgacugcaagaucaugaccuccaagaccgacgucuccuccuccgucaucaccucccucggcgccaucgucuccugcuacggcaagaccaagugcaccgccuccaacaagaaccgcggcaucaucaagaccuucuccaacggcugcgacuacgucuccaacaagggcgucgacaccgucuccgucggcaacacccucuacuacgucaacaagcaggagggcaagucccucuacgucaagggcgagcccaucaucaacuucuacgacccccucgucuuccccuccgacgaguucgacgccuccaucucccaggucaacgagaagaucaaccagucccucgccuucauccgcaaguccgacgagcuccuccacaacgucaacgccggcaaguccaccaccaacaucaugaucaccaccaucaucaucgucaucaucgucauccuccucucccucaucgccgucggccuccuccucuacugcaaggcccgcuccacccccgucacccucuccaaggaccagcucuccggcaucaacaacaucgccuucuccaacugaggacuaguguccaccugucccuccugggcugcuggauugucucguuuuccugccaaauaaacaggaucagcgcuuuacagaucuaaaaaaaaaaaaaaaaaaaaaaaaaaaaaaaaaaaaaaaaaaaaaaaaaaaaaaaaaaaaaaaaugcaucccccccccccccccccccccccccccccccaaaggcucuuuucagagccaccagaauu

SEQ ID NO: 289 - RNA, 2060 nt, Artificial Sequence
  mRNA product Design e-4 comprising derived and/or modified sequence from HRSV(A2)__F0 (opt3)
gggagacuccugucgggcggaaguaggaggaguagaguuuaaaaacaguacucuuuuuccgguucgggacguaguugaagcaacgacaagccggauaaccgcucuugagacaggaagcuuaccauggagcugcucauccuuaaggccaacgcuauuaccacaauacugacugcagugacguucugcuuugccagcggccagaauaucaccgaagaguucuaccaauccacauguucugcggucucaaaaggguauuugagugcuuuaagaacuggaugguacaccagcguuauuacaaucgaacuguccaacauuaaggagaauaaaugcaacgguaccgacgccaaggugaaacuaaucaagcaggaacucgauaaguauaaaaaugcaguaacugagcugcagcuucugaugcagucuacacccgccaccaacaauagggcucggcgcgaguugccucgauuuaugaacuacacgcucaauaacgcaaagaaaacuaaugugacccugucgaagaaacguaagagaagguuccugggcuuucucuuaggggucggaucagccauagcuagcggcguggccguuaguaaggugcugcaccuugaaggugaggucaacaaaaucaaguccgcguugcugucuacaaauaaagcagugguaagccuauccaacgggguuucagugcucacuucuaagguccuggaccuuaaaaauuauauugauaagcaacuguugccaaucgugaacaaacagagcuguucuauuuccaacaucgaaaccgugauagaguuccagcagaagaauaaccggcuccuggagauuacacgcgaauuuucagucaaugccggaguuaccacgccggugagcacuuacauguuaacaaacagugagcugcucucucuuaucaaugacaugcccauuaccaacgaucaaaagaaacugauguccaauaacguacagaucgugagacagcagagcuauucgaucaugucuauuauaaaggaagaggucuuggcuuacgugguucaacuaccucuguacggcgugaucgacacuccaugcuggaaacuccauacauccccacuguguaccacgaauaccaaggaaggcucaaacauuugccuuacaaggacugaucgggggugguauugugacaaugccggaagugucagcuucuuuccucaggcagagaccugcaaagugcaguccaaccgcguauucugugauacaaugaauagucugacuuugccaagcgagguuaaccucugcaauguggacaucuuuaaccccaaguacgauuguaagauaaugaccucaaaaacagacgucaguuccagcgugauuaccucucugggugcuaucgucucaugcuauggcaagacuaaaugcacggccaguaacaagaaucgagggaucauuaaaacauucagcaacggaugugauuacguguccaauaagggcguugacaccgugucuguagguaacacuuuauauuacgucaauaagcaagaagggaaaucgcuguaugugaagggagagccuaucauuaacuuuuacgacccccuaguuuucccgagcgaugaauuugacgcguccauaucacaggugaaugagaaaaucaaccagagucucgccuucauuagaaagucugaugaacugcuucacaaugucaacgcaggcaaaagcaccacaaauaucaugaucaccacuauuauaaucgugauuaucguaauuuugcugucccucaucgcugugggccugcuucuguacugcaaggccaggucaacacccguuacguugagcaaggaccagcucucugggauaaacaauaucgcuuucuccaacugaggacuaguguccaccugucccuccugggcugcuggauugucucguuuuccugccaaauaaacaggaucagcgcuuuacagaucuaaaaaaaaaaaaaaaaaaaaaaaaaaaaaaaaaaaaaaaaaaaaaaaaaaaaaaaaaaaaaaaaugcaucccccccccccccccccccccccccccccccaaaggcucuuuucagagccaccagaauu

SEQ ID NO: 290 - RNA, 2060 nt, Artificial Sequence
  mRNA product Design e-4 comprising derived and/or modified sequence from HRSV(A2)__F0 (opt4)
gggagacuccugucgggcggaaguaggaggaguagaguuuaaaaacaguacucuuuuuccgguucgggacguaguugaagcaacgacaagccggauaaccgcucuugagacaggaagcuuaccauggagcugcugauccugaaggccaacgccaucaccaccauccugaccgccgugaccuucugcuucgccagcggccagaacaucaccgaggaguucuaccagagcaccugcagcgccgugagcaagggcuaccugagcgcccugagaaccggcugguacaccagcgugaucaccaucgagcugagcaacaucaaggagaacaagugcaacggcaccgacgccaaggugaagcugaucaagcaggagcuggacaaguacaagaacgccgugaccgagcugcagcugcugaugcagagcacccccgccaccaacaacagagccagaagagagcugcccagauucaugaacuacacccugaacaacgccaagaagaccaacgugacccugagcaagaagagaaagagaagauuccugggcuuccugcugggcgugggcagcgccaucgccagcggcguggccgugagcaaggugcugcaccuggagggcgaggugaacaagaucaagagcgcccugcugagcaccaacaaggccguggugagccugagcaacggcgugagcgugcugaccagcaaggugcuggaccugaagaacuacaucgacaagcagcugcugcccaucgugaacaagcagagcugcagcaucagcaacaucgagaccgugaucgaguuccagcagaagaacaacagacugcuggagaucaccagagaguucagcgugaacgccggcgugaccacccccgugagcaccuacaugcugaccaacagcgagcugcugagccugaucaacgacaugcccaucaccaacgaccagaagaagcugaugagcaacaacgugcagaucgugagacagcagagcuacagcaucaugagcaucaucaaggaggaggugcuggccuacguggugcagcugccccuguacggcgugaucgacacccccugcuggaagcugcacaccagcccccugugcaccaccaacaccaaggagggcagcaacaucugccugaccagaaccgacagaggcugguacugcgacaacgccggcagcgugagcuucuucccccaggccgagaccugcaaggugcagagcaacagaguguucugcgacaccaugaacagccugacccugcccagcgaggugaaccugugcaacguggacaucuucaaccccaaguacgacugcaagaucaugaccagcaagaccgacgugagcagcagcgugaucaccagccugggcgccaucgugagcugcuacggcaagaccaagugcaccgccagcaacaagaacagaggcaucaucaagaccuucagcaacggcugcgacuacgugagcaacaagggcguggacaccgugagcgugggcaacacccuguacuacgugaacaagcaggagggcaagagccuguacgugaagggcgagcccaucaucaacuucuacgacccccugguguuccccagcgacgaguucgacgccagcaucagccaggugaacgagaagaucaaccagagccuggccuucaucagaaagagcgacgagcugcugcacaacgugaacgccggcaagagcaccaccaacaucaugaucaccaccaucaucaucgugaucaucgugauccugcugagccugaucgccgugggccugcugcuguacugcaaggccagaagcacccccgugacccugagcaaggaccagcugagcggcaucaacaacaucgccuucagcaacugaggacuaguguccaccugucccuccugggcugcuggauugucucguuuuccugccaaauaaacaggaucagcgcuuuacagaucuaaaaaaaaaaaaaaaaaaaaaaaaaaaaaaaaaaaaaaaaaaaaaaaaaaaaaaaaaaaaaaaaugcaucccccccccccccccccccccccccccccccaaaggcucuuuucagagccaccagaauu

SEQ ID NO: 291 - RNA, 2060 nt, Artificial Sequence
  mRNA product Design e-4 comprising derived and/or modified sequence from HRSV(A2)__F0 (opt5)
gggagacuccugucgggcggaaguaggaggaguagaguuuaaaaacaguacucuuuuuccgguucgggacguaguugaagcaacgacaagccggauaaccgcucuugagacaggaagcuuaccauggagcugcucauccugaaggccaacgcuauuaccacaauccuuacggccgugaccuucugcuuugcgagcggccagaauauuacagaagaguucuaccaauccaccuguucugcugucagcaaaggguaucuguccgcccucagaacaggaugguacaccucuguuaucacaauugaacugagcaacaucaaggagaauaaaugcaacggcaccgacgccaaggugaaacuuaucaagcaggaacuggauaaguauaaaaaugcugugacggagcuccagcugcugaugcaguccacccccgccacaaacaaucgggcucgcagagagcucccucgguuuaugaacuacacccugaauaacgccaagaaaacaaaugucacccuuucuaagaaacgcaagagacgguuccugggguuucuccugggagugggcagcgcgauugccuccgggguugcugugagcaagguccuucaccuggaaggagaggugaacaaaaucaagucugcccuccuguccacgaauaaagcuguugugagccugucuaacggcgucuccgugcucacaagcaaggugcuggaccuuaaaaauuauauugauaagcaacugcucccgaucgucaacaaacagucuuguuccauuagcaacaucgaaaccguuauugaguuccagcagaagaauaaccgccugcuugagaucacaagagaauuuuccgugaaugccggcgugaccacccccgucucuacauacaugcugacgaacagcgagcuccugucccugaucaaugacaugccuauuaccaacgaucaaaagaaacucaugagcaauaacgugcagaucguucggcagcagucuuauuccauuaugagcaucauuaaggaagaggugcuggcguacgucgugcaacuuccccuguacgggguuaucgacacaccuugcuggaaacuccauaccucuccccuguguacaaccaauacgaaggaaggaagcaacaucugccuuacacgcaccgauagaggcugguauugugacaaugccggguccgugucuuucuuuccucaggcugagaccugcaaaguccagagcaaccggguguucugugauacaaugaacucccugacccucccgagcgaggucaaucugugcaauguggacauuuuuaaccccaaguacgauuguaagaucaugacaucuaaaacggacguuuccagcucugugauuaccucccugggagccaucgucagcugcuauggcaagacaaaaugcaccgcuuccaacaagaaucgcgggauuaucaaaacauucucuaacggaugugauuacgugagcaauaagggcguugacaccguguccgucggcaacacgcucuauuacgugaauaagcaagaagggaaaucucuguaugugaagggagagccuaucauuaacuuuuacgacccccuuguuuucccuagcgaugaauuugacgccuccaucagccaggucaaugagaaaauuaaccagucucuggccuucaucagaaaguccgaugaacuccugcacaaugugaacgcuggcaaaagcaccacaaauauuaugaucaccacaauuaucaucgugauuaucgucauucugcuuucucucaucgcgguggggcugcugcucuacugcaaggcccgguccacccccguuacgcugagcaaggaccagcuuucuggaauuaacaauaucgcuuucagcaacugaggacuaguguccaccugucccuccugggcugcuggauugucucguuuuccugccaaauaaacaggaucagcgcuuuacagaucuaaaaaaaaaaaaaaaaaaaaaaaaaaaaaaaaaaaaaaaaaaaaaaaaaaaaaaaaaaaaaaaaugcaucccccccccccccccccccccccccccccccaaaggcucuuuucagagccaccagaauu

SEQ ID NO: 292 - RNA, 2060 nt, Artificial Sequence
  mRNA product Design e-4 comprising derived and/or modified sequence from HRSV(A2)__F0 (opt6)
gggagacuccugucgggcggaaguaggaggaguagaguuuaaaaacaguacucuuuuuccgguucgggacguaguugaagcaacgacaagccggauaaccgcucuugagacaggaagcuuaccauggaacuucuaauauuaaaagcuaacgcaaucacuacuaucuuaaccgcaguaacauucuguuuugcauccggccaaaacauaacagaagaauuuuaccaaucaacuugcucugcagucucaaaagguuaucuaucugcauuaagaacaggcugguacaccucaguaauaacgaucgaacuaucaaacaucaaagaaaacaaauguaauggaacagacgcaaaaguaaaacuaaucaaacaagaacuagacaaauacaaaaacgcaguaaccgaacuccaacuccucaugcaaaguacaccagcaacaaauaacagagcaagacgugaacuaccacguuuuaugaauuacacgcucaauaacgcaaaaaaaacaaauguuacccuaucaaaaaaacgaaaaagaagauuccucggauuccuacuaggcguaggcucagcaauagcuucaggaguagcaguaucaaaaguacuccaccucgaaggagaaguaaacaaaaucaaaagcgcucuccucucaacaaacaaagcaguuguuucacucucaaacggaguaucaguacuaaccucaaaaguacuugaccuaaaaaauuauauagacaaacaacuauuaccaauaguaaacaaacaaagcugcuccaucuccaacaucgagacagucauagaauuucaacaaaaaaauaaccgccuauuagaaauaaccagagaauuuucaguaaacgcaggaguaacuaccccaguaucaacauauauguuaacaaacucagaacuccuaagucuaaucaacgacaugccaauaaccaacgaccaaaaaaaacuaaugagcaacaauguacaaauaguucgucaacaaucuuacuccauaaugucuauaauaaaagaagaaguacucgccuauguaguccaacuaccacuauacggagucaucgauacaccaugcuggaaacuccacacauccccacucuguacuacuaacaccaaagaagguucaaauauaugccuaaccagaacagauagagguugguacugcgauaaugcaggaucaguauccuuuuucccccaagccgaaacaugcaaaguucaauccaauagaguauuuugugauacaaugaacucuuuaacccucccauccgaagucaaucuauguaacgucgacauauuuaacccaaaauacgauugcaaaauaaugacaucaaaaacagacgucucauccucaguuauaacguccuuaggcgcuauaguaucaugcuacggcaaaacaaaauguacagcaucaaacaaaaacagaggaaucauaaaaacuuucucuaacgguugcgacuauguauccaacaaaggugucgacacaguauccguaggcaacacccuuuacuauguuaauaaacaagaaggaaaaucucuauauguaaaaggcgaaccaauuauaaauuuuuacgacccccuugucuuucccucugacgaauuugacgcuuccauaucacaagucaacgaaaaaaucaaccaaucccucgcauucauacgcaaaucagacgaacuacuacauaacgucaacgcaggcaaauccacaacaaacauaaugauaaccacaaucauaauuguaauaauaguaauacuacuuucucuaauagcagucggauuacucuuauacuguaaagcucgaucaacaccagucacccucucuaaagaucaacuauccggaaucaacaacauagcuuucucaaacuaaggacuaguguccaccugucccuccugggcugcuggauugucucguuuuccugccaaauaaacaggaucagcgcuuuacagaucuaaaaaaaaaaaaaaaaaaaaaaaaaaaaaaaaaaaaaaaaaaaaaaaaaaaaaaaaaaaaaaaaugcaucccccccccccccccccccccccccccccccaaaggcucuuuucagagccaccagaauu

SEQ ID NO: 293 - RNA, 2060 nt, Artificial Sequence
  mRNA product Design e-4 comprising derived and/or modified sequence from HRSV(A2)__F0 (opt11)
gggagacuccugucgggcggaaguaggaggaguagaguuuaaaaacaguacucuuuuuccgguucgggacguaguugaagcaacgacaagccggauaaccgcucuugagacaggaagcuuaccauggaacuccucauacucaaagccaacgcaaucacaaccauacucaccgccgucaccuucugcuuugcaucuggccagaacaucacugaagaguucuaccaauccacaugcuccgccguaagcaaaggcuaccuauccgcccuacgcaccggcugguacaccagcguaaucaccauagaacucuccaauauaaaagaaaacaaaugcaacggcaccgacgcaaaagucaagcuaauaaaacaagaacucgacaaauacaaaaacgccguuaccgaacuccagcuacucaugcaaucgaccccagcaaccaacaaccgugcgagacgcgaacucccccgcuucaugaacuacacccuaaacaacgccaaaaagaccaacguaacucuauccaagaaacgcaaacgccgcuuccucggauuccuccucggcgucggcuccgcaaucgccagcggcgucgccguuagcaaaguccuucaccucgaaggagaaguaaacaaaauuaaaagcgcccucuuauccacaaacaaggccguaguaucccugucaaacggcgucuccguccuuacauccaaaguccucgaccucaagaacuacauagacaaacagcuacuacccauuguaaauaaacaaagcugcucaauuagcaacaucgaaaccguaaucgaguuccagcagaaaaacaacagacuucucgaaaucacccgcgaguucagcgucaacgccggcguaaccaccccugucucaacauacaugcuaaccaacagcgaacugcucucccucaucaacgacaugcccaucaccaacgaccaaaagaaacucaugagcaacaacguacaaaucgugcgccaacaguccuacucaauaaugucaaucaucaaagaagaagugcuagcauacgucguacaacuaccacucuacggcguaauagauacccccugcuggaagcuccauaccuccccacucuguaccaccaacaccaaagaaggcucaaacaucugccuaacgcgcacagaccguggaugguacugugacaacgccggcuccgucuccuucuucccucaagccgaaacaugcaaaguccaauccaacagagucuucugcgauaccaugaacucccugacacucccaagcgaagucaaccuuugcaacgucgauaucuuuaaccccaaauacgacugcaagaucaugacaucaaaaaccgacguauccuccucuguaauaaccucccuaggcgcaaucguaucaugcuacggcaaaaccaaauguaccgccuccaacaaaaaucgcggcaucaucaaaaccuucucgaacggcugcgacuacgucuccaacaaaggcguagacacaguuuccguaggcaacacccucuacuacgucaauaaacaggaaggcaagucccucuacgucaaaggcgaacccaucaucaauuucuacgacccccucguuuuccccuccgaugaguucgacgcaagcaucagccaggucaacgaaaagauaaaccagucccucgccuucauccgcaaaucagaugaacuccuucacaacguuaacgcaggcaagagcaccaccaacaucaugaucacaacuauaaucaucgucauaaucgucauccuacucucacuaaucgccgucggucuccuacuauauuguaaagcccgaucaacaccggucacacucuccaaagaccaacucuccggaaucaacaauaucgcuuucucgaacuaaggacuaguguccaccugucccuccugggcugcuggauugucucguuuuccugccaaauaaacaggaucagcgcuuuacagaucuaaaaaaaaaaaaaaaaaaaaaaaaaaaaaaaaaaaaaaaaaaaaaaaaaaaaaaaaaaaaaaaaugcaucccccccccccccccccccccccccccccccaaaggcucuuuucagagccaccagaauu

SEQ ID NO: 294 - RNA, 2027 nt, Artificial Sequence
  mRNA product Design e-5 comprising derived and/or modified sequence from HRSV(A2)__F0 (artificial)
gggagagcggcucggccauuuugucccagucaguccggaggcugcggcugcagaaguaccgccugcggaguaacugcaaagaagcuuaccauggaguugcuaauccucaaagcaaaugcaauuaccacaauccucacugcagucacauuuuguuuugcuucuggucaaaacaucacugaagaauuuuaucaaucaacaugcagugcaguuagcaaaggcuaucuuagugcucugagaacugguugguauaccaguguuauaacuauagaauuaaguaauaucaaggaaaauaaguguaauggaacagaugcuaagguaaaauugauaaaacaagaauuagauaaauauaaaaaugcuguaacagaauugcaguugcucaugcaaagcacaccagcaacaaacaaucgagccagaagagaacuaccaagguuuaugaauuauacacucaacaaugccaaaaaaaccaauguaacauuaagcaagaaaaggaaaagaagauuucuugguuuuuuguuagguguuggaucugcaaucgccaguggcguugcuguaucuaagguccugcaccuagaaggggaagugaacaagaucaaaagugcucuacuauccacaaacaaggcuguagucagcuuaucaaauggaguuagugucuuaaccagcaaaguguuagaccucaaaaacuauauagauaaacaauuguuaccuauugugaacaagcaaagcugcagcauaucaaauauagaaacugugauagaguuccaacaaaagaacaacagacuacuagagauuaccagggaauuuaguguuaaugcagguguaacuacaccuguaagcacuuacauguuaacuaauagugaauuauugucauuaaucaaugauaugccuauaacaaaugaucagaaaaaguuaauguccaacaauguucaaauaguuagacagcaaaguuacucuaucauguccauaauaaaagaggaagucuuagcauauguaguacaauuaccacuauaugguguuauagauacacccuguuggaaacuacacacauccccucuauguacaaccaacacaaaagaaggguccaacaucuguuuaacaagaacugacagaggaugguacugugacaaugcaggaucaguaucuuucuucccacaagcugaaacauguaaaguucaaucaaaucgaguauuuugugacacaaugaacaguuuaacauuaccaagugaaguaaaucucugcaauguugacauauucaaccccaaauaugauuguaaaauuaugacuucaaaaacagauguaagcagcuccguuaucacaucucuaggagccauugugucaugcuauggcaaaacuaaauguacagcauccaauaaaaaucguggaaucauaaagacauuuucuaacgggugcgauuauguaucaaauaaagggguggacacugugucuguagguaacacauuauauuauguaaauaagcaagaagguaaaagucucuauguaaaaggugaaccaauaauaaauuucuaugacccauuaguauuccccucugaugaauuugaugcaucaauaucucaagucaacgagaagauuaaccagagccuagcauuuauucguaaauccgaugaauuauuacauaauguaaaugcugguaaauccaccacaaauaucaugauaacuacuauaauuauagugauuauaguaauauuguuaucauuaauugcuguuggacugcucuuauacuguaaggccagaagcacaccagucacacuaagcaaagaucaacugagugguauaaauaauauugcauuuaguaacuaaggacuaguguccaccugucccuccugggcugcuggauugucucguuuuccugccaaauaaacaggaucagcgcuuuacagaucuaaaaaaaaaaaaaaaaaaaaaaaaaaaaaaaaaaaaaaaaaaaaaaaaaaaaaaaaaaaaaaaaugcaucccccccccccccccccccccccccccccccaaaggcucuuuucagagccaccagaauu

SEQ ID NO: 295 - RNA, 2027 nt, Artificial Sequence
  mRNA product Design e-5 comprising derived and/or modified sequence from HRSV(A2)__F0 (opt1)
gggagagcggcucggccauuuugucccagucaguccggaggcugcggcugcagaaguaccgccugcggaguaacugcaaagaagcuuaccauggagcugcucauccugaaggccaacgccaucaccaccauccugacggcggugaccuucugcuucgccagcggccagaacaucaccgaggaguucuaccaguccaccugcagcgccgucuccaagggguaccucagcgcccugcggacgggcugguacaccuccgugaucaccaucgagcugagcaacaucaaggagaacaagugcaacgggaccgacgccaaggugaagcucaucaagcaggagcuggacaaguacaagaacgcggucacggagcugcagcuccugaugcaguccaccccggcaaccaacaaccgcgcccggcgcgagcugccccgguucaugaacuacacccucaacaacgccaagaagacgaacgugacccugagcaagaagcgcaagcggcgcuuccugggcuuccuccugggggugggcuccgccaucgcgagcggcgucgccguguccaaggugcugcaccucgagggggaggucaacaagaucaagagcgcccugcuguccaccaacaaggccguggugagccucuccaacggcgucagcgugcugaccuccaaggugcuggaccucaagaacuacaucgacaagcagcugcugcccaucgucaacaagcagagcugcuccaucagcaacaucgagacggugaucgaguuccagcagaagaacaaccggcuccuggagaucacccgcgaguucagcgugaacgccggggucaccacccccguguccacguacaugcugaccaacagcgagcuccugucccugaucaacgacaugccgaucaccaacgaccagaagaagcucaugagcaacaacgugcagaucguccggcagcaguccuacagcaucauguccaucaucaaggaggaggugcuggcguacgugguccagcugccccucuacggcgugaucgacacccccugcuggaagcugcacacgagcccccugugcaccaccaacaccaaggagggguccaacaucugccucacgcgcaccgaccggggcugguacugcgacaacgccggcagcgucuccuucuucccgcaggccgagaccugcaaggugcagagcaaccgcguguucugcgacaccaugaacucccugacgcugcccagcgagguaaaccucugcaacgucgacaucuucaaccccaaguacgacugcaagaucaugaccuccaagaccgacgugagcuccagcgugaucaccucccugggggccaucgucagcugcuacggcaagacgaagugcaccgccagcaacaagaaccgggggaucaucaagaccuucuccaacggcugcgacuacgugagcaacaagggcguggacaccguguccgucgggaacacccuguacuacgugaacaagcaggagggcaagagccucuacgugaagggggagcccaucaucaacuucuacgacccgcuggucuuccccuccgacgaguucgacgcgagcaucucccaggugaacgagaagaucaaccagagccuggccuucauccgcaaguccgacgagcugcuccacaacgugaacgccggcaagagcacgaccaacaucaugaucaccaccaucaucaucgucaucaucgugauccugcugucccucaucgccguggggcugcugcucuacugcaaggcccggagcacgcccgucacccuguccaaggaccagcugagcggcaucaacaacaucgcguucuccaacugaggacuaguguccaccugucccuccugggcugcuggauugucucguuuuccugccaaauaaacaggaucagcgcuuuacagaucuaaaaaaaaaaaaaaaaaaaaaaaaaaaaaaaaaaaaaaaaaaaaaaaaaaaaaaaaaaaaaaaaugcaucccccccccccccccccccccccccccccccaaaggcucuuuucagagccaccagaauu

SEQ ID NO: 296 - RNA, 2027 nt, Artificial Sequence
  mRNA product Design e-5 comprising derived and/or modified sequence from HRSV(A2)__F0 (opt1)
gggagagcggcucggccauuuugucccagucaguccggaggcugcggcugcagaaguaccgccugcggaguaacugcaaagaagcuuaccauggagcugcucauccugaaggccaacgccaucaccaccauccugacggcggugaccuucugcuucgccagcggccagaacaucaccgaggaguucuaccaguccacgugcagcgccgucuccaagggguaccucagcgcccugcgcaccggcugguacaccuccgugaucaccaucgagcugagcaacaucaaggagaacaagugcaacgggaccgacgccaaggugaagcucaucaagcaggagcuggacaaguacaagaacgcggucacggagcugcagcuccugaugcaguccacccccgccaccaacaaccgggcccgccgggagcugccgcgcuucaugaacuacacccucaacaacgccaagaagacgaacgugacccugagcaagaagcggaagcgccgguuccugggcuuccuccugggggugggcuccgcgaucgccagcggcgucgccguguccaaggugcugcaccucgagggggaggucaacaagaucaagagcgcccugcuguccaccaacaaggccguggugagccucuccaacggcgucagcgugcugaccuccaaggugcuggaccucaagaacuacaucgacaagcagcugcugcccaucgucaacaagcagagcugcuccaucagcaacaucgagacggugaucgaguuccagcagaagaacaaccgccuccuggagaucacccgggaguucagcgugaacgcgggggucaccacccccguguccacguacaugcugaccaacagcgagcuccugucccugaucaacgacaugcccaucaccaacgaccagaagaagcucaugagcaacaacgugcagaucguccgccagcaguccuacagcaucauguccaucaucaaggaggaggugcuggccuacgugguccagcugccgcucuacggcgugaucgacacccccugcuggaagcugcacacgagcccccugugcaccaccaacaccaaggagggguccaacaucugccucacgcggaccgaccgcggcugguacugcgacaacgccggcagcgucuccuucuucccccaggccgagaccugcaaggugcagagcaaccggguguucugcgacaccaugaacucccugacgcugccgagcgaggucaaccucugcaacguggacaucuucaaccccaaguacgacugcaagaucaugaccuccaagaccgacgugagcuccagcgucaucaccucccugggggccaucgugagcugcuacggcaagacgaagugcaccgcgagcaacaagaaccgcgggaucaucaagaccuucuccaacggcugcgacuacgugagcaacaagggcgucgacaccguguccguggggaacacccuguacuacgucaacaagcaggagggcaagagccucuacgugaagggggagcccaucaucaacuucuacgacccccugguguucccguccgacgaguucgacgccagcaucucccaggucaacgagaagaucaaccagagccuggccuucauccggaaguccgacgagcuccugcacaacgugaacgccggcaagagcacgaccaacaucaugaucaccaccaucaucaucgugaucaucgucauccugcugucccucaucgccguggggcugcugcucuacugcaaggcgcgcagcacgcccgugacccuguccaaggaccagcugagcggcaucaacaacaucgccuucuccaacugaggacuaguguccaccugucccuccugggcugcuggauugucucguuuuccugccaaauaaacaggaucagcgcuuuacagaucuaaaaaaaaaaaaaaaaaaaaaaaaaaaaaaaaaaaaaaaaaaaaaaaaaaaaaaaaaaaaaaaaugcaucccccccccccccccccccccccccccccccaaaggcucuuuucagagccaccagaauu

SEQ ID NO: 297 - RNA, 2027 nt, Artificial Sequence
  mRNA product Design e-5 comprising derived and/or modified sequence from HRSV(A2)__F0 (opt2)
gggagagcggcucggccauuuugucccagucaguccggaggcugcggcugcagaaguaccgccugcggaguaacugcaaagaagcuuaccauggagcuccucauccucaaggccaacgccaucaccaccauccucaccgccgucaccuucugcuucgccuccggccagaacaucaccgaggaguucuaccaguccaccugcuccgccgucuccaagggcuaccucuccgcccuccgcaccggcugguacaccuccgucaucaccaucgagcucuccaacaucaaggagaacaagugcaacggcaccgacgccaaggucaagcucaucaagcaggagcucgacaaguacaagaacgccgucaccgagcuccagcuccucaugcaguccacccccgccaccaacaaccgcgcccgccgcgagcucccccgcuucaugaacuacacccucaacaacgccaagaagaccaacgucacccucuccaagaagcgcaagcgccgcuuccucggcuuccuccucggcgucggcuccgccaucgccuccggcgucgccgucuccaagguccuccaccucgagggcgaggucaacaagaucaaguccgcccuccucuccaccaacaaggccgucgucucccucuccaacggcgucuccguccucaccuccaagguccucgaccucaagaacuacaucgacaagcagcuccuccccaucgucaacaagcaguccugcuccaucuccaacaucgagaccgucaucgaguuccagcagaagaacaaccgccuccucgagaucacccgcgaguucuccgucaacgccggcgucaccacccccgucuccaccuacaugcucaccaacuccgagcuccucucccucaucaacgacaugcccaucaccaacgaccagaagaagcucauguccaacaacguccagaucguccgccagcaguccuacuccaucauguccaucaucaaggaggagguccucgccuacgucguccagcucccccucuacggcgucaucgacacccccugcuggaagcuccacaccuccccccucugcaccaccaacaccaaggagggcuccaacaucugccucacccgcaccgaccgcggcugguacugcgacaacgccggcuccgucuccuucuucccccaggccgagaccugcaagguccaguccaaccgcgucuucugcgacaccaugaacucccucacccuccccuccgaggucaaccucugcaacgucgacaucuucaaccccaaguacgacugcaagaucaugaccuccaagaccgacgucuccuccuccgucaucaccucccucggcgccaucgucuccugcuacggcaagaccaagugcaccgccuccaacaagaaccgcggcaucaucaagaccuucuccaacggcugcgacuacgucuccaacaagggcgucgacaccgucuccgucggcaacacccucuacuacgucaacaagcaggagggcaagucccucuacgucaagggcgagcccaucaucaacuucuacgacccccucgucuuccccuccgacgaguucgacgccuccaucucccaggucaacgagaagaucaaccagucccucgccuucauccgcaaguccgacgagcuccuccacaacgucaacgccggcaaguccaccaccaacaucaugaucaccaccaucaucaucgucaucaucgucauccuccucucccucaucgccgucggccuccuccucuacugcaaggcccgcuccacccccgucacccucuccaaggaccagcucuccggcaucaacaacaucgccuucuccaacugaggacuaguguccaccugucccuccugggcugcuggauugucucguuuuccugccaaauaaacaggaucagcgcuuuacagaucuaaaaaaaaaaaaaaaaaaaaaaaaaaaaaaaaaaaaaaaaaaaaaaaaaaaaaaaaaaaaaaaaugcaucccccccccccccccccccccccccccccccaaaggcucuuuucagagccaccagaauu

SEQ ID NO: 298 - RNA, 2027 nt, Artificial Sequence
  mRNA product Design e-5 comprising derived and/or modified sequence from HRSV(A2)__F0 (opt3)
gggagagcggcucggccauuuugucccagucaguccggaggcugcggcugcagaaguaccgccugcggaguaacugcaaagaagcuuaccauggagcugcucauccuuaaggccaacgcuauuaccacaauacugacugcagugacguucugcuuugccagcggccagaauaucaccgaagaguucuaccaauccacauguucugcggucucaaaaggguauuugagugcuuuaagaacuggaugguacaccagcguuauuacaaucgaacuguccaacauuaaggagaauaaaugcaacgguaccgacgccaaggugaaacuaaucaagcaggaacucgauaaguauaaaaaugcaguaacugagcugcagcuucugaugcagucuacacccgccaccaacaauagggcucggcgcgaguugccucgauuuaugaacuacacgcucaauaacgcaaagaaaacuaaugugacccugucgaagaaacguaagagaagguuccugggcuuucucuuaggggucggaucagccauagcuagcggcguggccguuaguaaggugcugcaccuugaaggugaggucaacaaaaucaaguccgcguugcugucuacaaauaaagcagugguaagccuauccaacgggguuucagugcucacuucuaagguccuggaccuuaaaaauuauauugauaagcaacuguugccaaucgugaacaaacagagcuguucuauuuccaacaucgaaaccgugauagaguuccagcagaagaauaaccggcuccuggagauuacacgcgaauuuucagucaaugccggaguuaccacgccggugagcacuuacauguuaacaaacagugagcugcucucucuuaucaaugacaugcccauuaccaacgaucaaaagaaacugauguccaauaacguacagaucgugagacagcagagcuauucgaucaugucuauuauaaaggaagaggucuuggcuuacgugguucaacuaccucuguacggcgugaucgacacuccaugcuggaaacuccauacauccccacuguguaccacgaauaccaaggaaggcucaaacauuugccuuacaaggacugaucgggggugguauugugacaaugccggaagugucagcuucuuuccucaggcagagaccugcaaagugcaguccaaccgcguauucugugauacaaugaauagucugacuuugccaagcgagguuaaccucugcaauguggacaucuuuaaccccaaguacgauuguaagauaaugaccucaaaaacagacgucaguuccagcgugauuaccucucugggugcuaucgucucaugcuauggcaagacuaaaugcacggccaguaacaagaaucgagggaucauuaaaacauucagcaacggaugugauuacguguccaauaagggcguugacaccgugucuguagguaacacuuuauauuacgucaauaagcaagaagggaaaucgcuguaugugaagggagagccuaucauuaacuuuuacgacccccuaguuuucccgagcgaugaauuugacgcguccauaucacaggugaaugagaaaaucaaccagagucucgccuucauuagaaagucugaugaacugcuucacaaugucaacgcaggcaaaagcaccacaaauaucaugaucaccacuauuauaaucgugauuaucguaauuuugcugucccucaucgcugugggccugcuucuguacugcaaggccaggucaacacccguuacguugagcaaggaccagcucucugggauaaacaauaucgcuuucuccaacugaggacuaguguccaccugucccuccugggcugcuggauugucucguuuuccugccaaauaaacaggaucagcgcuuuacagaucuaaaaaaaaaaaaaaaaaaaaaaaaaaaaaaaaaaaaaaaaaaaaaaaaaaaaaaaaaaaaaaaaugcaucccccccccccccccccccccccccccccccaaaggcucuuuucagagccaccagaauu

SEQ ID NO: 299 - RNA, 2027 nt, Artificial Sequence
  mRNA product Design e-5 comprising derived and/or modified sequence from HRSV(A2)__F0 (opt4)
gggagagcggcucggccauuuugucccagucaguccggaggcugcggcugcagaaguaccgccugcggaguaacugcaaagaagcuuaccauggagcugcugauccugaaggccaacgccaucaccaccauccugaccgccgugaccuucugcuucgccagcggccagaacaucaccgaggaguucuaccagagcaccugcagcgccgugagcaagggcuaccugagcgcccugagaaccggcugguacaccagcgugaucaccaucgagcugagcaacaucaaggagaacaagugcaacggcaccgacgccaaggugaagcugaucaagcaggagcuggacaaguacaagaacgccgugaccgagcugcagcugcugaugcagagcacccccgccaccaacaacagagccagaagagagcugcccagauucaugaacuacacccugaacaacgccaagaagaccaacgugacccugagcaagaagagaaagagaagauuccugggcuuccugcugggcgugggcagcgccaucgccagcggcguggccgugagcaaggugcugcaccuggagggcgaggugaacaagaucaagagcgcccugcugagcaccaacaaggccguggugagccugagcaacggcgugagcgugcugaccagcaaggugcuggaccugaagaacuacaucgacaagcagcugcugcccaucgugaacaagcagagcugcagcaucagcaacaucgagaccgugaucgaguuccagcagaagaacaacagacugcuggagaucaccagagaguucagcgugaacgccggcgugaccacccccgugagcaccuacaugcugaccaacagcgagcugcugagccugaucaacgacaugcccaucaccaacgaccagaagaagcugaugagcaacaacgugcagaucgugagacagcagagcuacagcaucaugagcaucaucaaggaggaggugcuggccuacguggugcagcugccccuguacggcgugaucgacacccccugcuggaagcugcacaccagcccccugugcaccaccaacaccaaggagggcagcaacaucugccugaccagaaccgacagaggcugguacugcgacaacgccggcagcgugagcuucuucccccaggccgagaccugcaaggugcagagcaacagaguguucugcgacaccaugaacagccugacccugcccagcgaggugaaccugugcaacguggacaucuucaaccccaaguacgacugcaagaucaugaccagcaagaccgacgugagcagcagcgugaucaccagccugggcgccaucgugagcugcuacggcaagaccaagugcaccgccagcaacaagaacagaggcaucaucaagaccuucagcaacggcugcgacuacgugagcaacaagggcguggacaccgugagcgugggcaacacccuguacuacgugaacaagcaggagggcaagagccuguacgugaagggcgagcccaucaucaacuucuacgacccccugguguuccccagcgacgaguucgacgccagcaucagccaggugaacgagaagaucaaccagagccuggccuucaucagaaagagcgacgagcugcugcacaacgugaacgccggcaagagcaccaccaacaucaugaucaccaccaucaucaucgugaucaucgugauccugcugagccugaucgccgugggccugcugcuguacugcaaggccagaagcacccccgugacccugagcaaggaccagcugagcggcaucaacaacaucgccuucagcaacugaggacuaguguccaccugucccuccugggcugcuggauugucucguuuuccugccaaauaaacaggaucagcgcuuuacagaucuaaaaaaaaaaaaaaaaaaaaaaaaaaaaaaaaaaaaaaaaaaaaaaaaaaaaaaaaaaaaaaaaugcaucccccccccccccccccccccccccccccccaaaggcucuuuucagagccaccagaauu

SEQ ID NO: 300 - RNA, 2027 nt, Artificial Sequence
  mRNA product Design e-5 comprising derived and/or modified sequence from HRSV(A2)__F0 (opt5)
gggagagcggcucggccauuuugucccagucaguccggaggcugcggcugcagaaguaccgccugcggaguaacugcaaagaagcuuaccauggagcugcucauccugaaggccaacgcuauuaccacaauccuuacggccgugaccuucugcuuugcgagcggccagaauauuacagaagaguucuaccaauccaccuguucugcugucagcaaaggguaucuguccgcccucagaacaggaugguacaccucuguuaucacaauugaacugagcaacaucaaggagaauaaaugcaacggcaccgacgccaaggugaaacuuaucaagcaggaacuggauaaguauaaaaaugcugugacggagcuccagcugcugaugcaguccacccccgccacaaacaaucgggcucgcagagagcucccucgguuuaugaacuacacccugaauaacgccaagaaaacaaaugucacccuuucuaagaaacgcaagagacgguuccugggguuucuccugggagugggcagcgcgauugccuccgggguugcugugagcaagguccuucaccuggaaggagaggugaacaaaaucaagucugcccuccuguccacgaauaaagcuguugugagccugucuaacggcgucuccgugcucacaagcaaggugcuggaccuuaaaaauuauauugauaagcaacugcucccgaucgucaacaaacagucuuguuccauuagcaacaucgaaaccguuauugaguuccagcagaagaauaaccgccugcuugagaucacaagagaauuuuccgugaaugccggcgugaccacccccgucucuacauacaugcugacgaacagcgagcuccugucccugaucaaugacaugccuauuaccaacgaucaaaagaaacucaugagcaauaacgugcagaucguucggcagcagucuuauuccauuaugagcaucauuaaggaagaggugcuggcguacgucgugcaacuuccccuguacgggguuaucgacacaccuugcuggaaacuccauaccucuccccuguguacaaccaauacgaaggaaggaagcaacaucugccuuacacgcaccgauagaggcugguauugugacaaugccggguccgugucuuucuuuccucaggcugagaccugcaaaguccagagcaaccggguguucugugauacaaugaacucccugacccucccgagcgaggucaaucugugcaauguggacauuuuuaaccccaaguacgauuguaagaucaugacaucuaaaacggacguuuccagcucugugauuaccucccugggagccaucgucagcugcuauggcaagacaaaaugcaccgcuuccaacaagaaucgcgggauuaucaaaacauucucuaacggaugugauuacgugagcaauaagggcguugacaccguguccgucggcaacacgcucuauuacgugaauaagcaagaagggaaaucucuguaugugaagggagagccuaucauuaacuuuuacgacccccuuguuuucccuagcgaugaauuugacgccuccaucagccaggucaaugagaaaauuaaccagucucuggccuucaucagaaaguccgaugaacuccugcacaaugugaacgcuggcaaaagcaccacaaauauuaugaucaccacaauuaucaucgugauuaucgucauucugcuuucucucaucgcgguggggcugcugcucuacugcaaggcccgguccacccccguuacgcugagcaaggaccagcuuucuggaauuaacaauaucgcuuucagcaacugaggacuaguguccaccugucccuccugggcugcuggauugucucguuuuccugccaaauaaacaggaucagcgcuuuacagaucuaaaaaaaaaaaaaaaaaaaaaaaaaaaaaaaaaaaaaaaaaaaaaaaaaaaaaaaaaaaaaaaaugcaucccccccccccccccccccccccccccccccaaaggcucuuuucagagccaccagaauu

SEQ ID NO: 301 - RNA, 2027 nt, Artificial Sequence
  mRNA product Design e-5 comprising derived and/or modified sequence from HRSV(A2)__F0 (opt6)
gggagagcggcucggccauuuugucccagucaguccggaggcugcggcugcagaaguaccgccugcggaguaacugcaaagaagcuuaccauggaacuucuaauauuaaaagcuaacgcaaucacuacuaucuuaaccgcaguaacauucuguuuugcauccggccaaaacauaacagaagaauuuuaccaaucaacuugcucugcagucucaaaagguuaucuaucugcauuaagaacaggcugguacaccucaguaauaacgaucgaacuaucaaacaucaaagaaaacaaauguaauggaacagacgcaaaaguaaaacuaaucaaacaagaacuagacaaauacaaaaacgcaguaaccgaacuccaacuccucaugcaaaguacaccagcaacaaauaacagagcaagacgugaacuaccacguuuuaugaauuacacgcucaauaacgcaaaaaaaacaaauguuacccuaucaaaaaaacgaaaaagaagauuccucggauuccuacuaggcguaggcucagcaauagcuucaggaguagcaguaucaaaaguacuccaccucgaaggagaaguaaacaaaaucaaaagcgcucuccucucaacaaacaaagcaguuguuucacucucaaacggaguaucaguacuaaccucaaaaguacuugaccuaaaaaauuauauagacaaacaacuauuaccaauaguaaacaaacaaagcugcuccaucuccaacaucgagacagucauagaauuucaacaaaaaaauaaccgccuauuagaaauaaccagagaauuuucaguaaacgcaggaguaacuaccccaguaucaacauauauguuaacaaacucagaacuccuaagucuaaucaacgacaugccaauaaccaacgaccaaaaaaaacuaaugagcaacaauguacaaauaguucgucaacaaucuuacuccauaaugucuauaauaaaagaagaaguacucgccuauguaguccaacuaccacuauacggagucaucgauacaccaugcuggaaacuccacacauccccacucuguacuacuaacaccaaagaagguucaaauauaugccuaaccagaacagauagagguugguacugcgauaaugcaggaucaguauccuuuuucccccaagccgaaacaugcaaaguucaauccaauagaguauuuugugauacaaugaacucuuuaacccucccauccgaagucaaucuauguaacgucgacauauuuaacccaaaauacgauugcaaaauaaugacaucaaaaacagacgucucauccucaguuauaacguccuuaggcgcuauaguaucaugcuacggcaaaacaaaauguacagcaucaaacaaaaacagaggaaucauaaaaacuuucucuaacgguugcgacuauguauccaacaaaggugucgacacaguauccguaggcaacacccuuuacuauguuaauaaacaagaaggaaaaucucuauauguaaaaggcgaaccaauuauaaauuuuuacgacccccuugucuuucccucugacgaauuugacgcuuccauaucacaagucaacgaaaaaaucaaccaaucccucgcauucauacgcaaaucagacgaacuacuacauaacgucaacgcaggcaaauccacaacaaacauaaugauaaccacaaucauaauuguaauaauaguaauacuacuuucucuaauagcagucggauuacucuuauacuguaaagcucgaucaacaccagucacccucucuaaagaucaacuauccggaaucaacaacauagcuuucucaaacuaaggacuaguguccaccugucccuccugggcugcuggauugucucguuuuccugccaaauaaacaggaucagcgcuuuacagaucuaaaaaaaaaaaaaaaaaaaaaaaaaaaaaaaaaaaaaaaaaaaaaaaaaaaaaaaaaaaaaaaaugcaucccccccccccccccccccccccccccccccaaaggcucuuuucagagccaccagaauu

SEQ ID NO: 302 - RNA, 2027 nt, Artificial Sequence
  mRNA product Design e-5 comprising derived and/or modified sequence from HRSV(A2)__F0 (opt11)
gggagagcggcucggccauuuugucccagucaguccggaggcugcggcugcagaaguaccgccugcggaguaacugcaaagaagcuuaccauggaacuccucauacucaaagccaacgcaaucacaaccauacucaccgccgucaccuucugcuuugcaucuggccagaacaucacugaagaguucuaccaauccacaugcuccgccguaagcaaaggcuaccuauccgcccuacgcaccggcugguacaccagcguaaucaccauagaacucuccaauauaaaagaaaacaaaugcaacggcaccgacgcaaaagucaagcuaauaaaacaagaacucgacaaauacaaaaacgccguuaccgaacuccagcuacucaugcaaucgaccccagcaaccaacaaccgugcgagacgcgaacucccccgcuucaugaacuacacccuaaacaacgccaaaaagaccaacguaacucuauccaagaaacgcaaacgccgcuuccucggauuccuccucggcgucggcuccgcaaucgccagcggcgucgccguuagcaaaguccuucaccucgaaggagaaguaaacaaaauuaaaagcgcccucuuauccacaaacaaggccguaguaucccugucaaacggcgucuccguccuuacauccaaaguccucgaccucaagaacuacauagacaaacagcuacuacccauuguaaauaaacaaagcugcucaauuagcaacaucgaaaccguaaucgaguuccagcagaaaaacaacagacuucucgaaaucacccgcgaguucagcgucaacgccggcguaaccaccccugucucaacauacaugcuaaccaacagcgaacugcucucccucaucaacgacaugcccaucaccaacgaccaaaagaaacucaugagcaacaacguacaaaucgugcgccaacaguccuacucaauaaugucaaucaucaaagaagaagugcuagcauacgucguacaacuaccacucuacggcguaauagauacccccugcuggaagcuccauaccuccccacucuguaccaccaacaccaaagaaggcucaaacaucugccuaacgcgcacagaccguggaugguacugugacaacgccggcuccgucuccuucuucccucaagccgaaacaugcaaaguccaauccaacagagucuucugcgauaccaugaacucccugacacucccaagcgaagucaaccuuugcaacgucgauaucuuuaaccccaaauacgacugcaagaucaugacaucaaaaaccgacguauccuccucuguaauaaccucccuaggcgcaaucguaucaugcuacggcaaaaccaaauguaccgccuccaacaaaaaucgcggcaucaucaaaaccuucucgaacggcugcgacuacgucuccaacaaaggcguagacacaguuuccguaggcaacacccucuacuacgucaauaaacaggaaggcaagucccucuacgucaaaggcgaacccaucaucaauuucuacgacccccucguuuuccccuccgaugaguucgacgcaagcaucagccaggucaacgaaaagauaaaccagucccucgccuucauccgcaaaucagaugaacuccuucacaacguuaacgcaggcaagagcaccaccaacaucaugaucacaacuauaaucaucgucauaaucgucauccuacucucacuaaucgccgucggucuccuacuauauuguaaagcccgaucaacaccggucacacucuccaaagaccaacucuccggaaucaacaauaucgcuuucucgaacuaaggacuaguguccaccugucccuccugggcugcuggauugucucguuuuccugccaaauaaacaggaucagcgcuuuacagaucuaaaaaaaaaaaaaaaaaaaaaaaaaaaaaaaaaaaaaaaaaaaaaaaaaaaaaaaaaaaaaaaaugcaucccccccccccccccccccccccccccccccaaaggcucuuuucagagccaccagaauu

SEQ ID NO: 303 - RNA, 2094 nt, Artificial Sequence
  mRNA product Design e-6 comprising derived and/or modified sequence from HRSV(A2)__F0 (artificial)
gggagagcggcucggccauuuugucccagucaguccggaggcugcggcugcagaaguaccgccugcggaguaacugcaaagaagcuuaccauggaguugcuaauccucaaagcaaaugcaauuaccacaauccucacugcagucacauuuuguuuugcuucuggucaaaacaucacugaagaauuuuaucaaucaacaugcagugcaguuagcaaaggcuaucuuagugcucugagaacugguugguauaccaguguuauaacuauagaauuaaguaauaucaaggaaaauaaguguaauggaacagaugcuaagguaaaauugauaaaacaagaauuagauaaauauaaaaaugcuguaacagaauugcaguugcucaugcaaagcacaccagcaacaaacaaucgagccagaagagaacuaccaagguuuaugaauuauacacucaacaaugccaaaaaaaccaauguaacauuaagcaagaaaaggaaaagaagauuucuugguuuuuuguuagguguuggaucugcaaucgccaguggcguugcuguaucuaagguccugcaccuagaaggggaagugaacaagaucaaaagugcucuacuauccacaaacaaggcuguagucagcuuaucaaauggaguuagugucuuaaccagcaaaguguuagaccucaaaaacuauauagauaaacaauuguuaccuauugugaacaagcaaagcugcagcauaucaaauauagaaacugugauagaguuccaacaaaagaacaacagacuacuagagauuaccagggaauuuaguguuaaugcagguguaacuacaccuguaagcacuuacauguuaacuaauagugaauuauugucauuaaucaaugauaugccuauaacaaaugaucagaaaaaguuaauguccaacaauguucaaauaguuagacagcaaaguuacucuaucauguccauaauaaaagaggaagucuuagcauauguaguacaauuaccacuauaugguguuauagauacacccuguuggaaacuacacacauccccucuauguacaaccaacacaaaagaaggguccaacaucuguuuaacaagaacugacagaggaugguacugugacaaugcaggaucaguaucuuucuucccacaagcugaaacauguaaaguucaaucaaaucgaguauuuugugacacaaugaacaguuuaacauuaccaagugaaguaaaucucugcaauguugacauauucaaccccaaauaugauuguaaaauuaugacuucaaaaacagauguaagcagcuccguuaucacaucucuaggagccauugugucaugcuauggcaaaacuaaauguacagcauccaauaaaaaucguggaaucauaaagacauuuucuaacgggugcgauuauguaucaaauaaagggguggacacugugucuguagguaacacauuauauuauguaaauaagcaagaagguaaaagucucuauguaaaaggugaaccaauaauaaauuucuaugacccauuaguauuccccucugaugaauuugaugcaucaauaucucaagucaacgagaagauuaaccagagccuagcauuuauucguaaauccgaugaauuauuacauaauguaaaugcugguaaauccaccacaaauaucaugauaacuacuauaauuauagugauuauaguaauauuguuaucauuaauugcuguuggacugcucuuauacuguaaggccagaagcacaccagucacacuaagcaaagaucaacugagugguauaaauaauauugcauuuaguaacuaaggacuaguacuggcugcaucucccuuuccucuguccuccauccuucucccaggauggugaagggggaccugguacccagugauccccaccccaggauccuaaaucaugacuuaccugcuaauaaaaacucauuggaaaagugagaagaucuaaaaaaaaaaaaaaaaaaaaaaaaaaaaaaaaaaaaaaaaaaaaaaaaaaaaaaaaaaaaaaaaugcaucccccccccccccccccccccccccccccccaaaggcucuuuucagagccaccagaauu

SEQ ID NO: 304 - RNA, 2094 nt, Artificial Sequence
  mRNA product Design e-6 comprising derived and/or modified sequence from HRSV(A2)__F0 (opt1)
gggagagcggcucggccauuuugucccagucaguccggaggcugcggcugcagaaguaccgccugcggaguaacugcaaagaagcuuaccauggagcugcucauccugaaggccaacgccaucaccaccauccugacggcggugaccuucugcuucgccagcggccagaacaucaccgaggaguucuaccaguccaccugcagcgccgucuccaagggguaccucagcgcccugcggacgggcugguacaccuccgugaucaccaucgagcugagcaacaucaaggagaacaagugcaacgggaccgacgccaaggugaagcucaucaagcaggagcuggacaaguacaagaacgcggucacggagcugcagcuccugaugcaguccaccccggcaaccaacaaccgcgcccggcgcgagcugccccgguucaugaacuacacccucaacaacgccaagaagacgaacgugacccugagcaagaagcgcaagcggcgcuuccugggcuuccuccugggggugggcuccgccaucgcgagcggcgucgccguguccaaggugcugcaccucgagggggaggucaacaagaucaagagcgcccugcuguccaccaacaaggccguggugagccucuccaacggcgucagcgugcugaccuccaaggugcuggaccucaagaacuacaucgacaagcagcugcugcccaucgucaacaagcagagcugcuccaucagcaacaucgagacggugaucgaguuccagcagaagaacaaccggcuccuggagaucacccgcgaguucagcgugaacgccggggucaccacccccguguccacguacaugcugaccaacagcgagcuccugucccugaucaacgacaugccgaucaccaacgaccagaagaagcucaugagcaacaacgugcagaucguccggcagcaguccuacagcaucauguccaucaucaaggaggaggugcuggcguacgugguccagcugccccucuacggcgugaucgacacccccugcuggaagcugcacacgagcccccugugcaccaccaacaccaaggagggguccaacaucugccucacgcgcaccgaccggggcugguacugcgacaacgccggcagcgucuccuucuucccgcaggccgagaccugcaaggugcagagcaaccgcguguucugcgacaccaugaacucccugacgcugcccagcgagguaaaccucugcaacgucgacaucuucaaccccaaguacgacugcaagaucaugaccuccaagaccgacgugagcuccagcgugaucaccucccugggggccaucgucagcugcuacggcaagacgaagugcaccgccagcaacaagaaccgggggaucaucaagaccuucuccaacggcugcgacuacgugagcaacaagggcguggacaccguguccgucgggaacacccuguacuacgugaacaagcaggagggcaagagccucuacgugaagggggagcccaucaucaacuucuacgacccgcuggucuuccccuccgacgaguucgacgcgagcaucucccaggugaacgagaagaucaaccagagccuggccuucauccgcaaguccgacgagcugcuccacaacgugaacgccggcaagagcacgaccaacaucaugaucaccaccaucaucaucgucaucaucgugauccugcugucccucaucgccguggggcugcugcucuacugcaaggcccggagcacgcccgucacccuguccaaggaccagcugagcggcaucaacaacaucgcguucuccaacugaggacuaguacuggcugcaucucccuuuccucuguccuccauccuucucccaggauggugaagggggaccugguacccagugauccccaccccaggauccuaaaucaugacuuaccugcuaauaaaaacucauuggaaaagugagaagaucuaaaaaaaaaaaaaaaaaaaaaaaaaaaaaaaaaaaaaaaaaaaaaaaaaaaaaaaaaaaaaaaaugcaucccccccccccccccccccccccccccccccaaaggcucuuuucagagccaccagaauu

SEQ ID NO: 305 - RNA, 2094 nt, Artificial Sequence
  mRNA product Design e-6 comprising derived and/or modified sequence from HRSV(A2)__F0 (opt1)
gggagagcggcucggccauuuugucccagucaguccggaggcugcggcugcagaaguaccgccugcggaguaacugcaaagaagcuuaccauggagcugcucauccugaaggccaacgccaucaccaccauccugacggcggugaccuucugcuucgccagcggccagaacaucaccgaggaguucuaccaguccacgugcagcgccgucuccaagggguaccucagcgcccugcgcaccggcugguacaccuccgugaucaccaucgagcugagcaacaucaaggagaacaagugcaacgggaccgacgccaaggugaagcucaucaagcaggagcuggacaaguacaagaacgcggucacggagcugcagcuccugaugcaguccacccccgccaccaacaaccgggcccgccgggagcugccgcgcuucaugaacuacacccucaacaacgccaagaagacgaacgugacccugagcaagaagcggaagcgccgguuccugggcuuccuccugggggugggcuccgcgaucgccagcggcgucgccguguccaaggugcugcaccucgagggggaggucaacaagaucaagagcgcccugcuguccaccaacaaggccguggugagccucuccaacggcgucagcgugcugaccuccaaggugcuggaccucaagaacuacaucgacaagcagcugcugcccaucgucaacaagcagagcugcuccaucagcaacaucgagacggugaucgaguuccagcagaagaacaaccgccuccuggagaucacccgggaguucagcgugaacgcgggggucaccacccccguguccacguacaugcugaccaacagcgagcuccugucccugaucaacgacaugcccaucaccaacgaccagaagaagcucaugagcaacaacgugcagaucguccgccagcaguccuacagcaucauguccaucaucaaggaggaggugcuggccuacgugguccagcugccgcucuacggcgugaucgacacccccugcuggaagcugcacacgagcccccugugcaccaccaacaccaaggagggguccaacaucugccucacgcggaccgaccgcggcugguacugcgacaacgccggcagcgucuccuucuucccccaggccgagaccugcaaggugcagagcaaccggguguucugcgacaccaugaacucccugacgcugccgagcgaggucaaccucugcaacguggacaucuucaaccccaaguacgacugcaagaucaugaccuccaagaccgacgugagcuccagcgucaucaccucccugggggccaucgugagcugcuacggcaagacgaagugcaccgcgagcaacaagaaccgcgggaucaucaagaccuucuccaacggcugcgacuacgugagcaacaagggcgucgacaccguguccguggggaacacccuguacuacgucaacaagcaggagggcaagagccucuacgugaagggggagcccaucaucaacuucuacgacccccugguguucccguccgacgaguucgacgccagcaucucccaggucaacgagaagaucaaccagagccuggccuucauccggaaguccgacgagcuccugcacaacgugaacgccggcaagagcacgaccaacaucaugaucaccaccaucaucaucgugaucaucgucauccugcugucccucaucgccguggggcugcugcucuacugcaaggcgcgcagcacgcccgugacccuguccaaggaccagcugagcggcaucaacaacaucgccuucuccaacugaggacuaguacuggcugcaucucccuuuccucuguccuccauccuucucccaggauggugaagggggaccugguacccagugauccccaccccaggauccuaaaucaugacuuaccugcuaauaaaaacucauuggaaaagugagaagaucuaaaaaaaaaaaaaaaaaaaaaaaaaaaaaaaaaaaaaaaaaaaaaaaaaaaaaaaaaaaaaaaaugcaucccccccccccccccccccccccccccccccaaaggcucuuuucagagccaccagaauu

SEQ ID NO: 306 - RNA, 2094 nt, Artificial Sequence
  mRNA product Design e-6 comprising derived and/or modified sequence from HRSV(A2)__F0 (opt2)
gggagagcggcucggccauuuugucccagucaguccggaggcugcggcugcagaaguaccgccugcggaguaacugcaaagaagcuuaccauggagcuccucauccucaaggccaacgccaucaccaccauccucaccgccgucaccuucugcuucgccuccggccagaacaucaccgaggaguucuaccaguccaccugcuccgccgucuccaagggcuaccucuccgcccuccgcaccggcugguacaccuccgucaucaccaucgagcucuccaacaucaaggagaacaagugcaacggcaccgacgccaaggucaagcucaucaagcaggagcucgacaaguacaagaacgccgucaccgagcuccagcuccucaugcaguccacccccgccaccaacaaccgcgcccgccgcgagcucccccgcuucaugaacuacacccucaacaacgccaagaagaccaacgucacccucuccaagaagcgcaagcgccgcuuccucggcuuccuccucggcgucggcuccgccaucgccuccggcgucgccgucuccaagguccuccaccucgagggcgaggucaacaagaucaaguccgcccuccucuccaccaacaaggccgucgucucccucuccaacggcgucuccguccucaccuccaagguccucgaccucaagaacuacaucgacaagcagcuccuccccaucgucaacaagcaguccugcuccaucuccaacaucgagaccgucaucgaguuccagcagaagaacaaccgccuccucgagaucacccgcgaguucuccgucaacgccggcgucaccacccccgucuccaccuacaugcucaccaacuccgagcuccucucccucaucaacgacaugcccaucaccaacgaccagaagaagcucauguccaacaacguccagaucguccgccagcaguccuacuccaucauguccaucaucaaggaggagguccucgccuacgucguccagcucccccucuacggcgucaucgacacccccugcuggaagcuccacaccuccccccucugcaccaccaacaccaaggagggcuccaacaucugccucacccgcaccgaccgcggcugguacugcgacaacgccggcuccgucuccuucuucccccaggccgagaccugcaagguccaguccaaccgcgucuucugcgacaccaugaacucccucacccuccccuccgaggucaaccucugcaacgucgacaucuucaaccccaaguacgacugcaagaucaugaccuccaagaccgacgucuccuccuccgucaucaccucccucggcgccaucgucuccugcuacggcaagaccaagugcaccgccuccaacaagaaccgcggcaucaucaagaccuucuccaacggcugcgacuacgucuccaacaagggcgucgacaccgucuccgucggcaacacccucuacuacgucaacaagcaggagggcaagucccucuacgucaagggcgagcccaucaucaacuucuacgacccccucgucuuccccuccgacgaguucgacgccuccaucucccaggucaacgagaagaucaaccagucccucgccuucauccgcaaguccgacgagcuccuccacaacgucaacgccggcaaguccaccaccaacaucaugaucaccaccaucaucaucgucaucaucgucauccuccucucccucaucgccgucggccuccuccucuacugcaaggcccgcuccacccccgucacccucuccaaggaccagcucuccggcaucaacaacaucgccuucuccaacugaggacuaguacuggcugcaucucccuuuccucuguccuccauccuucucccaggauggugaagggggaccugguacccagugauccccaccccaggauccuaaaucaugacuuaccugcuaauaaaaacucauuggaaaagugagaagaucuaaaaaaaaaaaaaaaaaaaaaaaaaaaaaaaaaaaaaaaaaaaaaaaaaaaaaaaaaaaaaaaaugcaucccccccccccccccccccccccccccccccaaaggcucuuuucagagccaccagaauu

SEQ ID NO: 307 - RNA, 2094 nt, Artificial Sequence
  mRNA product Design e-6 comprising derived and/or modified sequence from HRSV(A2)__F0 (opt3)
gggagagcggcucggccauuuugucccagucaguccggaggcugcggcugcagaaguaccgccugcggaguaacugcaaagaagcuuaccauggagcugcucauccuuaaggccaacgcuauuaccacaauacugacugcagugacguucugcuuugccagcggccagaauaucaccgaagaguucuaccaauccacauguucugcggucucaaaaggguauuugagugcuuuaagaacuggaugguacaccagcguuauuacaaucgaacuguccaacauuaaggagaauaaaugcaacgguaccgacgccaaggugaaacuaaucaagcaggaacucgauaaguauaaaaaugcaguaacugagcugcagcuucugaugcagucuacacccgccaccaacaauagggcucggcgcgaguugccucgauuuaugaacuacacgcucaauaacgcaaagaaaacuaaugugacccugucgaagaaacguaagagaagguuccugggcuuucucuuaggggucggaucagccauagcuagcggcguggccguuaguaaggugcugcaccuugaaggugaggucaacaaaaucaaguccgcguugcugucuacaaauaaagcagugguaagccuauccaacgggguuucagugcucacuucuaagguccuggaccuuaaaaauuauauugauaagcaacuguugccaaucgugaacaaacagagcuguucuauuuccaacaucgaaaccgugauagaguuccagcagaagaauaaccggcuccuggagauuacacgcgaauuuucagucaaugccggaguuaccacgccggugagcacuuacauguuaacaaacagugagcugcucucucuuaucaaugacaugcccauuaccaacgaucaaaagaaacugauguccaauaacguacagaucgugagacagcagagcuauucgaucaugucuauuauaaaggaagaggucuuggcuuacgugguucaacuaccucuguacggcgugaucgacacuccaugcuggaaacuccauacauccccacuguguaccacgaauaccaaggaaggcucaaacauuugccuuacaaggacugaucgggggugguauugugacaaugccggaagugucagcuucuuuccucaggcagagaccugcaaagugcaguccaaccgcguauucugugauacaaugaauagucugacuuugccaagcgagguuaaccucugcaauguggacaucuuuaaccccaaguacgauuguaagauaaugaccucaaaaacagacgucaguuccagcgugauuaccucucugggugcuaucgucucaugcuauggcaagacuaaaugcacggccaguaacaagaaucgagggaucauuaaaacauucagcaacggaugugauuacguguccaauaagggcguugacaccgugucuguagguaacacuuuauauuacgucaauaagcaagaagggaaaucgcuguaugugaagggagagccuaucauuaacuuuuacgacccccuaguuuucccgagcgaugaauuugacgcguccauaucacaggugaaugagaaaaucaaccagagucucgccuucauuagaaagucugaugaacugcuucacaaugucaacgcaggcaaaagcaccacaaauaucaugaucaccacuauuauaaucgugauuaucguaauuuugcugucccucaucgcugugggccugcuucuguacugcaaggccaggucaacacccguuacguugagcaaggaccagcucucugggauaaacaauaucgcuuucuccaacugaggacuaguacuggcugcaucucccuuuccucuguccuccauccuucucccaggauggugaagggggaccugguacccagugauccccaccccaggauccuaaaucaugacuuaccugcuaauaaaaacucauuggaaaagugagaagaucuaaaaaaaaaaaaaaaaaaaaaaaaaaaaaaaaaaaaaaaaaaaaaaaaaaaaaaaaaaaaaaaaugcaucccccccccccccccccccccccccccccccaaaggcucuuuucagagccaccagaauu

SEQ ID NO: 308 - RNA, 2094 nt, Artificial Sequence
  mRNA product Design e-6 comprising derived and/or modified sequence from HRSV(A2)__F0 (opt4)
gggagagcggcucggccauuuugucccagucaguccggaggcugcggcugcagaaguaccgccugcggaguaacugcaaagaagcuuaccauggagcugcugauccugaaggccaacgccaucaccaccauccugaccgccgugaccuucugcuucgccagcggccagaacaucaccgaggaguucuaccagagcaccugcagcgccgugagcaagggcuaccugagcgcccugagaaccggcugguacaccagcgugaucaccaucgagcugagcaacaucaaggagaacaagugcaacggcaccgacgccaaggugaagcugaucaagcaggagcuggacaaguacaagaacgccgugaccgagcugcagcugcugaugcagagcacccccgccaccaacaacagagccagaagagagcugcccagauucaugaacuacacccugaacaacgccaagaagaccaacgugacccugagcaagaagagaaagagaagauuccugggcuuccugcugggcgugggcagcgccaucgccagcggcguggccgugagcaaggugcugcaccuggagggcgaggugaacaagaucaagagcgcccugcugagcaccaacaaggccguggugagccugagcaacggcgugagcgugcugaccagcaaggugcuggaccugaagaacuacaucgacaagcagcugcugcccaucgugaacaagcagagcugcagcaucagcaacaucgagaccgugaucgaguuccagcagaagaacaacagacugcuggagaucaccagagaguucagcgugaacgccggcgugaccacccccgugagcaccuacaugcugaccaacagcgagcugcugagccugaucaacgacaugcccaucaccaacgaccagaagaagcugaugagcaacaacgugcagaucgugagacagcagagcuacagcaucaugagcaucaucaaggaggaggugcuggccuacguggugcagcugccccuguacggcgugaucgacacccccugcuggaagcugcacaccagcccccugugcaccaccaacaccaaggagggcagcaacaucugccugaccagaaccgacagaggcugguacugcgacaacgccggcagcgugagcuucuucccccaggccgagaccugcaaggugcagagcaacagaguguucugcgacaccaugaacagccugacccugcccagcgaggugaaccugugcaacguggacaucuucaaccccaaguacgacugcaagaucaugaccagcaagaccgacgugagcagcagcgugaucaccagccugggcgccaucgugagcugcuacggcaagaccaagugcaccgccagcaacaagaacagaggcaucaucaagaccuucagcaacggcugcgacuacgugagcaacaagggcguggacaccgugagcgugggcaacacccuguacuacgugaacaagcaggagggcaagagccuguacgugaagggcgagcccaucaucaacuucuacgacccccugguguuccccagcgacgaguucgacgccagcaucagccaggugaacgagaagaucaaccagagccuggccuucaucagaaagagcgacgagcugcugcacaacgugaacgccggcaagagcaccaccaacaucaugaucaccaccaucaucaucgugaucaucgugauccugcugagccugaucgccgugggccugcugcuguacugcaaggccagaagcacccccgugacccugagcaaggaccagcugagcggcaucaacaacaucgccuucagcaacugaggacuaguacuggcugcaucucccuuuccucuguccuccauccuucucccaggauggugaagggggaccugguacccagugauccccaccccaggauccuaaaucaugacuuaccugcuaauaaaaacucauuggaaaagugagaagaucuaaaaaaaaaaaaaaaaaaaaaaaaaaaaaaaaaaaaaaaaaaaaaaaaaaaaaaaaaaaaaaaaugcaucccccccccccccccccccccccccccccccaaaggcucuuuucagagccaccagaauu

SEQ ID NO: 309 - RNA, 2094 nt, Artificial Sequence
  mRNA product Design e-6 comprising derived and/or modified sequence from HRSV(A2)__F0 (opt5)
gggagagcggcucggccauuuugucccagucaguccggaggcugcggcugcagaaguaccgccugcggaguaacugcaaagaagcuuaccauggagcugcucauccugaaggccaacgcuauuaccacaauccuuacggccgugaccuucugcuuugcgagcggccagaauauuacagaagaguucuaccaauccaccuguucugcugucagcaaaggguaucuguccgcccucagaacaggaugguacaccucuguuaucacaauugaacugagcaacaucaaggagaauaaaugcaacggcaccgacgccaaggugaaacuuaucaagcaggaacuggauaaguauaaaaaugcugugacggagcuccagcugcugaugcaguccacccccgccacaaacaaucgggcucgcagagagcucccucgguuuaugaacuacacccugaauaacgccaagaaaacaaaugucacccuuucuaagaaacgcaagagacgguuccugggguuucuccugggagugggcagcgcgauugccuccgggguugcugugagcaagguccuucaccuggaaggagaggugaacaaaaucaagucugcccuccuguccacgaauaaagcuguugugagccugucuaacggcgucuccgugcucacaagcaaggugcuggaccuuaaaaauuauauugauaagcaacugcucccgaucgucaacaaacagucuuguuccauuagcaacaucgaaaccguuauugaguuccagcagaagaauaaccgccugcuugagaucacaagagaauuuuccgugaaugccggcgugaccacccccgucucuacauacaugcugacgaacagcgagcuccugucccugaucaaugacaugccuauuaccaacgaucaaaagaaacucaugagcaauaacgugcagaucguucggcagcagucuuauuccauuaugagcaucauuaaggaagaggugcuggcguacgucgugcaacuuccccuguacgggguuaucgacacaccuugcuggaaacuccauaccucuccccuguguacaaccaauacgaaggaaggaagcaacaucugccuuacacgcaccgauagaggcugguauugugacaaugccggguccgugucuuucuuuccucaggcugagaccugcaaaguccagagcaaccggguguucugugauacaaugaacucccugacccucccgagcgaggucaaucugugcaauguggacauuuuuaaccccaaguacgauuguaagaucaugacaucuaaaacggacguuuccagcucugugauuaccucccugggagccaucgucagcugcuauggcaagacaaaaugcaccgcuuccaacaagaaucgcgggauuaucaaaacauucucuaacggaugugauuacgugagcaauaagggcguugacaccguguccgucggcaacacgcucuauuacgugaauaagcaagaagggaaaucucuguaugugaagggagagccuaucauuaacuuuuacgacccccuuguuuucccuagcgaugaauuugacgccuccaucagccaggucaaugagaaaauuaaccagucucuggccuucaucagaaaguccgaugaacuccugcacaaugugaacgcuggcaaaagcaccacaaauauuaugaucaccacaauuaucaucgugauuaucgucauucugcuuucucucaucgcgguggggcugcugcucuacugcaaggcccgguccacccccguuacgcugagcaaggaccagcuuucuggaauuaacaauaucgcuuucagcaacugaggacuaguacuggcugcaucucccuuuccucuguccuccauccuucucccaggauggugaagggggaccugguacccagugauccccaccccaggauccuaaaucaugacuuaccugcuaauaaaaacucauuggaaaagugagaagaucuaaaaaaaaaaaaaaaaaaaaaaaaaaaaaaaaaaaaaaaaaaaaaaaaaaaaaaaaaaaaaaaaugcaucccccccccccccccccccccccccccccccaaaggcucuuuucagagccaccagaauu

SEQ ID NO: 310 - RNA, 2094 nt, Artificial Sequence
  mRNA product Design e-6 comprising derived and/or modified sequence from HRSV(A2)__F0 (opt6)
gggagagcggcucggccauuuugucccagucaguccggaggcugcggcugcagaaguaccgccugcggaguaacugcaaagaagcuuaccauggaacuucuaauauuaaaagcuaacgcaaucacuacuaucuuaaccgcaguaacauucuguuuugcauccggccaaaacauaacagaagaauuuuaccaaucaacuugcucugcagucucaaaagguuaucuaucugcauuaagaacaggcugguacaccucaguaauaacgaucgaacuaucaaacaucaaagaaaacaaauguaauggaacagacgcaaaaguaaaacuaaucaaacaagaacuagacaaauacaaaaacgcaguaaccgaacuccaacuccucaugcaaaguacaccagcaacaaauaacagagcaagacgugaacuaccacguuuuaugaauuacacgcucaauaacgcaaaaaaaacaaauguuacccuaucaaaaaaacgaaaaagaagauuccucggauuccuacuaggcguaggcucagcaauagcuucaggaguagcaguaucaaaaguacuccaccucgaaggagaaguaaacaaaaucaaaagcgcucuccucucaacaaacaaagcaguuguuucacucucaaacggaguaucaguacuaaccucaaaaguacuugaccuaaaaaauuauauagacaaacaacuauuaccaauaguaaacaaacaaagcugcuccaucuccaacaucgagacagucauagaauuucaacaaaaaaauaaccgccuauuagaaauaaccagagaauuuucaguaaacgcaggaguaacuaccccaguaucaacauauauguuaacaaacucagaacuccuaagucuaaucaacgacaugccaauaaccaacgaccaaaaaaaacuaaugagcaacaauguacaaauaguucgucaacaaucuuacuccauaaugucuauaauaaaagaagaaguacucgccuauguaguccaacuaccacuauacggagucaucgauacaccaugcuggaaacuccacacauccccacucuguacuacuaacaccaaagaagguucaaauauaugccuaaccagaacagauagagguugguacugcgauaaugcaggaucaguauccuuuuucccccaagccgaaacaugcaaaguucaauccaauagaguauuuugugauacaaugaacucuuuaacccucccauccgaagucaaucuauguaacgucgacauauuuaacccaaaauacgauugcaaaauaaugacaucaaaaacagacgucucauccucaguuauaacguccuuaggcgcuauaguaucaugcuacggcaaaacaaaauguacagcaucaaacaaaaacagaggaaucauaaaaacuuucucuaacgguugcgacuauguauccaacaaaggugucgacacaguauccguaggcaacacccuuuacuauguuaauaaacaagaaggaaaaucucuauauguaaaaggcgaaccaauuauaaauuuuuacgacccccuugucuuucccucugacgaauuugacgcuuccauaucacaagucaacgaaaaaaucaaccaaucccucgcauucauacgcaaaucagacgaacuacuacauaacgucaacgcaggcaaauccacaacaaacauaaugauaaccacaaucauaauuguaauaauaguaauacuacuuucucuaauagcagucggauuacucuuauacuguaaagcucgaucaacaccagucacccucucuaaagaucaacuauccggaaucaacaacauagcuuucucaaacuaaggacuaguacuggcugcaucucccuuuccucuguccuccauccuucucccaggauggugaagggggaccugguacccagugauccccaccccaggauccuaaaucaugacuuaccugcuaauaaaaacucauuggaaaagugagaagaucuaaaaaaaaaaaaaaaaaaaaaaaaaaaaaaaaaaaaaaaaaaaaaaaaaaaaaaaaaaaaaaaaugcaucccccccccccccccccccccccccccccccaaaggcucuuuucagagccaccagaauu

SEQ ID NO: 311 - RNA, 2094 nt, Artificial Sequence
  mRNA product Design e-6 comprising derived and/or modified sequence from HRSV(A2)__F0 (opt11)
gggagagcggcucggccauuuugucccagucaguccggaggcugcggcugcagaaguaccgccugcggaguaacugcaaagaagcuuaccauggaacuccucauacucaaagccaacgcaaucacaaccauacucaccgccgucaccuucugcuuugcaucuggccagaacaucacugaagaguucuaccaauccacaugcuccgccguaagcaaaggcuaccuauccgcccuacgcaccggcugguacaccagcguaaucaccauagaacucuccaauauaaaagaaaacaaaugcaacggcaccgacgcaaaagucaagcuaauaaaacaagaacucgacaaauacaaaaacgccguuaccgaacuccagcuacucaugcaaucgaccccagcaaccaacaaccgugcgagacgcgaacucccccgcuucaugaacuacacccuaaacaacgccaaaaagaccaacguaacucuauccaagaaacgcaaacgccgcuuccucggauuccuccucggcgucggcuccgcaaucgccagcggcgucgccguuagcaaaguccuucaccucgaaggagaaguaaacaaaauuaaaagcgcccucuuauccacaaacaaggccguaguaucccugucaaacggcgucuccguccuuacauccaaaguccucgaccucaagaacuacauagacaaacagcuacuacccauuguaaauaaacaaagcugcucaauuagcaacaucgaaaccguaaucgaguuccagcagaaaaacaacagacuucucgaaaucacccgcgaguucagcgucaacgccggcguaaccaccccugucucaacauacaugcuaaccaacagcgaacugcucucccucaucaacgacaugcccaucaccaacgaccaaaagaaacucaugagcaacaacguacaaaucgugcgccaacaguccuacucaauaaugucaaucaucaaagaagaagugcuagcauacgucguacaacuaccacucuacggcguaauagauacccccugcuggaagcuccauaccuccccacucuguaccaccaacaccaaagaaggcucaaacaucugccuaacgcgcacagaccguggaugguacugugacaacgccggcuccgucuccuucuucccucaagccgaaacaugcaaaguccaauccaacagagucuucugcgauaccaugaacucccugacacucccaagcgaagucaaccuuugcaacgucgauaucuuuaaccccaaauacgacugcaagaucaugacaucaaaaaccgacguauccuccucuguaauaaccucccuaggcgcaaucguaucaugcuacggcaaaaccaaauguaccgccuccaacaaaaaucgcggcaucaucaaaaccuucucgaacggcugcgacuacgucuccaacaaaggcguagacacaguuuccguaggcaacacccucuacuacgucaauaaacaggaaggcaagucccucuacgucaaaggcgaacccaucaucaauuucuacgacccccucguuuuccccuccgaugaguucgacgcaagcaucagccaggucaacgaaaagauaaaccagucccucgccuucauccgcaaaucagaugaacuccuucacaacguuaacgcaggcaagagcaccaccaacaucaugaucacaacuauaaucaucgucauaaucgucauccuacucucacuaaucgccgucggucuccuacuauauuguaaagcccgaucaacaccggucacacucuccaaagaccaacucuccggaaucaacaauaucgcuuucucgaacuaaggacuaguacuggcugcaucucccuuuccucuguccuccauccuucucccaggauggugaagggggaccugguacccagugauccccaccccaggauccuaaaucaugacuuaccugcuaauaaaaacucauuggaaaagugagaagaucuaaaaaaaaaaaaaaaaaaaaaaaaaaaaaaaaaaaaaaaaaaaaaaaaaaaaaaaaaaaaaaaaugcaucccccccccccccccccccccccccccccccaaaggcucuuuucagagccaccagaauu

SEQ ID NO: 312 - RNA, 2310 nt, Artificial Sequence
  mRNA product Design f-1 comprising derived and/or modified sequence from HRSV(A2)__F0 (artificial)
gggagagcggcucggccauuuugucccagucaguccggaggcugcggcugcagaaguaccgccugcggaguaacugcaaagaagcuuaccauggaguugcuaauccucaaagcaaaugcaauuaccacaauccucacugcagucacauuuuguuuugcuucuggucaaaacaucacugaagaauuuuaucaaucaacaugcagugcaguuagcaaaggcuaucuuagugcucugagaacugguugguauaccaguguuauaacuauagaauuaaguaauaucaaggaaaauaaguguaauggaacagaugcuaagguaaaauugauaaaacaagaauuagauaaauauaaaaaugcuguaacagaauugcaguugcucaugcaaagcacaccagcaacaaacaaucgagccagaagagaacuaccaagguuuaugaauuauacacucaacaaugccaaaaaaaccaauguaacauuaagcaagaaaaggaaaagaagauuucuugguuuuuuguuagguguuggaucugcaaucgccaguggcguugcuguaucuaagguccugcaccuagaaggggaagugaacaagaucaaaagugcucuacuauccacaaacaaggcuguagucagcuuaucaaauggaguuagugucuuaaccagcaaaguguuagaccucaaaaacuauauagauaaacaauuguuaccuauugugaacaagcaaagcugcagcauaucaaauauagaaacugugauagaguuccaacaaaagaacaacagacuacuagagauuaccagggaauuuaguguuaaugcagguguaacuacaccuguaagcacuuacauguuaacuaauagugaauuauugucauuaaucaaugauaugccuauaacaaaugaucagaaaaaguuaauguccaacaauguucaaauaguuagacagcaaaguuacucuaucauguccauaauaaaagaggaagucuuagcauauguaguacaauuaccacuauaugguguuauagauacacccuguuggaaacuacacacauccccucuauguacaaccaacacaaaagaaggguccaacaucuguuuaacaagaacugacagaggaugguacugugacaaugcaggaucaguaucuuucuucccacaagcugaaacauguaaaguucaaucaaaucgaguauuuugugacacaaugaacaguuuaacauuaccaagugaaguaaaucucugcaauguugacauauucaaccccaaauaugauuguaaaauuaugacuucaaaaacagauguaagcagcuccguuaucacaucucuaggagccauugugucaugcuauggcaaaacuaaauguacagcauccaauaaaaaucguggaaucauaaagacauuuucuaacgggugcgauuauguaucaaauaaagggguggacacugugucuguagguaacacauuauauuauguaaauaagcaagaagguaaaagucucuauguaaaaggugaaccaauaauaaauuucuaugacccauuaguauuccccucugaugaauuugaugcaucaauaucucaagucaacgagaagauuaaccagagccuagcauuuauucguaaauccgaugaauuauuacauaauguaaaugcugguaaauccaccacaaauaucaugauaacuacuauaauuauagugauuauaguaauauuguuaucauuaauugcuguuggacugcucuuauacuguaaggccagaagcacaccagucacacuaagcaaagaucaacugagugguauaaauaauauugcauuuaguaacuaaggacuagugaagggaacacccaaauuuaauucagccuuaagcacaauuaauuaagagugaaacguaauuguacaagcaguuggucacccaccauagggcaugaucaacaccgcaaccuuuccuuuuucccccagugauucugaaaaaccccucuucccuucagcuugcuuagauguuccaaauuuaguaagcuuaaggcggccuacagaagaaaaagaaaaaaaaggccacaaaaguucccucucacuuucaguaaauaaaauaaaagcagcaacagaaauaaagaaauaaaugaaauucaaaaugaaauaaauauuguguugugcagcauuaaaaaaucaauaaaaauuaaaaaugagcaagaucuaaaaaaaaaaaaaaaaaaaaaaaaaaaaaaaaaaaaaaaaaaaaaaaaaaaaaaaaaaaaaaaaugcaucccccccccccccccccccccccccccccccaaaggcucuuuucagagccaccagaauu

SEQ ID NO: 313 - RNA, 2310 nt, Artificial Sequence
  mRNA product Design f-1 comprising derived and/or modified sequence from HRSV(A2)__F0 (opt1)
gggagagcggcucggccauuuugucccagucaguccggaggcugcggcugcagaaguaccgccugcggaguaacugcaaagaagcuuaccauggagcugcucauccugaaggccaacgccaucaccaccauccugacggcggugaccuucugcuucgccagcggccagaacaucaccgaggaguucuaccaguccaccugcagcgccgucuccaagggguaccucagcgcccugcggacgggcugguacaccuccgugaucaccaucgagcugagcaacaucaaggagaacaagugcaacgggaccgacgccaaggugaagcucaucaagcaggagcuggacaaguacaagaacgcggucacggagcugcagcuccugaugcaguccaccccggcaaccaacaaccgcgcccggcgcgagcugccccgguucaugaacuacacccucaacaacgccaagaagacgaacgugacccugagcaagaagcgcaagcggcgcuuccugggcuuccuccugggggugggcuccgccaucgcgagcggcgucgccguguccaaggugcugcaccucgagggggaggucaacaagaucaagagcgcccugcuguccaccaacaaggccguggugagccucuccaacggcgucagcgugcugaccuccaaggugcuggaccucaagaacuacaucgacaagcagcugcugcccaucgucaacaagcagagcugcuccaucagcaacaucgagacggugaucgaguuccagcagaagaacaaccggcuccuggagaucacccgcgaguucagcgugaacgccggggucaccacccccguguccacguacaugcugaccaacagcgagcuccugucccugaucaacgacaugccgaucaccaacgaccagaagaagcucaugagcaacaacgugcagaucguccggcagcaguccuacagcaucauguccaucaucaaggaggaggugcuggcguacgugguccagcugccccucuacggcgugaucgacacccccugcuggaagcugcacacgagcccccugugcaccaccaacaccaaggagggguccaacaucugccucacgcgcaccgaccggggcugguacugcgacaacgccggcagcgucuccuucuucccgcaggccgagaccugcaaggugcagagcaaccgcguguucugcgacaccaugaacucccugacgcugcccagcgagguaaaccucugcaacgucgacaucuucaaccccaaguacgacugcaagaucaugaccuccaagaccgacgugagcuccagcgugaucaccucccugggggccaucgucagcugcuacggcaagacgaagugcaccgccagcaacaagaaccgggggaucaucaagaccuucuccaacggcugcgacuacgugagcaacaagggcguggacaccguguccgucgggaacacccuguacuacgugaacaagcaggagggcaagagccucuacgugaagggggagcccaucaucaacuucuacgacccgcuggucuuccccuccgacgaguucgacgcgagcaucucccaggugaacgagaagaucaaccagagccuggccuucauccgcaaguccgacgagcugcuccacaacgugaacgccggcaagagcacgaccaacaucaugaucaccaccaucaucaucgucaucaucgugauccugcugucccucaucgccguggggcugcugcucuacugcaaggcccggagcacgcccgucacccuguccaaggaccagcugagcggcaucaacaacaucgcguucuccaacugaggacuagugaagggaacacccaaauuuaauucagccuuaagcacaauuaauuaagagugaaacguaauuguacaagcaguuggucacccaccauagggcaugaucaacaccgcaaccuuuccuuuuucccccagugauucugaaaaaccccucuucccuucagcuugcuuagauguuccaaauuuaguaagcuuaaggcggccuacagaagaaaaagaaaaaaaaggccacaaaaguucccucucacuuucaguaaauaaaauaaaagcagcaacagaaauaaagaaauaaaugaaauucaaaaugaaauaaauauuguguugugcagcauuaaaaaaucaauaaaaauuaaaaaugagcaagaucuaaaaaaaaaaaaaaaaaaaaaaaaaaaaaaaaaaaaaaaaaaaaaaaaaaaaaaaaaaaaaaaaugcaucccccccccccccccccccccccccccccccaaaggcucuuuucagagccaccagaauu

SEQ ID NO: 314 - RNA, 2310 nt, Artificial Sequence
  mRNA product Design f-1 comprising derived and/or modified sequence from HRSV(A2)__F0 (opt1)
gggagagcggcucggccauuuugucccagucaguccggaggcugcggcugcagaaguaccgccugcggaguaacugcaaagaagcuuaccauggagcugcucauccugaaggccaacgccaucaccaccauccugacggcggugaccuucugcuucgccagcggccagaacaucaccgaggaguucuaccaguccacgugcagcgccgucuccaagggguaccucagcgcccugcgcaccggcugguacaccuccgugaucaccaucgagcugagcaacaucaaggagaacaagugcaacgggaccgacgccaaggugaagcucaucaagcaggagcuggacaaguacaagaacgcggucacggagcugcagcuccugaugcaguccacccccgccaccaacaaccgggcccgccgggagcugccgcgcuucaugaacuacacccucaacaacgccaagaagacgaacgugacccugagcaagaagcggaagcgccgguuccugggcuuccuccugggggugggcuccgcgaucgccagcggcgucgccguguccaaggugcugcaccucgagggggaggucaacaagaucaagagcgcccugcuguccaccaacaaggccguggugagccucuccaacggcgucagcgugcugaccuccaaggugcuggaccucaagaacuacaucgacaagcagcugcugcccaucgucaacaagcagagcugcuccaucagcaacaucgagacggugaucgaguuccagcagaagaacaaccgccuccuggagaucacccgggaguucagcgugaacgcgggggucaccacccccguguccacguacaugcugaccaacagcgagcuccugucccugaucaacgacaugcccaucaccaacgaccagaagaagcucaugagcaacaacgugcagaucguccgccagcaguccuacagcaucauguccaucaucaaggaggaggugcuggccuacgugguccagcugccgcucuacggcgugaucgacacccccugcuggaagcugcacacgagcccccugugcaccaccaacaccaaggagggguccaacaucugccucacgcggaccgaccgcggcugguacugcgacaacgccggcagcgucuccuucuucccccaggccgagaccugcaaggugcagagcaaccggguguucugcgacaccaugaacucccugacgcugccgagcgaggucaaccucugcaacguggacaucuucaaccccaaguacgacugcaagaucaugaccuccaagaccgacgugagcuccagcgucaucaccucccugggggccaucgugagcugcuacggcaagacgaagugcaccgcgagcaacaagaaccgcgggaucaucaagaccuucuccaacggcugcgacuacgugagcaacaagggcgucgacaccguguccguggggaacacccuguacuacgucaacaagcaggagggcaagagccucuacgugaagggggagcccaucaucaacuucuacgacccccugguguucccguccgacgaguucgacgccagcaucucccaggucaacgagaagaucaaccagagccuggccuucauccggaaguccgacgagcuccugcacaacgugaacgccggcaagagcacgaccaacaucaugaucaccaccaucaucaucgugaucaucgucauccugcugucccucaucgccguggggcugcugcucuacugcaaggcgcgcagcacgcccgugacccuguccaaggaccagcugagcggcaucaacaacaucgccuucuccaacugaggacuagugaagggaacacccaaauuuaauucagccuuaagcacaauuaauuaagagugaaacguaauuguacaagcaguuggucacccaccauagggcaugaucaacaccgcaaccuuuccuuuuucccccagugauucugaaaaaccccucuucccuucagcuugcuuagauguuccaaauuuaguaagcuuaaggcggccuacagaagaaaaagaaaaaaaaggccacaaaaguucccucucacuuucaguaaauaaaauaaaagcagcaacagaaauaaagaaauaaaugaaauucaaaaugaaauaaauauuguguugugcagcauuaaaaaaucaauaaaaauuaaaaaugagcaagaucuaaaaaaaaaaaaaaaaaaaaaaaaaaaaaaaaaaaaaaaaaaaaaaaaaaaaaaaaaaaaaaaaugcaucccccccccccccccccccccccccccccccaaaggcucuuuucagagccaccagaauu

SEQ ID NO: 315 - RNA, 2310 nt, Artificial Sequence
  mRNA product Design f-1 comprising derived and/or modified sequence from HRSV(A2)__F0 (opt2)
gggagagcggcucggccauuuugucccagucaguccggaggcugcggcugcagaaguaccgccugcggaguaacugcaaagaagcuuaccauggagcuccucauccucaaggccaacgccaucaccaccauccucaccgccgucaccuucugcuucgccuccggccagaacaucaccgaggaguucuaccaguccaccugcuccgccgucuccaagggcuaccucuccgcccuccgcaccggcugguacaccuccgucaucaccaucgagcucuccaacaucaaggagaacaagugcaacggcaccgacgccaaggucaagcucaucaagcaggagcucgacaaguacaagaacgccgucaccgagcuccagcuccucaugcaguccacccccgccaccaacaaccgcgcccgccgcgagcucccccgcuucaugaacuacacccucaacaacgccaagaagaccaacgucacccucuccaagaagcgcaagcgccgcuuccucggcuuccuccucggcgucggcuccgccaucgccuccggcgucgccgucuccaagguccuccaccucgagggcgaggucaacaagaucaaguccgcccuccucuccaccaacaaggccgucgucucccucuccaacggcgucuccguccucaccuccaagguccucgaccucaagaacuacaucgacaagcagcuccuccccaucgucaacaagcaguccugcuccaucuccaacaucgagaccgucaucgaguuccagcagaagaacaaccgccuccucgagaucacccgcgaguucuccgucaacgccggcgucaccacccccgucuccaccuacaugcucaccaacuccgagcuccucucccucaucaacgacaugcccaucaccaacgaccagaagaagcucauguccaacaacguccagaucguccgccagcaguccuacuccaucauguccaucaucaaggaggagguccucgccuacgucguccagcucccccucuacggcgucaucgacacccccugcuggaagcuccacaccuccccccucugcaccaccaacaccaaggagggcuccaacaucugccucacccgcaccgaccgcggcugguacugcgacaacgccggcuccgucuccuucuucccccaggccgagaccugcaagguccaguccaaccgcgucuucugcgacaccaugaacucccucacccuccccuccgaggucaaccucugcaacgucgacaucuucaaccccaaguacgacugcaagaucaugaccuccaagaccgacgucuccuccuccgucaucaccucccucggcgccaucgucuccugcuacggcaagaccaagugcaccgccuccaacaagaaccgcggcaucaucaagaccuucuccaacggcugcgacuacgucuccaacaagggcgucgacaccgucuccgucggcaacacccucuacuacgucaacaagcaggagggcaagucccucuacgucaagggcgagcccaucaucaacuucuacgacccccucgucuuccccuccgacgaguucgacgccuccaucucccaggucaacgagaagaucaaccagucccucgccuucauccgcaaguccgacgagcuccuccacaacgucaacgccggcaaguccaccaccaacaucaugaucaccaccaucaucaucgucaucaucgucauccuccucucccucaucgccgucggccuccuccucuacugcaaggcccgcuccacccccgucacccucuccaaggaccagcucuccggcaucaacaacaucgccuucuccaacugaggacuagugaagggaacacccaaauuuaauucagccuuaagcacaauuaauuaagagugaaacguaauuguacaagcaguuggucacccaccauagggcaugaucaacaccgcaaccuuuccuuuuucccccagugauucugaaaaaccccucuucccuucagcuugcuuagauguuccaaauuuaguaagcuuaaggcggccuacagaagaaaaagaaaaaaaaggccacaaaaguucccucucacuuucaguaaauaaaauaaaagcagcaacagaaauaaagaaauaaaugaaauucaaaaugaaauaaauauuguguugugcagcauuaaaaaaucaauaaaaauuaaaaaugagcaagaucuaaaaaaaaaaaaaaaaaaaaaaaaaaaaaaaaaaaaaaaaaaaaaaaaaaaaaaaaaaaaaaaaugcaucccccccccccccccccccccccccccccccaaaggcucuuuucagagccaccagaauu

SEQ ID NO: 316 - RNA, 2310 nt, Artificial Sequence
  mRNA product Design f-1 comprising derived and/or modified sequence from HRSV(A2)__F0 (opt3)
gggagagcggcucggccauuuugucccagucaguccggaggcugcggcugcagaaguaccgccugcggaguaacugcaaagaagcuuaccauggagcugcucauccuuaaggccaacgcuauuaccacaauacugacugcagugacguucugcuuugccagcggccagaauaucaccgaagaguucuaccaauccacauguucugcggucucaaaaggguauuugagugcuuuaagaacuggaugguacaccagcguuauuacaaucgaacuguccaacauuaaggagaauaaaugcaacgguaccgacgccaaggugaaacuaaucaagcaggaacucgauaaguauaaaaaugcaguaacugagcugcagcuucugaugcagucuacacccgccaccaacaauagggcucggcgcgaguugccucgauuuaugaacuacacgcucaauaacgcaaagaaaacuaaugugacccugucgaagaaacguaagagaagguuccugggcuuucucuuaggggucggaucagccauagcuagcggcguggccguuaguaaggugcugcaccuugaaggugaggucaacaaaaucaaguccgcguugcugucuacaaauaaagcagugguaagccuauccaacgggguuucagugcucacuucuaagguccuggaccuuaaaaauuauauugauaagcaacuguugccaaucgugaacaaacagagcuguucuauuuccaacaucgaaaccgugauagaguuccagcagaagaauaaccggcuccuggagauuacacgcgaauuuucagucaaugccggaguuaccacgccggugagcacuuacauguuaacaaacagugagcugcucucucuuaucaaugacaugcccauuaccaacgaucaaaagaaacugauguccaauaacguacagaucgugagacagcagagcuauucgaucaugucuauuauaaaggaagaggucuuggcuuacgugguucaacuaccucuguacggcgugaucgacacuccaugcuggaaacuccauacauccccacuguguaccacgaauaccaaggaaggcucaaacauuugccuuacaaggacugaucgggggugguauugugacaaugccggaagugucagcuucuuuccucaggcagagaccugcaaagugcaguccaaccgcguauucugugauacaaugaauagucugacuuugccaagcgagguuaaccucugcaauguggacaucuuuaaccccaaguacgauuguaagauaaugaccucaaaaacagacgucaguuccagcgugauuaccucucugggugcuaucgucucaugcuauggcaagacuaaaugcacggccaguaacaagaaucgagggaucauuaaaacauucagcaacggaugugauuacguguccaauaagggcguugacaccgugucuguagguaacacuuuauauuacgucaauaagcaagaagggaaaucgcuguaugugaagggagagccuaucauuaacuuuuacgacccccuaguuuucccgagcgaugaauuugacgcguccauaucacaggugaaugagaaaaucaaccagagucucgccuucauuagaaagucugaugaacugcuucacaaugucaacgcaggcaaaagcaccacaaauaucaugaucaccacuauuauaaucgugauuaucguaauuuugcugucccucaucgcugugggccugcuucuguacugcaaggccaggucaacacccguuacguugagcaaggaccagcucucugggauaaacaauaucgcuuucuccaacugaggacuagugaagggaacacccaaauuuaauucagccuuaagcacaauuaauuaagagugaaacguaauuguacaagcaguuggucacccaccauagggcaugaucaacaccgcaaccuuuccuuuuucccccagugauucugaaaaaccccucuucccuucagcuugcuuagauguuccaaauuuaguaagcuuaaggcggccuacagaagaaaaagaaaaaaaaggccacaaaaguucccucucacuuucaguaaauaaaauaaaagcagcaacagaaauaaagaaauaaaugaaauucaaaaugaaauaaauauuguguugugcagcauuaaaaaaucaauaaaaauuaaaaaugagcaagaucuaaaaaaaaaaaaaaaaaaaaaaaaaaaaaaaaaaaaaaaaaaaaaaaaaaaaaaaaaaaaaaaaugcaucccccccccccccccccccccccccccccccaaaggcucuuuucagagccaccagaauu

SEQ ID NO: 317 - RNA, 2310 nt, Artificial Sequence
  mRNA product Design f-1 comprising derived and/or modified sequence from HRSV(A2)__F0 (opt4)
gggagagcggcucggccauuuugucccagucaguccggaggcugcggcugcagaaguaccgccugcggaguaacugcaaagaagcuuaccauggagcugcugauccugaaggccaacgccaucaccaccauccugaccgccgugaccuucugcuucgccagcggccagaacaucaccgaggaguucuaccagagcaccugcagcgccgugagcaagggcuaccugagcgcccugagaaccggcugguacaccagcgugaucaccaucgagcugagcaacaucaaggagaacaagugcaacggcaccgacgccaaggugaagcugaucaagcaggagcuggacaaguacaagaacgccgugaccgagcugcagcugcugaugcagagcacccccgccaccaacaacagagccagaagagagcugcccagauucaugaacuacacccugaacaacgccaagaagaccaacgugacccugagcaagaagagaaagagaagauuccugggcuuccugcugggcgugggcagcgccaucgccagcggcguggccgugagcaaggugcugcaccuggagggcgaggugaacaagaucaagagcgcccugcugagcaccaacaaggccguggugagccugagcaacggcgugagcgugcugaccagcaaggugcuggaccugaagaacuacaucgacaagcagcugcugcccaucgugaacaagcagagcugcagcaucagcaacaucgagaccgugaucgaguuccagcagaagaacaacagacugcuggagaucaccagagaguucagcgugaacgccggcgugaccacccccgugagcaccuacaugcugaccaacagcgagcugcugagccugaucaacgacaugcccaucaccaacgaccagaagaagcugaugagcaacaacgugcagaucgugagacagcagagcuacagcaucaugagcaucaucaaggaggaggugcuggccuacguggugcagcugccccuguacggcgugaucgacacccccugcuggaagcugcacaccagcccccugugcaccaccaacaccaaggagggcagcaacaucugccugaccagaaccgacagaggcugguacugcgacaacgccggcagcgugagcuucuucccccaggccgagaccugcaaggugcagagcaacagaguguucugcgacaccaugaacagccugacccugcccagcgaggugaaccugugcaacguggacaucuucaaccccaaguacgacugcaagaucaugaccagcaagaccgacgugagcagcagcgugaucaccagccugggcgccaucgugagcugcuacggcaagaccaagugcaccgccagcaacaagaacagaggcaucaucaagaccuucagcaacggcugcgacuacgugagcaacaagggcguggacaccgugagcgugggcaacacccuguacuacgugaacaagcaggagggcaagagccuguacgugaagggcgagcccaucaucaacuucuacgacccccugguguuccccagcgacgaguucgacgccagcaucagccaggugaacgagaagaucaaccagagccuggccuucaucagaaagagcgacgagcugcugcacaacgugaacgccggcaagagcaccaccaacaucaugaucaccaccaucaucaucgugaucaucgugauccugcugagccugaucgccgugggccugcugcuguacugcaaggccagaagcacccccgugacccugagcaaggaccagcugagcggcaucaacaacaucgccuucagcaacugaggacuagugaagggaacacccaaauuuaauucagccuuaagcacaauuaauuaagagugaaacguaauuguacaagcaguuggucacccaccauagggcaugaucaacaccgcaaccuuuccuuuuucccccagugauucugaaaaaccccucuucccuucagcuugcuuagauguuccaaauuuaguaagcuuaaggcggccuacagaagaaaaagaaaaaaaaggccacaaaaguucccucucacuuucaguaaauaaaauaaaagcagcaacagaaauaaagaaauaaaugaaauucaaaaugaaauaaauauuguguugugcagcauuaaaaaaucaauaaaaauuaaaaaugagcaagaucuaaaaaaaaaaaaaaaaaaaaaaaaaaaaaaaaaaaaaaaaaaaaaaaaaaaaaaaaaaaaaaaaugcaucccccccccccccccccccccccccccccccaaaggcucuuuucagagccaccagaauu

SEQ ID NO: 318 - RNA, 2310 nt, Artificial Sequence
  mRNA product Design f-1 comprising derived and/or modified sequence from HRSV(A2)__F0 (opt5)
gggagagcggcucggccauuuugucccagucaguccggaggcugcggcugcagaaguaccgccugcggaguaacugcaaagaagcuuaccauggagcugcucauccugaaggccaacgcuauuaccacaauccuuacggccgugaccuucugcuuugcgagcggccagaauauuacagaagaguucuaccaauccaccuguucugcugucagcaaaggguaucuguccgcccucagaacaggaugguacaccucuguuaucacaauugaacugagcaacaucaaggagaauaaaugcaacggcaccgacgccaaggugaaacuuaucaagcaggaacuggauaaguauaaaaaugcugugacggagcuccagcugcugaugcaguccacccccgccacaaacaaucgggcucgcagagagcucccucgguuuaugaacuacacccugaauaacgccaagaaaacaaaugucacccuuucuaagaaacgcaagagacgguuccugggguuucuccugggagugggcagcgcgauugccuccgggguugcugugagcaagguccuucaccuggaaggagaggugaacaaaaucaagucugcccuccuguccacgaauaaagcuguugugagccugucuaacggcgucuccgugcucacaagcaaggugcuggaccuuaaaaauuauauugauaagcaacugcucccgaucgucaacaaacagucuuguuccauuagcaacaucgaaaccguuauugaguuccagcagaagaauaaccgccugcuugagaucacaagagaauuuuccgugaaugccggcgugaccacccccgucucuacauacaugcugacgaacagcgagcuccugucccugaucaaugacaugccuauuaccaacgaucaaaagaaacucaugagcaauaacgugcagaucguucggcagcagucuuauuccauuaugagcaucauuaaggaagaggugcuggcguacgucgugcaacuuccccuguacgggguuaucgacacaccuugcuggaaacuccauaccucuccccuguguacaaccaauacgaaggaaggaagcaacaucugccuuacacgcaccgauagaggcugguauugugacaaugccggguccgugucuuucuuuccucaggcugagaccugcaaaguccagagcaaccggguguucugugauacaaugaacucccugacccucccgagcgaggucaaucugugcaauguggacauuuuuaaccccaaguacgauuguaagaucaugacaucuaaaacggacguuuccagcucugugauuaccucccugggagccaucgucagcugcuauggcaagacaaaaugcaccgcuuccaacaagaaucgcgggauuaucaaaacauucucuaacggaugugauuacgugagcaauaagggcguugacaccguguccgucggcaacacgcucuauuacgugaauaagcaagaagggaaaucucuguaugugaagggagagccuaucauuaacuuuuacgacccccuuguuuucccuagcgaugaauuugacgccuccaucagccaggucaaugagaaaauuaaccagucucuggccuucaucagaaaguccgaugaacuccugcacaaugugaacgcuggcaaaagcaccacaaauauuaugaucaccacaauuaucaucgugauuaucgucauucugcuuucucucaucgcgguggggcugcugcucuacugcaaggcccgguccacccccguuacgcugagcaaggaccagcuuucuggaauuaacaauaucgcuuucagcaacugaggacuagugaagggaacacccaaauuuaauucagccuuaagcacaauuaauuaagagugaaacguaauuguacaagcaguuggucacccaccauagggcaugaucaacaccgcaaccuuuccuuuuucccccagugauucugaaaaaccccucuucccuucagcuugcuuagauguuccaaauuuaguaagcuuaaggcggccuacagaagaaaaagaaaaaaaaggccacaaaaguucccucucacuuucaguaaauaaaauaaaagcagcaacagaaauaaagaaauaaaugaaauucaaaaugaaauaaauauuguguugugcagcauuaaaaaaucaauaaaaauuaaaaaugagcaagaucuaaaaaaaaaaaaaaaaaaaaaaaaaaaaaaaaaaaaaaaaaaaaaaaaaaaaaaaaaaaaaaaaugcaucccccccccccccccccccccccccccccccaaaggcucuuuucagagccaccagaauu

SEQ ID NO: 319 - RNA, 2310 nt, Artificial Sequence
  mRNA product Design f-1 comprising derived and/or modified sequence from HRSV(A2)__F0 (opt6)
gggagagcggcucggccauuuugucccagucaguccggaggcugcggcugcagaaguaccgccugcggaguaacugcaaagaagcuuaccauggaacuucuaauauuaaaagcuaacgcaaucacuacuaucuuaaccgcaguaacauucuguuuugcauccggccaaaacauaacagaagaauuuuaccaaucaacuugcucugcagucucaaaagguuaucuaucugcauuaagaacaggcugguacaccucaguaauaacgaucgaacuaucaaacaucaaagaaaacaaauguaauggaacagacgcaaaaguaaaacuaaucaaacaagaacuagacaaauacaaaaacgcaguaaccgaacuccaacuccucaugcaaaguacaccagcaacaaauaacagagcaagacgugaacuaccacguuuuaugaauuacacgcucaauaacgcaaaaaaaacaaauguuacccuaucaaaaaaacgaaaaagaagauuccucggauuccuacuaggcguaggcucagcaauagcuucaggaguagcaguaucaaaaguacuccaccucgaaggagaaguaaacaaaaucaaaagcgcucuccucucaacaaacaaagcaguuguuucacucucaaacggaguaucaguacuaaccucaaaaguacuugaccuaaaaaauuauauagacaaacaacuauuaccaauaguaaacaaacaaagcugcuccaucuccaacaucgagacagucauagaauuucaacaaaaaaauaaccgccuauuagaaauaaccagagaauuuucaguaaacgcaggaguaacuaccccaguaucaacauauauguuaacaaacucagaacuccuaagucuaaucaacgacaugccaauaaccaacgaccaaaaaaaacuaaugagcaacaauguacaaauaguucgucaacaaucuuacuccauaaugucuauaauaaaagaagaaguacucgccuauguaguccaacuaccacuauacggagucaucgauacaccaugcuggaaacuccacacauccccacucuguacuacuaacaccaaagaagguucaaauauaugccuaaccagaacagauagagguugguacugcgauaaugcaggaucaguauccuuuuucccccaagccgaaacaugcaaaguucaauccaauagaguauuuugugauacaaugaacucuuuaacccucccauccgaagucaaucuauguaacgucgacauauuuaacccaaaauacgauugcaaaauaaugacaucaaaaacagacgucucauccucaguuauaacguccuuaggcgcuauaguaucaugcuacggcaaaacaaaauguacagcaucaaacaaaaacagaggaaucauaaaaacuuucucuaacgguugcgacuauguauccaacaaaggugucgacacaguauccguaggcaacacccuuuacuauguuaauaaacaagaaggaaaaucucuauauguaaaaggcgaaccaauuauaaauuuuuacgacccccuugucuuucccucugacgaauuugacgcuuccauaucacaagucaacgaaaaaaucaaccaaucccucgcauucauacgcaaaucagacgaacuacuacauaacgucaacgcaggcaaauccacaacaaacauaaugauaaccacaaucauaauuguaauaauaguaauacuacuuucucuaauagcagucggauuacucuuauacuguaaagcucgaucaacaccagucacccucucuaaagaucaacuauccggaaucaacaacauagcuuucucaaacuaaggacuagugaagggaacacccaaauuuaauucagccuuaagcacaauuaauuaagagugaaacguaauuguacaagcaguuggucacccaccauagggcaugaucaacaccgcaaccuuuccuuuuucccccagugauucugaaaaaccccucuucccuucagcuugcuuagauguuccaaauuuaguaagcuuaaggcggccuacagaagaaaaagaaaaaaaaggccacaaaaguucccucucacuuucaguaaauaaaauaaaagcagcaacagaaauaaagaaauaaaugaaauucaaaaugaaauaaauauuguguugugcagcauuaaaaaaucaauaaaaauuaaaaaugagcaagaucuaaaaaaaaaaaaaaaaaaaaaaaaaaaaaaaaaaaaaaaaaaaaaaaaaaaaaaaaaaaaaaaaugcaucccccccccccccccccccccccccccccccaaaggcucuuuucagagccaccagaauu

SEQ ID NO: 320 - RNA, 2310 nt, Artificial Sequence
  mRNA product Design f-1 comprising derived and/or modified sequence from HRSV(A2)__F0 (opt11)
gggagagcggcucggccauuuugucccagucaguccggaggcugcggcugcagaaguaccgccugcggaguaacugcaaagaagcuuaccauggaacuccucauacucaaagccaacgcaaucacaaccauacucaccgccgucaccuucugcuuugcaucuggccagaacaucacugaagaguucuaccaauccacaugcuccgccguaagcaaaggcuaccuauccgcccuacgcaccggcugguacaccagcguaaucaccauagaacucuccaauauaaaagaaaacaaaugcaacggcaccgacgcaaaagucaagcuaauaaaacaagaacucgacaaauacaaaaacgccguuaccgaacuccagcuacucaugcaaucgaccccagcaaccaacaaccgugcgagacgcgaacucccccgcuucaugaacuacacccuaaacaacgccaaaaagaccaacguaacucuauccaagaaacgcaaacgccgcuuccucggauuccuccucggcgucggcuccgcaaucgccagcggcgucgccguuagcaaaguccuucaccucgaaggagaaguaaacaaaauuaaaagcgcccucuuauccacaaacaaggccguaguaucccugucaaacggcgucuccguccuuacauccaaaguccucgaccucaagaacuacauagacaaacagcuacuacccauuguaaauaaacaaagcugcucaauuagcaacaucgaaaccguaaucgaguuccagcagaaaaacaacagacuucucgaaaucacccgcgaguucagcgucaacgccggcguaaccaccccugucucaacauacaugcuaaccaacagcgaacugcucucccucaucaacgacaugcccaucaccaacgaccaaaagaaacucaugagcaacaacguacaaaucgugcgccaacaguccuacucaauaaugucaaucaucaaagaagaagugcuagcauacgucguacaacuaccacucuacggcguaauagauacccccugcuggaagcuccauaccuccccacucuguaccaccaacaccaaagaaggcucaaacaucugccuaacgcgcacagaccguggaugguacugugacaacgccggcuccgucuccuucuucccucaagccgaaacaugcaaaguccaauccaacagagucuucugcgauaccaugaacucccugacacucccaagcgaagucaaccuuugcaacgucgauaucuuuaaccccaaauacgacugcaagaucaugacaucaaaaaccgacguauccuccucuguaauaaccucccuaggcgcaaucguaucaugcuacggcaaaaccaaauguaccgccuccaacaaaaaucgcggcaucaucaaaaccuucucgaacggcugcgacuacgucuccaacaaaggcguagacacaguuuccguaggcaacacccucuacuacgucaauaaacaggaaggcaagucccucuacgucaaaggcgaacccaucaucaauuucuacgacccccucguuuuccccuccgaugaguucgacgcaagcaucagccaggucaacgaaaagauaaaccagucccucgccuucauccgcaaaucagaugaacuccuucacaacguuaacgcaggcaagagcaccaccaacaucaugaucacaacuauaaucaucgucauaaucgucauccuacucucacuaaucgccgucggucuccuacuauauuguaaagcccgaucaacaccggucacacucuccaaagaccaacucuccggaaucaacaauaucgcuuucucgaacuaaggacuagugaagggaacacccaaauuuaauucagccuuaagcacaauuaauuaagagugaaacguaauuguacaagcaguuggucacccaccauagggcaugaucaacaccgcaaccuuuccuuuuucccccagugauucugaaaaaccccucuucccuucagcuugcuuagauguuccaaauuuaguaagcuuaaggcggccuacagaagaaaaagaaaaaaaaggccacaaaaguucccucucacuuucaguaaauaaaauaaaagcagcaacagaaauaaagaaauaaaugaaauucaaaaugaaauaaauauuguguugugcagcauuaaaaaaucaauaaaaauuaaaaaugagcaagaucuaaaaaaaaaaaaaaaaaaaaaaaaaaaaaaaaaaaaaaaaaaaaaaaaaaaaaaaaaaaaaaaaugcaucccccccccccccccccccccccccccccccaaaggcucuuuucagagccaccagaauu

SEQ ID NO: 321 - RNA, 2090 nt, Artificial Sequence
  mRNA product Design f-2 comprising derived and/or modified sequence from HRSV(A2)__F0 (artificial)
gggagagcggcucggccauuuugucccagucaguccggaggcugcggcugcagaaguaccgccugcggaguaacugcaaagaagcuuaccauggaguugcuaauccucaaagcaaaugcaauuaccacaauccucacugcagucacauuuuguuuugcuucuggucaaaacaucacugaagaauuuuaucaaucaacaugcagugcaguuagcaaaggcuaucuuagugcucugagaacugguugguauaccaguguuauaacuauagaauuaaguaauaucaaggaaaauaaguguaauggaacagaugcuaagguaaaauugauaaaacaagaauuagauaaauauaaaaaugcuguaacagaauugcaguugcucaugcaaagcacaccagcaacaaacaaucgagccagaagagaacuaccaagguuuaugaauuauacacucaacaaugccaaaaaaaccaauguaacauuaagcaagaaaaggaaaagaagauuucuugguuuuuuguuagguguuggaucugcaaucgccaguggcguugcuguaucuaagguccugcaccuagaaggggaagugaacaagaucaaaagugcucuacuauccacaaacaaggcuguagucagcuuaucaaauggaguuagugucuuaaccagcaaaguguuagaccucaaaaacuauauagauaaacaauuguuaccuauugugaacaagcaaagcugcagcauaucaaauauagaaacugugauagaguuccaacaaaagaacaacagacuacuagagauuaccagggaauuuaguguuaaugcagguguaacuacaccuguaagcacuuacauguuaacuaauagugaauuauugucauuaaucaaugauaugccuauaacaaaugaucagaaaaaguuaauguccaacaauguucaaauaguuagacagcaaaguuacucuaucauguccauaauaaaagaggaagucuuagcauauguaguacaauuaccacuauaugguguuauagauacacccuguuggaaacuacacacauccccucuauguacaaccaacacaaaagaaggguccaacaucuguuuaacaagaacugacagaggaugguacugugacaaugcaggaucaguaucuuucuucccacaagcugaaacauguaaaguucaaucaaaucgaguauuuugugacacaaugaacaguuuaacauuaccaagugaaguaaaucucugcaauguugacauauucaaccccaaauaugauuguaaaauuaugacuucaaaaacagauguaagcagcuccguuaucacaucucuaggagccauugugucaugcuauggcaaaacuaaauguacagcauccaauaaaaaucguggaaucauaaagacauuuucuaacgggugcgauuauguaucaaauaaagggguggacacugugucuguagguaacacauuauauuauguaaauaagcaagaagguaaaagucucuauguaaaaggugaaccaauaauaaauuucuaugacccauuaguauuccccucugaugaauuugaugcaucaauaucucaagucaacgagaagauuaaccagagccuagcauuuauucguaaauccgaugaauuauuacauaauguaaaugcugguaaauccaccacaaauaucaugauaacuacuauaauuauagugauuauaguaauauuguuaucauuaauugcuguuggacugcucuuauacuguaaggccagaagcacaccagucacacuaagcaaagaucaacugagugguauaaauaauauugcauuuaguaacuaaggacuaguggaagcauuuuccuggcugauuaaaagaaauuacucagcuauggucaucuguuccuguuagaaggcuaugcagcauauuauauacuaugcgcauguuaugaaaugcauaauaaaaaauuuuaaaaaaucuaaaagaucuaaaaaaaaaaaaaaaaaaaaaaaaaaaaaaaaaaaaaaaaaaaaaaaaaaaaaaaaaaaaaaaaugcaucccccccccccccccccccccccccccccccaaaggcucuuuucagagccaccagaauu

SEQ ID NO: 322 - RNA, 2090 nt, Artificial Sequence
  mRNA product Design f-2 comprising derived and/or modified sequence from HRSV(A2)__F0 (opt1)
gggagagcggcucggccauuuugucccagucaguccggaggcugcggcugcagaaguaccgccugcggaguaacugcaaagaagcuuaccauggagcugcucauccugaaggccaacgccaucaccaccauccugacggcggugaccuucugcuucgccagcggccagaacaucaccgaggaguucuaccaguccaccugcagcgccgucuccaagggguaccucagcgcccugcggacgggcugguacaccuccgugaucaccaucgagcugagcaacaucaaggagaacaagugcaacgggaccgacgccaaggugaagcucaucaagcaggagcuggacaaguacaagaacgcggucacggagcugcagcuccugaugcaguccaccccggcaaccaacaaccgcgcccggcgcgagcugccccgguucaugaacuacacccucaacaacgccaagaagacgaacgugacccugagcaagaagcgcaagcggcgcuuccugggcuuccuccugggggugggcuccgccaucgcgagcggcgucgccguguccaaggugcugcaccucgagggggaggucaacaagaucaagagcgcccugcuguccaccaacaaggccguggugagccucuccaacggcgucagcgugcugaccuccaaggugcuggaccucaagaacuacaucgacaagcagcugcugcccaucgucaacaagcagagcugcuccaucagcaacaucgagacggugaucgaguuccagcagaagaacaaccggcuccuggagaucacccgcgaguucagcgugaacgccggggucaccacccccguguccacguacaugcugaccaacagcgagcuccugucccugaucaacgacaugccgaucaccaacgaccagaagaagcucaugagcaacaacgugcagaucguccggcagcaguccuacagcaucauguccaucaucaaggaggaggugcuggcguacgugguccagcugccccucuacggcgugaucgacacccccugcuggaagcugcacacgagcccccugugcaccaccaacaccaaggagggguccaacaucugccucacgcgcaccgaccggggcugguacugcgacaacgccggcagcgucuccuucuucccgcaggccgagaccugcaaggugcagagcaaccgcguguucugcgacaccaugaacucccugacgcugcccagcgagguaaaccucugcaacgucgacaucuucaaccccaaguacgacugcaagaucaugaccuccaagaccgacgugagcuccagcgugaucaccucccugggggccaucgucagcugcuacggcaagacgaagugcaccgccagcaacaagaaccgggggaucaucaagaccuucuccaacggcugcgacuacgugagcaacaagggcguggacaccguguccgucgggaacacccuguacuacgugaacaagcaggagggcaagagccucuacgugaagggggagcccaucaucaacuucuacgacccgcuggucuuccccuccgacgaguucgacgcgagcaucucccaggugaacgagaagaucaaccagagccuggccuucauccgcaaguccgacgagcugcuccacaacgugaacgccggcaagagcacgaccaacaucaugaucaccaccaucaucaucgucaucaucgugauccugcugucccucaucgccguggggcugcugcucuacugcaaggcccggagcacgcccgucacccuguccaaggaccagcugagcggcaucaacaacaucgcguucuccaacugaggacuaguggaagcauuuuccuggcugauuaaaagaaauuacucagcuauggucaucuguuccuguuagaaggcuaugcagcauauuauauacuaugcgcauguuaugaaaugcauaauaaaaaauuuuaaaaaaucuaaaagaucuaaaaaaaaaaaaaaaaaaaaaaaaaaaaaaaaaaaaaaaaaaaaaaaaaaaaaaaaaaaaaaaaugcaucccccccccccccccccccccccccccccccaaaggcucuuuucagagccaccagaauu

SEQ ID NO: 323 - RNA, 2090 nt, Artificial Sequence
  mRNA product Design f-2 comprising derived and/or modified sequence from HRSV(A2)__F0 (opt1)
gggagagcggcucggccauuuugucccagucaguccggaggcugcggcugcagaaguaccgccugcggaguaacugcaaagaagcuuaccauggagcugcucauccugaaggccaacgccaucaccaccauccugacggcggugaccuucugcuucgccagcggccagaacaucaccgaggaguucuaccaguccacgugcagcgccgucuccaagggguaccucagcgcccugcgcaccggcugguacaccuccgugaucaccaucgagcugagcaacaucaaggagaacaagugcaacgggaccgacgccaaggugaagcucaucaagcaggagcuggacaaguacaagaacgcggucacggagcugcagcuccugaugcaguccacccccgccaccaacaaccgggcccgccgggagcugccgcgcuucaugaacuacacccucaacaacgccaagaagacgaacgugacccugagcaagaagcggaagcgccgguuccugggcuuccuccugggggugggcuccgcgaucgccagcggcgucgccguguccaaggugcugcaccucgagggggaggucaacaagaucaagagcgcccugcuguccaccaacaaggccguggugagccucuccaacggcgucagcgugcugaccuccaaggugcuggaccucaagaacuacaucgacaagcagcugcugcccaucgucaacaagcagagcugcuccaucagcaacaucgagacggugaucgaguuccagcagaagaacaaccgccuccuggagaucacccgggaguucagcgugaacgcgggggucaccacccccguguccacguacaugcugaccaacagcgagcuccugucccugaucaacgacaugcccaucaccaacgaccagaagaagcucaugagcaacaacgugcagaucguccgccagcaguccuacagcaucauguccaucaucaaggaggaggugcuggccuacgugguccagcugccgcucuacggcgugaucgacacccccugcuggaagcugcacacgagcccccugugcaccaccaacaccaaggagggguccaacaucugccucacgcggaccgaccgcggcugguacugcgacaacgccggcagcgucuccuucuucccccaggccgagaccugcaaggugcagagcaaccggguguucugcgacaccaugaacucccugacgcugccgagcgaggucaaccucugcaacguggacaucuucaaccccaaguacgacugcaagaucaugaccuccaagaccgacgugagcuccagcgucaucaccucccugggggccaucgugagcugcuacggcaagacgaagugcaccgcgagcaacaagaaccgcgggaucaucaagaccuucuccaacggcugcgacuacgugagcaacaagggcgucgacaccguguccguggggaacacccuguacuacgucaacaagcaggagggcaagagccucuacgugaagggggagcccaucaucaacuucuacgacccccugguguucccguccgacgaguucgacgccagcaucucccaggucaacgagaagaucaaccagagccuggccuucauccggaaguccgacgagcuccugcacaacgugaacgccggcaagagcacgaccaacaucaugaucaccaccaucaucaucgugaucaucgucauccugcugucccucaucgccguggggcugcugcucuacugcaaggcgcgcagcacgcccgugacccuguccaaggaccagcugagcggcaucaacaacaucgccuucuccaacugaggacuaguggaagcauuuuccuggcugauuaaaagaaauuacucagcuauggucaucuguuccuguuagaaggcuaugcagcauauuauauacuaugcgcauguuaugaaaugcauaauaaaaaauuuuaaaaaaucuaaaagaucuaaaaaaaaaaaaaaaaaaaaaaaaaaaaaaaaaaaaaaaaaaaaaaaaaaaaaaaaaaaaaaaaugcaucccccccccccccccccccccccccccccccaaaggcucuuuucagagccaccagaauu

SEQ ID NO: 324 - RNA, 2090 nt, Artificial Sequence
  mRNA product Design f-2 comprising derived and/or modified sequence from HRSV(A2)__F0 (opt2)
gggagagcggcucggccauuuugucccagucaguccggaggcugcggcugcagaaguaccgccugcggaguaacugcaaagaagcuuaccauggagcuccucauccucaaggccaacgccaucaccaccauccucaccgccgucaccuucugcuucgccuccggccagaacaucaccgaggaguucuaccaguccaccugcuccgccgucuccaagggcuaccucuccgcccuccgcaccggcugguacaccuccgucaucaccaucgagcucuccaacaucaaggagaacaagugcaacggcaccgacgccaaggucaagcucaucaagcaggagcucgacaaguacaagaacgccgucaccgagcuccagcuccucaugcaguccacccccgccaccaacaaccgcgcccgccgcgagcucccccgcuucaugaacuacacccucaacaacgccaagaagaccaacgucacccucuccaagaagcgcaagcgccgcuuccucggcuuccuccucggcgucggcuccgccaucgccuccggcgucgccgucuccaagguccuccaccucgagggcgaggucaacaagaucaaguccgcccuccucuccaccaacaaggccgucgucucccucuccaacggcgucuccguccucaccuccaagguccucgaccucaagaacuacaucgacaagcagcuccuccccaucgucaacaagcaguccugcuccaucuccaacaucgagaccgucaucgaguuccagcagaagaacaaccgccuccucgagaucacccgcgaguucuccgucaacgccggcgucaccacccccgucuccaccuacaugcucaccaacuccgagcuccucucccucaucaacgacaugcccaucaccaacgaccagaagaagcucauguccaacaacguccagaucguccgccagcaguccuacuccaucauguccaucaucaaggaggagguccucgccuacgucguccagcucccccucuacggcgucaucgacacccccugcuggaagcuccacaccuccccccucugcaccaccaacaccaaggagggcuccaacaucugccucacccgcaccgaccgcggcugguacugcgacaacgccggcuccgucuccuucuucccccaggccgagaccugcaagguccaguccaaccgcgucuucugcgacaccaugaacucccucacccuccccuccgaggucaaccucugcaacgucgacaucuucaaccccaaguacgacugcaagaucaugaccuccaagaccgacgucuccuccuccgucaucaccucccucggcgccaucgucuccugcuacggcaagaccaagugcaccgccuccaacaagaaccgcggcaucaucaagaccuucuccaacggcugcgacuacgucuccaacaagggcgucgacaccgucuccgucggcaacacccucuacuacgucaacaagcaggagggcaagucccucuacgucaagggcgagcccaucaucaacuucuacgacccccucgucuuccccuccgacgaguucgacgccuccaucucccaggucaacgagaagaucaaccagucccucgccuucauccgcaaguccgacgagcuccuccacaacgucaacgccggcaaguccaccaccaacaucaugaucaccaccaucaucaucgucaucaucgucauccuccucucccucaucgccgucggccuccuccucuacugcaaggcccgcuccacccccgucacccucuccaaggaccagcucuccggcaucaacaacaucgccuucuccaacugaggacuaguggaagcauuuuccuggcugauuaaaagaaauuacucagcuauggucaucuguuccuguuagaaggcuaugcagcauauuauauacuaugcgcauguuaugaaaugcauaauaaaaaauuuuaaaaaaucuaaaagaucuaaaaaaaaaaaaaaaaaaaaaaaaaaaaaaaaaaaaaaaaaaaaaaaaaaaaaaaaaaaaaaaaugcaucccccccccccccccccccccccccccccccaaaggcucuuuucagagccaccagaauu

SEQ ID NO: 325 - RNA, 2090 nt, Artificial Sequence
  mRNA product Design f-2 comprising derived and/or modified sequence from HRSV(A2)__F0 (opt3)
gggagagcggcucggccauuuugucccagucaguccggaggcugcggcugcagaaguaccgccugcggaguaacugcaaagaagcuuaccauggagcugcucauccuuaaggccaacgcuauuaccacaauacugacugcagugacguucugcuuugccagcggccagaauaucaccgaagaguucuaccaauccacauguucugcggucucaaaaggguauuugagugcuuuaagaacuggaugguacaccagcguuauuacaaucgaacuguccaacauuaaggagaauaaaugcaacgguaccgacgccaaggugaaacuaaucaagcaggaacucgauaaguauaaaaaugcaguaacugagcugcagcuucugaugcagucuacacccgccaccaacaauagggcucggcgcgaguugccucgauuuaugaacuacacgcucaauaacgcaaagaaaacuaaugugacccugucgaagaaacguaagagaagguuccugggcuuucucuuaggggucggaucagccauagcuagcggcguggccguuaguaaggugcugcaccuugaaggugaggucaacaaaaucaaguccgcguugcugucuacaaauaaagcagugguaagccuauccaacgggguuucagugcucacuucuaagguccuggaccuuaaaaauuauauugauaagcaacuguugccaaucgugaacaaacagagcuguucuauuuccaacaucgaaaccgugauagaguuccagcagaagaauaaccggcuccuggagauuacacgcgaauuuucagucaaugccggaguuaccacgccggugagcacuuacauguuaacaaacagugagcugcucucucuuaucaaugacaugcccauuaccaacgaucaaaagaaacugauguccaauaacguacagaucgugagacagcagagcuauucgaucaugucuauuauaaaggaagaggucuuggcuuacgugguucaacuaccucuguacggcgugaucgacacuccaugcuggaaacuccauacauccccacuguguaccacgaauaccaaggaaggcucaaacauuugccuuacaaggacugaucgggggugguauugugacaaugccggaagugucagcuucuuuccucaggcagagaccugcaaagugcaguccaaccgcguauucugugauacaaugaauagucugacuuugccaagcgagguuaaccucugcaauguggacaucuuuaaccccaaguacgauuguaagauaaugaccucaaaaacagacgucaguuccagcgugauuaccucucugggugcuaucgucucaugcuauggcaagacuaaaugcacggccaguaacaagaaucgagggaucauuaaaacauucagcaacggaugugauuacguguccaauaagggcguugacaccgugucuguagguaacacuuuauauuacgucaauaagcaagaagggaaaucgcuguaugugaagggagagccuaucauuaacuuuuacgacccccuaguuuucccgagcgaugaauuugacgcguccauaucacaggugaaugagaaaaucaaccagagucucgccuucauuagaaagucugaugaacugcuucacaaugucaacgcaggcaaaagcaccacaaauaucaugaucaccacuauuauaaucgugauuaucguaauuuugcugucccucaucgcugugggccugcuucuguacugcaaggccaggucaacacccguuacguugagcaaggaccagcucucugggauaaacaauaucgcuuucuccaacugaggacuaguggaagcauuuuccuggcugauuaaaagaaauuacucagcuauggucaucuguuccuguuagaaggcuaugcagcauauuauauacuaugcgcauguuaugaaaugcauaauaaaaaauuuuaaaaaaucuaaaagaucuaaaaaaaaaaaaaaaaaaaaaaaaaaaaaaaaaaaaaaaaaaaaaaaaaaaaaaaaaaaaaaaaugcaucccccccccccccccccccccccccccccccaaaggcucuuuucagagccaccagaauu

SEQ ID NO: 326 - RNA, 2090 nt, Artificial Sequence
  mRNA product Design f-2 comprising derived and/or modified sequence from HRSV(A2)__F0 (opt4)
gggagagcggcucggccauuuugucccagucaguccggaggcugcggcugcagaaguaccgccugcggaguaacugcaaagaagcuuaccauggagcugcugauccugaaggccaacgccaucaccaccauccugaccgccgugaccuucugcuucgccagcggccagaacaucaccgaggaguucuaccagagcaccugcagcgccgugagcaagggcuaccugagcgcccugagaaccggcugguacaccagcgugaucaccaucgagcugagcaacaucaaggagaacaagugcaacggcaccgacgccaaggugaagcugaucaagcaggagcuggacaaguacaagaacgccgugaccgagcugcagcugcugaugcagagcacccccgccaccaacaacagagccagaagagagcugcccagauucaugaacuacacccugaacaacgccaagaagaccaacgugacccugagcaagaagagaaagagaagauuccugggcuuccugcugggcgugggcagcgccaucgccagcggcguggccgugagcaaggugcugcaccuggagggcgaggugaacaagaucaagagcgcccugcugagcaccaacaaggccguggugagccugagcaacggcgugagcgugcugaccagcaaggugcuggaccugaagaacuacaucgacaagcagcugcugcccaucgugaacaagcagagcugcagcaucagcaacaucgagaccgugaucgaguuccagcagaagaacaacagacugcuggagaucaccagagaguucagcgugaacgccggcgugaccacccccgugagcaccuacaugcugaccaacagcgagcugcugagccugaucaacgacaugcccaucaccaacgaccagaagaagcugaugagcaacaacgugcagaucgugagacagcagagcuacagcaucaugagcaucaucaaggaggaggugcuggccuacguggugcagcugccccuguacggcgugaucgacacccccugcuggaagcugcacaccagcccccugugcaccaccaacaccaaggagggcagcaacaucugccugaccagaaccgacagaggcugguacugcgacaacgccggcagcgugagcuucuucccccaggccgagaccugcaaggugcagagcaacagaguguucugcgacaccaugaacagccugacccugcccagcgaggugaaccugugcaacguggacaucuucaaccccaaguacgacugcaagaucaugaccagcaagaccgacgugagcagcagcgugaucaccagccugggcgccaucgugagcugcuacggcaagaccaagugcaccgccagcaacaagaacagaggcaucaucaagaccuucagcaacggcugcgacuacgugagcaacaagggcguggacaccgugagcgugggcaacacccuguacuacgugaacaagcaggagggcaagagccuguacgugaagggcgagcccaucaucaacuucuacgacccccugguguuccccagcgacgaguucgacgccagcaucagccaggugaacgagaagaucaaccagagccuggccuucaucagaaagagcgacgagcugcugcacaacgugaacgccggcaagagcaccaccaacaucaugaucaccaccaucaucaucgugaucaucgugauccugcugagccugaucgccgugggccugcugcuguacugcaaggccagaagcacccccgugacccugagcaaggaccagcugagcggcaucaacaacaucgccuucagcaacugaggacuaguggaagcauuuuccuggcugauuaaaagaaauuacucagcuauggucaucuguuccuguuagaaggcuaugcagcauauuauauacuaugcgcauguuaugaaaugcauaauaaaaaauuuuaaaaaaucuaaaagaucuaaaaaaaaaaaaaaaaaaaaaaaaaaaaaaaaaaaaaaaaaaaaaaaaaaaaaaaaaaaaaaaaugcaucccccccccccccccccccccccccccccccaaaggcucuuuucagagccaccagaauu

SEQ ID NO: 327 - RNA, 2090 nt, Artificial Sequence
  mRNA product Design f-2 comprising derived and/or modified sequence from HRSV(A2)__F0 (opt5)
gggagagcggcucggccauuuugucccagucaguccggaggcugcggcugcagaaguaccgccugcggaguaacugcaaagaagcuuaccauggagcugcucauccugaaggccaacgcuauuaccacaauccuuacggccgugaccuucugcuuugcgagcggccagaauauuacagaagaguucuaccaauccaccuguucugcugucagcaaaggguaucuguccgcccucagaacaggaugguacaccucuguuaucacaauugaacugagcaacaucaaggagaauaaaugcaacggcaccgacgccaaggugaaacuuaucaagcaggaacuggauaaguauaaaaaugcugugacggagcuccagcugcugaugcaguccacccccgccacaaacaaucgggcucgcagagagcucccucgguuuaugaacuacacccugaauaacgccaagaaaacaaaugucacccuuucuaagaaacgcaagagacgguuccugggguuucuccugggagugggcagcgcgauugccuccgggguugcugugagcaagguccuucaccuggaaggagaggugaacaaaaucaagucugcccuccuguccacgaauaaagcuguugugagccugucuaacggcgucuccgugcucacaagcaaggugcuggaccuuaaaaauuauauugauaagcaacugcucccgaucgucaacaaacagucuuguuccauuagcaacaucgaaaccguuauugaguuccagcagaagaauaaccgccugcuugagaucacaagagaauuuuccgugaaugccggcgugaccacccccgucucuacauacaugcugacgaacagcgagcuccugucccugaucaaugacaugccuauuaccaacgaucaaaagaaacucaugagcaauaacgugcagaucguucggcagcagucuuauuccauuaugagcaucauuaaggaagaggugcuggcguacgucgugcaacuuccccuguacgggguuaucgacacaccuugcuggaaacuccauaccucuccccuguguacaaccaauacgaaggaaggaagcaacaucugccuuacacgcaccgauagaggcugguauugugacaaugccggguccgugucuuucuuuccucaggcugagaccugcaaaguccagagcaaccggguguucugugauacaaugaacucccugacccucccgagcgaggucaaucugugcaauguggacauuuuuaaccccaaguacgauuguaagaucaugacaucuaaaacggacguuuccagcucugugauuaccucccugggagccaucgucagcugcuauggcaagacaaaaugcaccgcuuccaacaagaaucgcgggauuaucaaaacauucucuaacggaugugauuacgugagcaauaagggcguugacaccguguccgucggcaacacgcucuauuacgugaauaagcaagaagggaaaucucuguaugugaagggagagccuaucauuaacuuuuacgacccccuuguuuucccuagcgaugaauuugacgccuccaucagccaggucaaugagaaaauuaaccagucucuggccuucaucagaaaguccgaugaacuccugcacaaugugaacgcuggcaaaagcaccacaaauauuaugaucaccacaauuaucaucgugauuaucgucauucugcuuucucucaucgcgguggggcugcugcucuacugcaaggcccgguccacccccguuacgcugagcaaggaccagcuuucuggaauuaacaauaucgcuuucagcaacugaggacuaguggaagcauuuuccuggcugauuaaaagaaauuacucagcuauggucaucuguuccuguuagaaggcuaugcagcauauuauauacuaugcgcauguuaugaaaugcauaauaaaaaauuuuaaaaaaucuaaaagaucuaaaaaaaaaaaaaaaaaaaaaaaaaaaaaaaaaaaaaaaaaaaaaaaaaaaaaaaaaaaaaaaaugcaucccccccccccccccccccccccccccccccaaaggcucuuuucagagccaccagaauu

SEQ ID NO: 328 - RNA, 2090 nt, Artificial Sequence
  mRNA product Design f-2 comprising derived and/or modified sequence from HRSV(A2)__F0 (opt6)
gggagagcggcucggccauuuugucccagucaguccggaggcugcggcugcagaaguaccgccugcggaguaacugcaaagaagcuuaccauggaacuucuaauauuaaaagcuaacgcaaucacuacuaucuuaaccgcaguaacauucuguuuugcauccggccaaaacauaacagaagaauuuuaccaaucaacuugcucugcagucucaaaagguuaucuaucugcauuaagaacaggcugguacaccucaguaauaacgaucgaacuaucaaacaucaaagaaaacaaauguaauggaacagacgcaaaaguaaaacuaaucaaacaagaacuagacaaauacaaaaacgcaguaaccgaacuccaacuccucaugcaaaguacaccagcaacaaauaacagagcaagacgugaacuaccacguuuuaugaauuacacgcucaauaacgcaaaaaaaacaaauguuacccuaucaaaaaaacgaaaaagaagauuccucggauuccuacuaggcguaggcucagcaauagcuucaggaguagcaguaucaaaaguacuccaccucgaaggagaaguaaacaaaaucaaaagcgcucuccucucaacaaacaaagcaguuguuucacucucaaacggaguaucaguacuaaccucaaaaguacuugaccuaaaaaauuauauagacaaacaacuauuaccaauaguaaacaaacaaagcugcuccaucuccaacaucgagacagucauagaauuucaacaaaaaaauaaccgccuauuagaaauaaccagagaauuuucaguaaacgcaggaguaacuaccccaguaucaacauauauguuaacaaacucagaacuccuaagucuaaucaacgacaugccaauaaccaacgaccaaaaaaaacuaaugagcaacaauguacaaauaguucgucaacaaucuuacuccauaaugucuauaauaaaagaagaaguacucgccuauguaguccaacuaccacuauacggagucaucgauacaccaugcuggaaacuccacacauccccacucuguacuacuaacaccaaagaagguucaaauauaugccuaaccagaacagauagagguugguacugcgauaaugcaggaucaguauccuuuuucccccaagccgaaacaugcaaaguucaauccaauagaguauuuugugauacaaugaacucuuuaacccucccauccgaagucaaucuauguaacgucgacauauuuaacccaaaauacgauugcaaaauaaugacaucaaaaacagacgucucauccucaguuauaacguccuuaggcgcuauaguaucaugcuacggcaaaacaaaauguacagcaucaaacaaaaacagaggaaucauaaaaacuuucucuaacgguugcgacuauguauccaacaaaggugucgacacaguauccguaggcaacacccuuuacuauguuaauaaacaagaaggaaaaucucuauauguaaaaggcgaaccaauuauaaauuuuuacgacccccuugucuuucccucugacgaauuugacgcuuccauaucacaagucaacgaaaaaaucaaccaaucccucgcauucauacgcaaaucagacgaacuacuacauaacgucaacgcaggcaaauccacaacaaacauaaugauaaccacaaucauaauuguaauaauaguaauacuacuuucucuaauagcagucggauuacucuuauacuguaaagcucgaucaacaccagucacccucucuaaagaucaacuauccggaaucaacaacauagcuuucucaaacuaaggacuaguggaagcauuuuccuggcugauuaaaagaaauuacucagcuauggucaucuguuccuguuagaaggcuaugcagcauauuauauacuaugcgcauguuaugaaaugcauaauaaaaaauuuuaaaaaaucuaaaagaucuaaaaaaaaaaaaaaaaaaaaaaaaaaaaaaaaaaaaaaaaaaaaaaaaaaaaaaaaaaaaaaaaugcaucccccccccccccccccccccccccccccccaaaggcucuuuucagagccaccagaauu

SEQ ID NO: 329 - RNA, 2090 nt, Artificial Sequence
  mRNA product Design f-2 comprising derived and/or modified sequence from HRSV(A2)__F0 (opt11)
gggagagcggcucggccauuuugucccagucaguccggaggcugcggcugcagaaguaccgccugcggaguaacugcaaagaagcuuaccauggaacuccucauacucaaagccaacgcaaucacaaccauacucaccgccgucaccuucugcuuugcaucuggccagaacaucacugaagaguucuaccaauccacaugcuccgccguaagcaaaggcuaccuauccgcccuacgcaccggcugguacaccagcguaaucaccauagaacucuccaauauaaaagaaaacaaaugcaacggcaccgacgcaaaagucaagcuaauaaaacaagaacucgacaaauacaaaaacgccguuaccgaacuccagcuacucaugcaaucgaccccagcaaccaacaaccgugcgagacgcgaacucccccgcuucaugaacuacacccuaaacaacgccaaaaagaccaacguaacucuauccaagaaacgcaaacgccgcuuccucggauuccuccucggcgucggcuccgcaaucgccagcggcgucgccguuagcaaaguccuucaccucgaaggagaaguaaacaaaauuaaaagcgcccucuuauccacaaacaaggccguaguaucccugucaaacggcgucuccguccuuacauccaaaguccucgaccucaagaacuacauagacaaacagcuacuacccauuguaaauaaacaaagcugcucaauuagcaacaucgaaaccguaaucgaguuccagcagaaaaacaacagacuucucgaaaucacccgcgaguucagcgucaacgccggcguaaccaccccugucucaacauacaugcuaaccaacagcgaacugcucucccucaucaacgacaugcccaucaccaacgaccaaaagaaacucaugagcaacaacguacaaaucgugcgccaacaguccuacucaauaaugucaaucaucaaagaagaagugcuagcauacgucguacaacuaccacucuacggcguaauagauacccccugcuggaagcuccauaccuccccacucuguaccaccaacaccaaagaaggcucaaacaucugccuaacgcgcacagaccguggaugguacugugacaacgccggcuccgucuccuucuucccucaagccgaaacaugcaaaguccaauccaacagagucuucugcgauaccaugaacucccugacacucccaagcgaagucaaccuuugcaacgucgauaucuuuaaccccaaauacgacugcaagaucaugacaucaaaaaccgacguauccuccucuguaauaaccucccuaggcgcaaucguaucaugcuacggcaaaaccaaauguaccgccuccaacaaaaaucgcggcaucaucaaaaccuucucgaacggcugcgacuacgucuccaacaaaggcguagacacaguuuccguaggcaacacccucuacuacgucaauaaacaggaaggcaagucccucuacgucaaaggcgaacccaucaucaauuucuacgacccccucguuuuccccuccgaugaguucgacgcaagcaucagccaggucaacgaaaagauaaaccagucccucgccuucauccgcaaaucagaugaacuccuucacaacguuaacgcaggcaagagcaccaccaacaucaugaucacaacuauaaucaucgucauaaucgucauccuacucucacuaaucgccgucggucuccuacuauauuguaaagcccgaucaacaccggucacacucuccaaagaccaacucuccggaaucaacaauaucgcuuucucgaacuaaggacuaguggaagcauuuuccuggcugauuaaaagaaauuacucagcuauggucaucuguuccuguuagaaggcuaugcagcauauuauauacuaugcgcauguuaugaaaugcauaauaaaaaauuuuaaaaaaucuaaaagaucuaaaaaaaaaaaaaaaaaaaaaaaaaaaaaaaaaaaaaaaaaaaaaaaaaaaaaaaaaaaaaaaaugcaucccccccccccccccccccccccccccccccaaaggcucuuuucagagccaccagaauu

SEQ ID NO: 330 - RNA, 2081 nt, Artificial Sequence
  mRNA product Design f-3 comprising derived and/or modified sequence from HRSV(A2)__F0 (artificial)
gggagagucccgcagucggcguccagcggcucugcuuguucgugugugugucguugcaggccuuauucaagcuuaccauggaguugcuaauccucaaagcaaaugcaauuaccacaauccucacugcagucacauuuuguuuugcuucuggucaaaacaucacugaagaauuuuaucaaucaacaugcagugcaguuagcaaaggcuaucuuagugcucugagaacugguugguauaccaguguuauaacuauagaauuaaguaauaucaaggaaaauaaguguaauggaacagaugcuaagguaaaauugauaaaacaagaauuagauaaauauaaaaaugcuguaacagaauugcaguugcucaugcaaagcacaccagcaacaaacaaucgagccagaagagaacuaccaagguuuaugaauuauacacucaacaaugccaaaaaaaccaauguaacauuaagcaagaaaaggaaaagaagauuucuugguuuuuuguuagguguuggaucugcaaucgccaguggcguugcuguaucuaagguccugcaccuagaaggggaagugaacaagaucaaaagugcucuacuauccacaaacaaggcuguagucagcuuaucaaauggaguuagugucuuaaccagcaaaguguuagaccucaaaaacuauauagauaaacaauuguuaccuauugugaacaagcaaagcugcagcauaucaaauauagaaacugugauagaguuccaacaaaagaacaacagacuacuagagauuaccagggaauuuaguguuaaugcagguguaacuacaccuguaagcacuuacauguuaacuaauagugaauuauugucauuaaucaaugauaugccuauaacaaaugaucagaaaaaguuaauguccaacaauguucaaauaguuagacagcaaaguuacucuaucauguccauaauaaaagaggaagucuuagcauauguaguacaauuaccacuauaugguguuauagauacacccuguuggaaacuacacacauccccucuauguacaaccaacacaaaagaaggguccaacaucuguuuaacaagaacugacagaggaugguacugugacaaugcaggaucaguaucuuucuucccacaagcugaaacauguaaaguucaaucaaaucgaguauuuugugacacaaugaacaguuuaacauuaccaagugaaguaaaucucugcaauguugacauauucaaccccaaauaugauuguaaaauuaugacuucaaaaacagauguaagcagcuccguuaucacaucucuaggagccauugugucaugcuauggcaaaacuaaauguacagcauccaauaaaaaucguggaaucauaaagacauuuucuaacgggugcgauuauguaucaaauaaagggguggacacugugucuguagguaacacauuauauuauguaaauaagcaagaagguaaaagucucuauguaaaaggugaaccaauaauaaauuucuaugacccauuaguauuccccucugaugaauuugaugcaucaauaucucaagucaacgagaagauuaaccagagccuagcauuuauucguaaauccgaugaauuauuacauaauguaaaugcugguaaauccaccacaaauaucaugauaacuacuauaauuauagugauuauaguaauauuguuaucauuaauugcuguuggacugcucuuauacuguaaggccagaagcacaccagucacacuaagcaaagaucaacugagugguauaaauaauauugcauuuaguaacuaaggacuaguacuggcugcaucucccuuuccucuguccuccauccuucucccaggauggugaagggggaccugguacccagugauccccaccccaggauccuaaaucaugacuuaccugcuaauaaaaacucauuggaaaagugagaagaucuaaaaaaaaaaaaaaaaaaaaaaaaaaaaaaaaaaaaaaaaaaaaaaaaaaaaaaaaaaaaaaaaugcaucccccccccccccccccccccccccccccccaaaggcucuuuucagagccaccagaauu

SEQ ID NO: 331 - RNA, 2081 nt, Artificial Sequence
  mRNA product Design f-3 comprising derived and/or modified sequence from HRSV(A2)__F0 (opt1)
gggagagucccgcagucggcguccagcggcucugcuuguucgugugugugucguugcaggccuuauucaagcuuaccauggagcugcucauccugaaggccaacgccaucaccaccauccugacggcggugaccuucugcuucgccagcggccagaacaucaccgaggaguucuaccaguccaccugcagcgccgucuccaagggguaccucagcgcccugcggacgggcugguacaccuccgugaucaccaucgagcugagcaacaucaaggagaacaagugcaacgggaccgacgccaaggugaagcucaucaagcaggagcuggacaaguacaagaacgcggucacggagcugcagcuccugaugcaguccaccccggcaaccaacaaccgcgcccggcgcgagcugccccgguucaugaacuacacccucaacaacgccaagaagacgaacgugacccugagcaagaagcgcaagcggcgcuuccugggcuuccuccugggggugggcuccgccaucgcgagcggcgucgccguguccaaggugcugcaccucgagggggaggucaacaagaucaagagcgcccugcuguccaccaacaaggccguggugagccucuccaacggcgucagcgugcugaccuccaaggugcuggaccucaagaacuacaucgacaagcagcugcugcccaucgucaacaagcagagcugcuccaucagcaacaucgagacggugaucgaguuccagcagaagaacaaccggcuccuggagaucacccgcgaguucagcgugaacgccggggucaccacccccguguccacguacaugcugaccaacagcgagcuccugucccugaucaacgacaugccgaucaccaacgaccagaagaagcucaugagcaacaacgugcagaucguccggcagcaguccuacagcaucauguccaucaucaaggaggaggugcuggcguacgugguccagcugccccucuacggcgugaucgacacccccugcuggaagcugcacacgagcccccugugcaccaccaacaccaaggagggguccaacaucugccucacgcgcaccgaccggggcugguacugcgacaacgccggcagcgucuccuucuucccgcaggccgagaccugcaaggugcagagcaaccgcguguucugcgacaccaugaacucccugacgcugcccagcgagguaaaccucugcaacgucgacaucuucaaccccaaguacgacugcaagaucaugaccuccaagaccgacgugagcuccagcgugaucaccucccugggggccaucgucagcugcuacggcaagacgaagugcaccgccagcaacaagaaccgggggaucaucaagaccuucuccaacggcugcgacuacgugagcaacaagggcguggacaccguguccgucgggaacacccuguacuacgugaacaagcaggagggcaagagccucuacgugaagggggagcccaucaucaacuucuacgacccgcuggucuuccccuccgacgaguucgacgcgagcaucucccaggugaacgagaagaucaaccagagccuggccuucauccgcaaguccgacgagcugcuccacaacgugaacgccggcaagagcacgaccaacaucaugaucaccaccaucaucaucgucaucaucgugauccugcugucccucaucgccguggggcugcugcucuacugcaaggcccggagcacgcccgucacccuguccaaggaccagcugagcggcaucaacaacaucgcguucuccaacugaggacuaguacuggcugcaucucccuuuccucuguccuccauccuucucccaggauggugaagggggaccugguacccagugauccccaccccaggauccuaaaucaugacuuaccugcuaauaaaaacucauuggaaaagugagaagaucuaaaaaaaaaaaaaaaaaaaaaaaaaaaaaaaaaaaaaaaaaaaaaaaaaaaaaaaaaaaaaaaaugcaucccccccccccccccccccccccccccccccaaaggcucuuuucagagccaccagaauu

SEQ ID NO: 332 - RNA, 2081 nt, Artificial Sequence
  mRNA product Design f-3 comprising derived and/or modified sequence from HRSV(A2)__F0 (opt1)
gggagagucccgcagucggcguccagcggcucugcuuguucgugugugugucguugcaggccuuauucaagcuuaccauggagcugcucauccugaaggccaacgccaucaccaccauccugacggcggugaccuucugcuucgccagcggccagaacaucaccgaggaguucuaccaguccacgugcagcgccgucuccaagggguaccucagcgcccugcgcaccggcugguacaccuccgugaucaccaucgagcugagcaacaucaaggagaacaagugcaacgggaccgacgccaaggugaagcucaucaagcaggagcuggacaaguacaagaacgcggucacggagcugcagcuccugaugcaguccacccccgccaccaacaaccgggcccgccgggagcugccgcgcuucaugaacuacacccucaacaacgccaagaagacgaacgugacccugagcaagaagcggaagcgccgguuccugggcuuccuccugggggugggcuccgcgaucgccagcggcgucgccguguccaaggugcugcaccucgagggggaggucaacaagaucaagagcgcccugcuguccaccaacaaggccguggugagccucuccaacggcgucagcgugcugaccuccaaggugcuggaccucaagaacuacaucgacaagcagcugcugcccaucgucaacaagcagagcugcuccaucagcaacaucgagacggugaucgaguuccagcagaagaacaaccgccuccuggagaucacccgggaguucagcgugaacgcgggggucaccacccccguguccacguacaugcugaccaacagcgagcuccugucccugaucaacgacaugcccaucaccaacgaccagaagaagcucaugagcaacaacgugcagaucguccgccagcaguccuacagcaucauguccaucaucaaggaggaggugcuggccuacgugguccagcugccgcucuacggcgugaucgacacccccugcuggaagcugcacacgagcccccugugcaccaccaacaccaaggagggguccaacaucugccucacgcggaccgaccgcggcugguacugcgacaacgccggcagcgucuccuucuucccccaggccgagaccugcaaggugcagagcaaccggguguucugcgacaccaugaacucccugacgcugccgagcgaggucaaccucugcaacguggacaucuucaaccccaaguacgacugcaagaucaugaccuccaagaccgacgugagcuccagcgucaucaccucccugggggccaucgugagcugcuacggcaagacgaagugcaccgcgagcaacaagaaccgcgggaucaucaagaccuucuccaacggcugcgacuacgugagcaacaagggcgucgacaccguguccguggggaacacccuguacuacgucaacaagcaggagggcaagagccucuacgugaagggggagcccaucaucaacuucuacgacccccugguguucccguccgacgaguucgacgccagcaucucccaggucaacgagaagaucaaccagagccuggccuucauccggaaguccgacgagcuccugcacaacgugaacgccggcaagagcacgaccaacaucaugaucaccaccaucaucaucgugaucaucgucauccugcugucccucaucgccguggggcugcugcucuacugcaaggcgcgcagcacgcccgugacccuguccaaggaccagcugagcggcaucaacaacaucgccuucuccaacugaggacuaguacuggcugcaucucccuuuccucuguccuccauccuucucccaggauggugaagggggaccugguacccagugauccccaccccaggauccuaaaucaugacuuaccugcuaauaaaaacucauuggaaaagugagaagaucuaaaaaaaaaaaaaaaaaaaaaaaaaaaaaaaaaaaaaaaaaaaaaaaaaaaaaaaaaaaaaaaaugcaucccccccccccccccccccccccccccccccaaaggcucuuuucagagccaccagaauu

SEQ ID NO: 333 - RNA, 2081 nt, Artificial Sequence
  mRNA product Design f-3 comprising derived and/or modified sequence from HRSV(A2)__F0 (opt2)
gggagagucccgcagucggcguccagcggcucugcuuguucgugugugugucguugcaggccuuauucaagcuuaccauggagcuccucauccucaaggccaacgccaucaccaccauccucaccgccgucaccuucugcuucgccuccggccagaacaucaccgaggaguucuaccaguccaccugcuccgccgucuccaagggcuaccucuccgcccuccgcaccggcugguacaccuccgucaucaccaucgagcucuccaacaucaaggagaacaagugcaacggcaccgacgccaaggucaagcucaucaagcaggagcucgacaaguacaagaacgccgucaccgagcuccagcuccucaugcaguccacccccgccaccaacaaccgcgcccgccgcgagcucccccgcuucaugaacuacacccucaacaacgccaagaagaccaacgucacccucuccaagaagcgcaagcgccgcuuccucggcuuccuccucggcgucggcuccgccaucgccuccggcgucgccgucuccaagguccuccaccucgagggcgaggucaacaagaucaaguccgcccuccucuccaccaacaaggccgucgucucccucuccaacggcgucuccguccucaccuccaagguccucgaccucaagaacuacaucgacaagcagcuccuccccaucgucaacaagcaguccugcuccaucuccaacaucgagaccgucaucgaguuccagcagaagaacaaccgccuccucgagaucacccgcgaguucuccgucaacgccggcgucaccacccccgucuccaccuacaugcucaccaacuccgagcuccucucccucaucaacgacaugcccaucaccaacgaccagaagaagcucauguccaacaacguccagaucguccgccagcaguccuacuccaucauguccaucaucaaggaggagguccucgccuacgucguccagcucccccucuacggcgucaucgacacccccugcuggaagcuccacaccuccccccucugcaccaccaacaccaaggagggcuccaacaucugccucacccgcaccgaccgcggcugguacugcgacaacgccggcuccgucuccuucuucccccaggccgagaccugcaagguccaguccaaccgcgucuucugcgacaccaugaacucccucacccuccccuccgaggucaaccucugcaacgucgacaucuucaaccccaaguacgacugcaagaucaugaccuccaagaccgacgucuccuccuccgucaucaccucccucggcgccaucgucuccugcuacggcaagaccaagugcaccgccuccaacaagaaccgcggcaucaucaagaccuucuccaacggcugcgacuacgucuccaacaagggcgucgacaccgucuccgucggcaacacccucuacuacgucaacaagcaggagggcaagucccucuacgucaagggcgagcccaucaucaacuucuacgacccccucgucuuccccuccgacgaguucgacgccuccaucucccaggucaacgagaagaucaaccagucccucgccuucauccgcaaguccgacgagcuccuccacaacgucaacgccggcaaguccaccaccaacaucaugaucaccaccaucaucaucgucaucaucgucauccuccucucccucaucgccgucggccuccuccucuacugcaaggcccgcuccacccccgucacccucuccaaggaccagcucuccggcaucaacaacaucgccuucuccaacugaggacuaguacuggcugcaucucccuuuccucuguccuccauccuucucccaggauggugaagggggaccugguacccagugauccccaccccaggauccuaaaucaugacuuaccugcuaauaaaaacucauuggaaaagugagaagaucuaaaaaaaaaaaaaaaaaaaaaaaaaaaaaaaaaaaaaaaaaaaaaaaaaaaaaaaaaaaaaaaaugcaucccccccccccccccccccccccccccccccaaaggcucuuuucagagccaccagaauu

SEQ ID NO: 334 - RNA, 2081 nt, Artificial Sequence
  mRNA product Design f-3 comprising derived and/or modified sequence from HRSV(A2)__F0 (opt3)
gggagagucccgcagucggcguccagcggcucugcuuguucgugugugugucguugcaggccuuauucaagcuuaccauggagcugcucauccuuaaggccaacgcuauuaccacaauacugacugcagugacguucugcuuugccagcggccagaauaucaccgaagaguucuaccaauccacauguucugcggucucaaaaggguauuugagugcuuuaagaacuggaugguacaccagcguuauuacaaucgaacuguccaacauuaaggagaauaaaugcaacgguaccgacgccaaggugaaacuaaucaagcaggaacucgauaaguauaaaaaugcaguaacugagcugcagcuucugaugcagucuacacccgccaccaacaauagggcucggcgcgaguugccucgauuuaugaacuacacgcucaauaacgcaaagaaaacuaaugugacccugucgaagaaacguaagagaagguuccugggcuuucucuuaggggucggaucagccauagcuagcggcguggccguuaguaaggugcugcaccuugaaggugaggucaacaaaaucaaguccgcguugcugucuacaaauaaagcagugguaagccuauccaacgggguuucagugcucacuucuaagguccuggaccuuaaaaauuauauugauaagcaacuguugccaaucgugaacaaacagagcuguucuauuuccaacaucgaaaccgugauagaguuccagcagaagaauaaccggcuccuggagauuacacgcgaauuuucagucaaugccggaguuaccacgccggugagcacuuacauguuaacaaacagugagcugcucucucuuaucaaugacaugcccauuaccaacgaucaaaagaaacugauguccaauaacguacagaucgugagacagcagagcuauucgaucaugucuauuauaaaggaagaggucuuggcuuacgugguucaacuaccucuguacggcgugaucgacacuccaugcuggaaacuccauacauccccacuguguaccacgaauaccaaggaaggcucaaacauuugccuuacaaggacugaucgggggugguauugugacaaugccggaagugucagcuucuuuccucaggcagagaccugcaaagugcaguccaaccgcguauucugugauacaaugaauagucugacuuugccaagcgagguuaaccucugcaauguggacaucuuuaaccccaaguacgauuguaagauaaugaccucaaaaacagacgucaguuccagcgugauuaccucucugggugcuaucgucucaugcuauggcaagacuaaaugcacggccaguaacaagaaucgagggaucauuaaaacauucagcaacggaugugauuacguguccaauaagggcguugacaccgugucuguagguaacacuuuauauuacgucaauaagcaagaagggaaaucgcuguaugugaagggagagccuaucauuaacuuuuacgacccccuaguuuucccgagcgaugaauuugacgcguccauaucacaggugaaugagaaaaucaaccagagucucgccuucauuagaaagucugaugaacugcuucacaaugucaacgcaggcaaaagcaccacaaauaucaugaucaccacuauuauaaucgugauuaucguaauuuugcugucccucaucgcugugggccugcuucuguacugcaaggccaggucaacacccguuacguugagcaaggaccagcucucugggauaaacaauaucgcuuucuccaacugaggacuaguacuggcugcaucucccuuuccucuguccuccauccuucucccaggauggugaagggggaccugguacccagugauccccaccccaggauccuaaaucaugacuuaccugcuaauaaaaacucauuggaaaagugagaagaucuaaaaaaaaaaaaaaaaaaaaaaaaaaaaaaaaaaaaaaaaaaaaaaaaaaaaaaaaaaaaaaaaugcaucccccccccccccccccccccccccccccccaaaggcucuuuucagagccaccagaauu

SEQ ID NO: 335 - RNA, 2081 nt, Artificial Sequence
  mRNA product Design f-3 comprising derived and/or modified sequence from HRSV(A2)__F0 (opt4)
gggagagucccgcagucggcguccagcggcucugcuuguucgugugugugucguugcaggccuuauucaagcuuaccauggagcugcugauccugaaggccaacgccaucaccaccauccugaccgccgugaccuucugcuucgccagcggccagaacaucaccgaggaguucuaccagagcaccugcagcgccgugagcaagggcuaccugagcgcccugagaaccggcugguacaccagcgugaucaccaucgagcugagcaacaucaaggagaacaagugcaacggcaccgacgccaaggugaagcugaucaagcaggagcuggacaaguacaagaacgccgugaccgagcugcagcugcugaugcagagcacccccgccaccaacaacagagccagaagagagcugcccagauucaugaacuacacccugaacaacgccaagaagaccaacgugacccugagcaagaagagaaagagaagauuccugggcuuccugcugggcgugggcagcgccaucgccagcggcguggccgugagcaaggugcugcaccuggagggcgaggugaacaagaucaagagcgcccugcugagcaccaacaaggccguggugagccugagcaacggcgugagcgugcugaccagcaaggugcuggaccugaagaacuacaucgacaagcagcugcugcccaucgugaacaagcagagcugcagcaucagcaacaucgagaccgugaucgaguuccagcagaagaacaacagacugcuggagaucaccagagaguucagcgugaacgccggcgugaccacccccgugagcaccuacaugcugaccaacagcgagcugcugagccugaucaacgacaugcccaucaccaacgaccagaagaagcugaugagcaacaacgugcagaucgugagacagcagagcuacagcaucaugagcaucaucaaggaggaggugcuggccuacguggugcagcugccccuguacggcgugaucgacacccccugcuggaagcugcacaccagcccccugugcaccaccaacaccaaggagggcagcaacaucugccugaccagaaccgacagaggcugguacugcgacaacgccggcagcgugagcuucuucccccaggccgagaccugcaaggugcagagcaacagaguguucugcgacaccaugaacagccugacccugcccagcgaggugaaccugugcaacguggacaucuucaaccccaaguacgacugcaagaucaugaccagcaagaccgacgugagcagcagcgugaucaccagccugggcgccaucgugagcugcuacggcaagaccaagugcaccgccagcaacaagaacagaggcaucaucaagaccuucagcaacggcugcgacuacgugagcaacaagggcguggacaccgugagcgugggcaacacccuguacuacgugaacaagcaggagggcaagagccuguacgugaagggcgagcccaucaucaacuucuacgacccccugguguuccccagcgacgaguucgacgccagcaucagccaggugaacgagaagaucaaccagagccuggccuucaucagaaagagcgacgagcugcugcacaacgugaacgccggcaagagcaccaccaacaucaugaucaccaccaucaucaucgugaucaucgugauccugcugagccugaucgccgugggccugcugcuguacugcaaggccagaagcacccccgugacccugagcaaggaccagcugagcggcaucaacaacaucgccuucagcaacugaggacuaguacuggcugcaucucccuuuccucuguccuccauccuucucccaggauggugaagggggaccugguacccagugauccccaccccaggauccuaaaucaugacuuaccugcuaauaaaaacucauuggaaaagugagaagaucuaaaaaaaaaaaaaaaaaaaaaaaaaaaaaaaaaaaaaaaaaaaaaaaaaaaaaaaaaaaaaaaaugcaucccccccccccccccccccccccccccccccaaaggcucuuuucagagccaccagaauu

SEQ ID NO: 336 - RNA, 2081 nt, Artificial Sequence
  mRNA product Design f-3 comprising derived and/or modified sequence from HRSV(A2)__F0 (opt5)
gggagagucccgcagucggcguccagcggcucugcuuguucgugugugugucguugcaggccuuauucaagcuuaccauggagcugcucauccugaaggccaacgcuauuaccacaauccuuacggccgugaccuucugcuuugcgagcggccagaauauuacagaagaguucuaccaauccaccuguucugcugucagcaaaggguaucuguccgcccucagaacaggaugguacaccucuguuaucacaauugaacugagcaacaucaaggagaauaaaugcaacggcaccgacgccaaggugaaacuuaucaagcaggaacuggauaaguauaaaaaugcugugacggagcuccagcugcugaugcaguccacccccgccacaaacaaucgggcucgcagagagcucccucgguuuaugaacuacacccugaauaacgccaagaaaacaaaugucacccuuucuaagaaacgcaagagacgguuccugggguuucuccugggagugggcagcgcgauugccuccgggguugcugugagcaagguccuucaccuggaaggagaggugaacaaaaucaagucugcccuccuguccacgaauaaagcuguugugagccugucuaacggcgucuccgugcucacaagcaaggugcuggaccuuaaaaauuauauugauaagcaacugcucccgaucgucaacaaacagucuuguuccauuagcaacaucgaaaccguuauugaguuccagcagaagaauaaccgccugcuugagaucacaagagaauuuuccgugaaugccggcgugaccacccccgucucuacauacaugcugacgaacagcgagcuccugucccugaucaaugacaugccuauuaccaacgaucaaaagaaacucaugagcaauaacgugcagaucguucggcagcagucuuauuccauuaugagcaucauuaaggaagaggugcuggcguacgucgugcaacuuccccuguacgggguuaucgacacaccuugcuggaaacuccauaccucuccccuguguacaaccaauacgaaggaaggaagcaacaucugccuuacacgcaccgauagaggcugguauugugacaaugccggguccgugucuuucuuuccucaggcugagaccugcaaaguccagagcaaccggguguucugugauacaaugaacucccugacccucccgagcgaggucaaucugugcaauguggacauuuuuaaccccaaguacgauuguaagaucaugacaucuaaaacggacguuuccagcucugugauuaccucccugggagccaucgucagcugcuauggcaagacaaaaugcaccgcuuccaacaagaaucgcgggauuaucaaaacauucucuaacggaugugauuacgugagcaauaagggcguugacaccguguccgucggcaacacgcucuauuacgugaauaagcaagaagggaaaucucuguaugugaagggagagccuaucauuaacuuuuacgacccccuuguuuucccuagcgaugaauuugacgccuccaucagccaggucaaugagaaaauuaaccagucucuggccuucaucagaaaguccgaugaacuccugcacaaugugaacgcuggcaaaagcaccacaaauauuaugaucaccacaauuaucaucgugauuaucgucauucugcuuucucucaucgcgguggggcugcugcucuacugcaaggcccgguccacccccguuacgcugagcaaggaccagcuuucuggaauuaacaauaucgcuuucagcaacugaggacuaguacuggcugcaucucccuuuccucuguccuccauccuucucccaggauggugaagggggaccugguacccagugauccccaccccaggauccuaaaucaugacuuaccugcuaauaaaaacucauuggaaaagugagaagaucuaaaaaaaaaaaaaaaaaaaaaaaaaaaaaaaaaaaaaaaaaaaaaaaaaaaaaaaaaaaaaaaaugcaucccccccccccccccccccccccccccccccaaaggcucuuuucagagccaccagaauu

SEQ ID NO: 337 - RNA, 2081 nt, Artificial Sequence
  mRNA product Design f-3 comprising derived and/or modified sequence from HRSV(A2)__F0 (opt6)
gggagagucccgcagucggcguccagcggcucugcuuguucgugugugugucguugcaggccuuauucaagcuuaccauggaacuucuaauauuaaaagcuaacgcaaucacuacuaucuuaaccgcaguaacauucuguuuugcauccggccaaaacauaacagaagaauuuuaccaaucaacuugcucugcagucucaaaagguuaucuaucugcauuaagaacaggcugguacaccucaguaauaacgaucgaacuaucaaacaucaaagaaaacaaauguaauggaacagacgcaaaaguaaaacuaaucaaacaagaacuagacaaauacaaaaacgcaguaaccgaacuccaacuccucaugcaaaguacaccagcaacaaauaacagagcaagacgugaacuaccacguuuuaugaauuacacgcucaauaacgcaaaaaaaacaaauguuacccuaucaaaaaaacgaaaaagaagauuccucggauuccuacuaggcguaggcucagcaauagcuucaggaguagcaguaucaaaaguacuccaccucgaaggagaaguaaacaaaaucaaaagcgcucuccucucaacaaacaaagcaguuguuucacucucaaacggaguaucaguacuaaccucaaaaguacuugaccuaaaaaauuauauagacaaacaacuauuaccaauaguaaacaaacaaagcugcuccaucuccaacaucgagacagucauagaauuucaacaaaaaaauaaccgccuauuagaaauaaccagagaauuuucaguaaacgcaggaguaacuaccccaguaucaacauauauguuaacaaacucagaacuccuaagucuaaucaacgacaugccaauaaccaacgaccaaaaaaaacuaaugagcaacaauguacaaauaguucgucaacaaucuuacuccauaaugucuauaauaaaagaagaaguacucgccuauguaguccaacuaccacuauacggagucaucgauacaccaugcuggaaacuccacacauccccacucuguacuacuaacaccaaagaagguucaaauauaugccuaaccagaacagauagagguugguacugcgauaaugcaggaucaguauccuuuuucccccaagccgaaacaugcaaaguucaauccaauagaguauuuugugauacaaugaacucuuuaacccucccauccgaagucaaucuauguaacgucgacauauuuaacccaaaauacgauugcaaaauaaugacaucaaaaacagacgucucauccucaguuauaacguccuuaggcgcuauaguaucaugcuacggcaaaacaaaauguacagcaucaaacaaaaacagaggaaucauaaaaacuuucucuaacgguugcgacuauguauccaacaaaggugucgacacaguauccguaggcaacacccuuuacuauguuaauaaacaagaaggaaaaucucuauauguaaaaggcgaaccaauuauaaauuuuuacgacccccuugucuuucccucugacgaauuugacgcuuccauaucacaagucaacgaaaaaaucaaccaaucccucgcauucauacgcaaaucagacgaacuacuacauaacgucaacgcaggcaaauccacaacaaacauaaugauaaccacaaucauaauuguaauaauaguaauacuacuuucucuaauagcagucggauuacucuuauacuguaaagcucgaucaacaccagucacccucucuaaagaucaacuauccggaaucaacaacauagcuuucucaaacuaaggacuaguacuggcugcaucucccuuuccucuguccuccauccuucucccaggauggugaagggggaccugguacccagugauccccaccccaggauccuaaaucaugacuuaccugcuaauaaaaacucauuggaaaagugagaagaucuaaaaaaaaaaaaaaaaaaaaaaaaaaaaaaaaaaaaaaaaaaaaaaaaaaaaaaaaaaaaaaaaugcaucccccccccccccccccccccccccccccccaaaggcucuuuucagagccaccagaauu

SEQ ID NO: 338 - RNA, 2081 nt, Artificial Sequence
  mRNA product Design f-3 comprising derived and/or modified sequence from HRSV(A2)__F0 (opt11)
gggagagucccgcagucggcguccagcggcucugcuuguucgugugugugucguugcaggccuuauucaagcuuaccauggaacuccucauacucaaagccaacgcaaucacaaccauacucaccgccgucaccuucugcuuugcaucuggccagaacaucacugaagaguucuaccaauccacaugcuccgccguaagcaaaggcuaccuauccgcccuacgcaccggcugguacaccagcguaaucaccauagaacucuccaauauaaaagaaaacaaaugcaacggcaccgacgcaaaagucaagcuaauaaaacaagaacucgacaaauacaaaaacgccguuaccgaacuccagcuacucaugcaaucgaccccagcaaccaacaaccgugcgagacgcgaacucccccgcuucaugaacuacacccuaaacaacgccaaaaagaccaacguaacucuauccaagaaacgcaaacgccgcuuccucggauuccuccucggcgucggcuccgcaaucgccagcggcgucgccguuagcaaaguccuucaccucgaaggagaaguaaacaaaauuaaaagcgcccucuuauccacaaacaaggccguaguaucccugucaaacggcgucuccguccuuacauccaaaguccucgaccucaagaacuacauagacaaacagcuacuacccauuguaaauaaacaaagcugcucaauuagcaacaucgaaaccguaaucgaguuccagcagaaaaacaacagacuucucgaaaucacccgcgaguucagcgucaacgccggcguaaccaccccugucucaacauacaugcuaaccaacagcgaacugcucucccucaucaacgacaugcccaucaccaacgaccaaaagaaacucaugagcaacaacguacaaaucgugcgccaacaguccuacucaauaaugucaaucaucaaagaagaagugcuagcauacgucguacaacuaccacucuacggcguaauagauacccccugcuggaagcuccauaccuccccacucuguaccaccaacaccaaagaaggcucaaacaucugccuaacgcgcacagaccguggaugguacugugacaacgccggcuccgucuccuucuucccucaagccgaaacaugcaaaguccaauccaacagagucuucugcgauaccaugaacucccugacacucccaagcgaagucaaccuuugcaacgucgauaucuuuaaccccaaauacgacugcaagaucaugacaucaaaaaccgacguauccuccucuguaauaaccucccuaggcgcaaucguaucaugcuacggcaaaaccaaauguaccgccuccaacaaaaaucgcggcaucaucaaaaccuucucgaacggcugcgacuacgucuccaacaaaggcguagacacaguuuccguaggcaacacccucuacuacgucaauaaacaggaaggcaagucccucuacgucaaaggcgaacccaucaucaauuucuacgacccccucguuuuccccuccgaugaguucgacgcaagcaucagccaggucaacgaaaagauaaaccagucccucgccuucauccgcaaaucagaugaacuccuucacaacguuaacgcaggcaagagcaccaccaacaucaugaucacaacuauaaucaucgucauaaucgucauccuacucucacuaaucgccgucggucuccuacuauauuguaaagcccgaucaacaccggucacacucuccaaagaccaacucuccggaaucaacaauaucgcuuucucgaacuaaggacuaguacuggcugcaucucccuuuccucuguccuccauccuucucccaggauggugaagggggaccugguacccagugauccccaccccaggauccuaaaucaugacuuaccugcuaauaaaaacucauuggaaaagugagaagaucuaaaaaaaaaaaaaaaaaaaaaaaaaaaaaaaaaaaaaaaaaaaaaaaaaaaaaaaaaaaaaaaaugcaucccccccccccccccccccccccccccccccaaaggcucuuuucagagccaccagaauu

SEQ ID NO: 339 - RNA, 2297 nt, Artificial Sequence
  mRNA product Design f-4 comprising derived and/or modified sequence from HRSV(A2)__F0 (artificial)
gggagagucccgcagucggcguccagcggcucugcuuguucgugugugugucguugcaggccuuauucaagcuuaccauggaguugcuaauccucaaagcaaaugcaauuaccacaauccucacugcagucacauuuuguuuugcuucuggucaaaacaucacugaagaauuuuaucaaucaacaugcagugcaguuagcaaaggcuaucuuagugcucugagaacugguugguauaccaguguuauaacuauagaauuaaguaauaucaaggaaaauaaguguaauggaacagaugcuaagguaaaauugauaaaacaagaauuagauaaauauaaaaaugcuguaacagaauugcaguugcucaugcaaagcacaccagcaacaaacaaucgagccagaagagaacuaccaagguuuaugaauuauacacucaacaaugccaaaaaaaccaauguaacauuaagcaagaaaaggaaaagaagauuucuugguuuuuuguuagguguuggaucugcaaucgccaguggcguugcuguaucuaagguccugcaccuagaaggggaagugaacaagaucaaaagugcucuacuauccacaaacaaggcuguagucagcuuaucaaauggaguuagugucuuaaccagcaaaguguuagaccucaaaaacuauauagauaaacaauuguuaccuauugugaacaagcaaagcugcagcauaucaaauauagaaacugugauagaguuccaacaaaagaacaacagacuacuagagauuaccagggaauuuaguguuaaugcagguguaacuacaccuguaagcacuuacauguuaacuaauagugaauuauugucauuaaucaaugauaugccuauaacaaaugaucagaaaaaguuaauguccaacaauguucaaauaguuagacagcaaaguuacucuaucauguccauaauaaaagaggaagucuuagcauauguaguacaauuaccacuauaugguguuauagauacacccuguuggaaacuacacacauccccucuauguacaaccaacacaaaagaaggguccaacaucuguuuaacaagaacugacagaggaugguacugugacaaugcaggaucaguaucuuucuucccacaagcugaaacauguaaaguucaaucaaaucgaguauuuugugacacaaugaacaguuuaacauuaccaagugaaguaaaucucugcaauguugacauauucaaccccaaauaugauuguaaaauuaugacuucaaaaacagauguaagcagcuccguuaucacaucucuaggagccauugugucaugcuauggcaaaacuaaauguacagcauccaauaaaaaucguggaaucauaaagacauuuucuaacgggugcgauuauguaucaaauaaagggguggacacugugucuguagguaacacauuauauuauguaaauaagcaagaagguaaaagucucuauguaaaaggugaaccaauaauaaauuucuaugacccauuaguauuccccucugaugaauuugaugcaucaauaucucaagucaacgagaagauuaaccagagccuagcauuuauucguaaauccgaugaauuauuacauaauguaaaugcugguaaauccaccacaaauaucaugauaacuacuauaauuauagugauuauaguaauauuguuaucauuaauugcuguuggacugcucuuauacuguaaggccagaagcacaccagucacacuaagcaaagaucaacugagugguauaaauaauauugcauuuaguaacuaaggacuagugaagggaacacccaaauuuaauucagccuuaagcacaauuaauuaagagugaaacguaauuguacaagcaguuggucacccaccauagggcaugaucaacaccgcaaccuuuccuuuuucccccagugauucugaaaaaccccucuucccuucagcuugcuuagauguuccaaauuuaguaagcuuaaggcggccuacagaagaaaaagaaaaaaaaggccacaaaaguucccucucacuuucaguaaauaaaauaaaagcagcaacagaaauaaagaaauaaaugaaauucaaaaugaaauaaauauuguguugugcagcauuaaaaaaucaauaaaaauuaaaaaugagcaagaucuaaaaaaaaaaaaaaaaaaaaaaaaaaaaaaaaaaaaaaaaaaaaaaaaaaaaaaaaaaaaaaaaugcaucccccccccccccccccccccccccccccccaaaggcucuuuucagagccaccagaauu

SEQ ID NO: 340 - RNA, 2297 nt, Artificial Sequence
  mRNA product Design f-4 comprising derived and/or modified sequence from HRSV(A2)__F0 (opt1)
gggagagucccgcagucggcguccagcggcucugcuuguucgugugugugucguugcaggccuuauucaagcuuaccauggagcugcucauccugaaggccaacgccaucaccaccauccugacggcggugaccuucugcuucgccagcggccagaacaucaccgaggaguucuaccaguccaccugcagcgccgucuccaagggguaccucagcgcccugcggacgggcugguacaccuccgugaucaccaucgagcugagcaacaucaaggagaacaagugcaacgggaccgacgccaaggugaagcucaucaagcaggagcuggacaaguacaagaacgcggucacggagcugcagcuccugaugcaguccaccccggcaaccaacaaccgcgcccggcgcgagcugccccgguucaugaacuacacccucaacaacgccaagaagacgaacgugacccugagcaagaagcgcaagcggcgcuuccugggcuuccuccugggggugggcuccgccaucgcgagcggcgucgccguguccaaggugcugcaccucgagggggaggucaacaagaucaagagcgcccugcuguccaccaacaaggccguggugagccucuccaacggcgucagcgugcugaccuccaaggugcuggaccucaagaacuacaucgacaagcagcugcugcccaucgucaacaagcagagcugcuccaucagcaacaucgagacggugaucgaguuccagcagaagaacaaccggcuccuggagaucacccgcgaguucagcgugaacgccggggucaccacccccguguccacguacaugcugaccaacagcgagcuccugucccugaucaacgacaugccgaucaccaacgaccagaagaagcucaugagcaacaacgugcagaucguccggcagcaguccuacagcaucauguccaucaucaaggaggaggugcuggcguacgugguccagcugccccucuacggcgugaucgacacccccugcuggaagcugcacacgagcccccugugcaccaccaacaccaaggagggguccaacaucugccucacgcgcaccgaccggggcugguacugcgacaacgccggcagcgucuccuucuucccgcaggccgagaccugcaaggugcagagcaaccgcguguucugcgacaccaugaacucccugacgcugcccagcgagguaaaccucugcaacgucgacaucuucaaccccaaguacgacugcaagaucaugaccuccaagaccgacgugagcuccagcgugaucaccucccugggggccaucgucagcugcuacggcaagacgaagugcaccgccagcaacaagaaccgggggaucaucaagaccuucuccaacggcugcgacuacgugagcaacaagggcguggacaccguguccgucgggaacacccuguacuacgugaacaagcaggagggcaagagccucuacgugaagggggagcccaucaucaacuucuacgacccgcuggucuuccccuccgacgaguucgacgcgagcaucucccaggugaacgagaagaucaaccagagccuggccuucauccgcaaguccgacgagcugcuccacaacgugaacgccggcaagagcacgaccaacaucaugaucaccaccaucaucaucgucaucaucgugauccugcugucccucaucgccguggggcugcugcucuacugcaaggcccggagcacgcccgucacccuguccaaggaccagcugagcggcaucaacaacaucgcguucuccaacugaggacuagugaagggaacacccaaauuuaauucagccuuaagcacaauuaauuaagagugaaacguaauuguacaagcaguuggucacccaccauagggcaugaucaacaccgcaaccuuuccuuuuucccccagugauucugaaaaaccccucuucccuucagcuugcuuagauguuccaaauuuaguaagcuuaaggcggccuacagaagaaaaagaaaaaaaaggccacaaaaguucccucucacuuucaguaaauaaaauaaaagcagcaacagaaauaaagaaauaaaugaaauucaaaaugaaauaaauauuguguugugcagcauuaaaaaaucaauaaaaauuaaaaaugagcaagaucuaaaaaaaaaaaaaaaaaaaaaaaaaaaaaaaaaaaaaaaaaaaaaaaaaaaaaaaaaaaaaaaaugcaucccccccccccccccccccccccccccccccaaaggcucuuuucagagccaccagaauu

SEQ ID NO: 341 - RNA, 2297 nt, Artificial Sequence
  mRNA product Design f-4 comprising derived and/or modified sequence from HRSV(A2)__F0 (opt1)
gggagagucccgcagucggcguccagcggcucugcuuguucgugugugugucguugcaggccuuauucaagcuuaccauggagcugcucauccugaaggccaacgccaucaccaccauccugacggcggugaccuucugcuucgccagcggccagaacaucaccgaggaguucuaccaguccacgugcagcgccgucuccaagggguaccucagcgcccugcgcaccggcugguacaccuccgugaucaccaucgagcugagcaacaucaaggagaacaagugcaacgggaccgacgccaaggugaagcucaucaagcaggagcuggacaaguacaagaacgcggucacggagcugcagcuccugaugcaguccacccccgccaccaacaaccgggcccgccgggagcugccgcgcuucaugaacuacacccucaacaacgccaagaagacgaacgugacccugagcaagaagcggaagcgccgguuccugggcuuccuccugggggugggcuccgcgaucgccagcggcgucgccguguccaaggugcugcaccucgagggggaggucaacaagaucaagagcgcccugcuguccaccaacaaggccguggugagccucuccaacggcgucagcgugcugaccuccaaggugcuggaccucaagaacuacaucgacaagcagcugcugcccaucgucaacaagcagagcugcuccaucagcaacaucgagacggugaucgaguuccagcagaagaacaaccgccuccuggagaucacccgggaguucagcgugaacgcgggggucaccacccccguguccacguacaugcugaccaacagcgagcuccugucccugaucaacgacaugcccaucaccaacgaccagaagaagcucaugagcaacaacgugcagaucguccgccagcaguccuacagcaucauguccaucaucaaggaggaggugcuggccuacgugguccagcugccgcucuacggcgugaucgacacccccugcuggaagcugcacacgagcccccugugcaccaccaacaccaaggagggguccaacaucugccucacgcggaccgaccgcggcugguacugcgacaacgccggcagcgucuccuucuucccccaggccgagaccugcaaggugcagagcaaccggguguucugcgacaccaugaacucccugacgcugccgagcgaggucaaccucugcaacguggacaucuucaaccccaaguacgacugcaagaucaugaccuccaagaccgacgugagcuccagcgucaucaccucccugggggccaucgugagcugcuacggcaagacgaagugcaccgcgagcaacaagaaccgcgggaucaucaagaccuucuccaacggcugcgacuacgugagcaacaagggcgucgacaccguguccguggggaacacccuguacuacgucaacaagcaggagggcaagagccucuacgugaagggggagcccaucaucaacuucuacgacccccugguguucccguccgacgaguucgacgccagcaucucccaggucaacgagaagaucaaccagagccuggccuucauccggaaguccgacgagcuccugcacaacgugaacgccggcaagagcacgaccaacaucaugaucaccaccaucaucaucgugaucaucgucauccugcugucccucaucgccguggggcugcugcucuacugcaaggcgcgcagcacgcccgugacccuguccaaggaccagcugagcggcaucaacaacaucgccuucuccaacugaggacuagugaagggaacacccaaauuuaauucagccuuaagcacaauuaauuaagagugaaacguaauuguacaagcaguuggucacccaccauagggcaugaucaacaccgcaaccuuuccuuuuucccccagugauucugaaaaaccccucuucccuucagcuugcuuagauguuccaaauuuaguaagcuuaaggcggccuacagaagaaaaagaaaaaaaaggccacaaaaguucccucucacuuucaguaaauaaaauaaaagcagcaacagaaauaaagaaauaaaugaaauucaaaaugaaauaaauauuguguugugcagcauuaaaaaaucaauaaaaauuaaaaaugagcaagaucuaaaaaaaaaaaaaaaaaaaaaaaaaaaaaaaaaaaaaaaaaaaaaaaaaaaaaaaaaaaaaaaaugcaucccccccccccccccccccccccccccccccaaaggcucuuuucagagccaccagaauu

SEQ ID NO: 342 - RNA, 2297 nt, Artificial Sequence
  mRNA product Design f-4 comprising derived and/or modified sequence from HRSV(A2)__F0 (opt2)
gggagagucccgcagucggcguccagcggcucugcuuguucgugugugugucguugcaggccuuauucaagcuuaccauggagcuccucauccucaaggccaacgccaucaccaccauccucaccgccgucaccuucugcuucgccuccggccagaacaucaccgaggaguucuaccaguccaccugcuccgccgucuccaagggcuaccucuccgcccuccgcaccggcugguacaccuccgucaucaccaucgagcucuccaacaucaaggagaacaagugcaacggcaccgacgccaaggucaagcucaucaagcaggagcucgacaaguacaagaacgccgucaccgagcuccagcuccucaugcaguccacccccgccaccaacaaccgcgcccgccgcgagcucccccgcuucaugaacuacacccucaacaacgccaagaagaccaacgucacccucuccaagaagcgcaagcgccgcuuccucggcuuccuccucggcgucggcuccgccaucgccuccggcgucgccgucuccaagguccuccaccucgagggcgaggucaacaagaucaaguccgcccuccucuccaccaacaaggccgucgucucccucuccaacggcgucuccguccucaccuccaagguccucgaccucaagaacuacaucgacaagcagcuccuccccaucgucaacaagcaguccugcuccaucuccaacaucgagaccgucaucgaguuccagcagaagaacaaccgccuccucgagaucacccgcgaguucuccgucaacgccggcgucaccacccccgucuccaccuacaugcucaccaacuccgagcuccucucccucaucaacgacaugcccaucaccaacgaccagaagaagcucauguccaacaacguccagaucguccgccagcaguccuacuccaucauguccaucaucaaggaggagguccucgccuacgucguccagcucccccucuacggcgucaucgacacccccugcuggaagcuccacaccuccccccucugcaccaccaacaccaaggagggcuccaacaucugccucacccgcaccgaccgcggcugguacugcgacaacgccggcuccgucuccuucuucccccaggccgagaccugcaagguccaguccaaccgcgucuucugcgacaccaugaacucccucacccuccccuccgaggucaaccucugcaacgucgacaucuucaaccccaaguacgacugcaagaucaugaccuccaagaccgacgucuccuccuccgucaucaccucccucggcgccaucgucuccugcuacggcaagaccaagugcaccgccuccaacaagaaccgcggcaucaucaagaccuucuccaacggcugcgacuacgucuccaacaagggcgucgacaccgucuccgucggcaacacccucuacuacgucaacaagcaggagggcaagucccucuacgucaagggcgagcccaucaucaacuucuacgacccccucgucuuccccuccgacgaguucgacgccuccaucucccaggucaacgagaagaucaaccagucccucgccuucauccgcaaguccgacgagcuccuccacaacgucaacgccggcaaguccaccaccaacaucaugaucaccaccaucaucaucgucaucaucgucauccuccucucccucaucgccgucggccuccuccucuacugcaaggcccgcuccacccccgucacccucuccaaggaccagcucuccggcaucaacaacaucgccuucuccaacugaggacuagugaagggaacacccaaauuuaauucagccuuaagcacaauuaauuaagagugaaacguaauuguacaagcaguuggucacccaccauagggcaugaucaacaccgcaaccuuuccuuuuucccccagugauucugaaaaaccccucuucccuucagcuugcuuagauguuccaaauuuaguaagcuuaaggcggccuacagaagaaaaagaaaaaaaaggccacaaaaguucccucucacuuucaguaaauaaaauaaaagcagcaacagaaauaaagaaauaaaugaaauucaaaaugaaauaaauauuguguugugcagcauuaaaaaaucaauaaaaauuaaaaaugagcaagaucuaaaaaaaaaaaaaaaaaaaaaaaaaaaaaaaaaaaaaaaaaaaaaaaaaaaaaaaaaaaaaaaaugcaucccccccccccccccccccccccccccccccaaaggcucuuuucagagccaccagaauu

SEQ ID NO: 343 - RNA, 2297 nt, Artificial Sequence
  mRNA product Design f-4 comprising derived and/or modified sequence from HRSV(A2)__F0 (opt3)
gggagagucccgcagucggcguccagcggcucugcuuguucgugugugugucguugcaggccuuauucaagcuuaccauggagcugcucauccuuaaggccaacgcuauuaccacaauacugacugcagugacguucugcuuugccagcggccagaauaucaccgaagaguucuaccaauccacauguucugcggucucaaaaggguauuugagugcuuuaagaacuggaugguacaccagcguuauuacaaucgaacuguccaacauuaaggagaauaaaugcaacgguaccgacgccaaggugaaacuaaucaagcaggaacucgauaaguauaaaaaugcaguaacugagcugcagcuucugaugcagucuacacccgccaccaacaauagggcucggcgcgaguugccucgauuuaugaacuacacgcucaauaacgcaaagaaaacuaaugugacccugucgaagaaacguaagagaagguuccugggcuuucucuuaggggucggaucagccauagcuagcggcguggccguuaguaaggugcugcaccuugaaggugaggucaacaaaaucaaguccgcguugcugucuacaaauaaagcagugguaagccuauccaacgggguuucagugcucacuucuaagguccuggaccuuaaaaauuauauugauaagcaacuguugccaaucgugaacaaacagagcuguucuauuuccaacaucgaaaccgugauagaguuccagcagaagaauaaccggcuccuggagauuacacgcgaauuuucagucaaugccggaguuaccacgccggugagcacuuacauguuaacaaacagugagcugcucucucuuaucaaugacaugcccauuaccaacgaucaaaagaaacugauguccaauaacguacagaucgugagacagcagagcuauucgaucaugucuauuauaaaggaagaggucuuggcuuacgugguucaacuaccucuguacggcgugaucgacacuccaugcuggaaacuccauacauccccacuguguaccacgaauaccaaggaaggcucaaacauuugccuuacaaggacugaucgggggugguauugugacaaugccggaagugucagcuucuuuccucaggcagagaccugcaaagugcaguccaaccgcguauucugugauacaaugaauagucugacuuugccaagcgagguuaaccucugcaauguggacaucuuuaaccccaaguacgauuguaagauaaugaccucaaaaacagacgucaguuccagcgugauuaccucucugggugcuaucgucucaugcuauggcaagacuaaaugcacggccaguaacaagaaucgagggaucauuaaaacauucagcaacggaugugauuacguguccaauaagggcguugacaccgugucuguagguaacacuuuauauuacgucaauaagcaagaagggaaaucgcuguaugugaagggagagccuaucauuaacuuuuacgacccccuaguuuucccgagcgaugaauuugacgcguccauaucacaggugaaugagaaaaucaaccagagucucgccuucauuagaaagucugaugaacugcuucacaaugucaacgcaggcaaaagcaccacaaauaucaugaucaccacuauuauaaucgugauuaucguaauuuugcugucccucaucgcugugggccugcuucuguacugcaaggccaggucaacacccguuacguugagcaaggaccagcucucugggauaaacaauaucgcuuucuccaacugaggacuagugaagggaacacccaaauuuaauucagccuuaagcacaauuaauuaagagugaaacguaauuguacaagcaguuggucacccaccauagggcaugaucaacaccgcaaccuuuccuuuuucccccagugauucugaaaaaccccucuucccuucagcuugcuuagauguuccaaauuuaguaagcuuaaggcggccuacagaagaaaaagaaaaaaaaggccacaaaaguucccucucacuuucaguaaauaaaauaaaagcagcaacagaaauaaagaaauaaaugaaauucaaaaugaaauaaauauuguguugugcagcauuaaaaaaucaauaaaaauuaaaaaugagcaagaucuaaaaaaaaaaaaaaaaaaaaaaaaaaaaaaaaaaaaaaaaaaaaaaaaaaaaaaaaaaaaaaaaugcaucccccccccccccccccccccccccccccccaaaggcucuuuucagagccaccagaauu

SEQ ID NO: 344 - RNA, 2297 nt, Artificial Sequence
  mRNA product Design f-4 comprising derived and/or modified sequence from HRSV(A2)__F0 (opt4)
gggagagucccgcagucggcguccagcggcucugcuuguucgugugugugucguugcaggccuuauucaagcuuaccauggagcugcugauccugaaggccaacgccaucaccaccauccugaccgccgugaccuucugcuucgccagcggccagaacaucaccgaggaguucuaccagagcaccugcagcgccgugagcaagggcuaccugagcgcccugagaaccggcugguacaccagcgugaucaccaucgagcugagcaacaucaaggagaacaagugcaacggcaccgacgccaaggugaagcugaucaagcaggagcuggacaaguacaagaacgccgugaccgagcugcagcugcugaugcagagcacccccgccaccaacaacagagccagaagagagcugcccagauucaugaacuacacccugaacaacgccaagaagaccaacgugacccugagcaagaagagaaagagaagauuccugggcuuccugcugggcgugggcagcgccaucgccagcggcguggccgugagcaaggugcugcaccuggagggcgaggugaacaagaucaagagcgcccugcugagcaccaacaaggccguggugagccugagcaacggcgugagcgugcugaccagcaaggugcuggaccugaagaacuacaucgacaagcagcugcugcccaucgugaacaagcagagcugcagcaucagcaacaucgagaccgugaucgaguuccagcagaagaacaacagacugcuggagaucaccagagaguucagcgugaacgccggcgugaccacccccgugagcaccuacaugcugaccaacagcgagcugcugagccugaucaacgacaugcccaucaccaacgaccagaagaagcugaugagcaacaacgugcagaucgugagacagcagagcuacagcaucaugagcaucaucaaggaggaggugcuggccuacguggugcagcugccccuguacggcgugaucgacacccccugcuggaagcugcacaccagcccccugugcaccaccaacaccaaggagggcagcaacaucugccugaccagaaccgacagaggcugguacugcgacaacgccggcagcgugagcuucuucccccaggccgagaccugcaaggugcagagcaacagaguguucugcgacaccaugaacagccugacccugcccagcgaggugaaccugugcaacguggacaucuucaaccccaaguacgacugcaagaucaugaccagcaagaccgacgugagcagcagcgugaucaccagccugggcgccaucgugagcugcuacggcaagaccaagugcaccgccagcaacaagaacagaggcaucaucaagaccuucagcaacggcugcgacuacgugagcaacaagggcguggacaccgugagcgugggcaacacccuguacuacgugaacaagcaggagggcaagagccuguacgugaagggcgagcccaucaucaacuucuacgacccccugguguuccccagcgacgaguucgacgccagcaucagccaggugaacgagaagaucaaccagagccuggccuucaucagaaagagcgacgagcugcugcacaacgugaacgccggcaagagcaccaccaacaucaugaucaccaccaucaucaucgugaucaucgugauccugcugagccugaucgccgugggccugcugcuguacugcaaggccagaagcacccccgugacccugagcaaggaccagcugagcggcaucaacaacaucgccuucagcaacugaggacuagugaagggaacacccaaauuuaauucagccuuaagcacaauuaauuaagagugaaacguaauuguacaagcaguuggucacccaccauagggcaugaucaacaccgcaaccuuuccuuuuucccccagugauucugaaaaaccccucuucccuucagcuugcuuagauguuccaaauuuaguaagcuuaaggcggccuacagaagaaaaagaaaaaaaaggccacaaaaguucccucucacuuucaguaaauaaaauaaaagcagcaacagaaauaaagaaauaaaugaaauucaaaaugaaauaaauauuguguugugcagcauuaaaaaaucaauaaaaauuaaaaaugagcaagaucuaaaaaaaaaaaaaaaaaaaaaaaaaaaaaaaaaaaaaaaaaaaaaaaaaaaaaaaaaaaaaaaaugcaucccccccccccccccccccccccccccccccaaaggcucuuuucagagccaccagaauu

SEQ ID NO: 345 - RNA, 2297 nt, Artificial Sequence
  mRNA product Design f-4 comprising derived and/or modified sequence from HRSV(A2)__F0 (opt5)
gggagagucccgcagucggcguccagcggcucugcuuguucgugugugugucguugcaggccuuauucaagcuuaccauggagcugcucauccugaaggccaacgcuauuaccacaauccuuacggccgugaccuucugcuuugcgagcggccagaauauuacagaagaguucuaccaauccaccuguucugcugucagcaaaggguaucuguccgcccucagaacaggaugguacaccucuguuaucacaauugaacugagcaacaucaaggagaauaaaugcaacggcaccgacgccaaggugaaacuuaucaagcaggaacuggauaaguauaaaaaugcugugacggagcuccagcugcugaugcaguccacccccgccacaaacaaucgggcucgcagagagcucccucgguuuaugaacuacacccugaauaacgccaagaaaacaaaugucacccuuucuaagaaacgcaagagacgguuccugggguuucuccugggagugggcagcgcgauugccuccgggguugcugugagcaagguccuucaccuggaaggagaggugaacaaaaucaagucugcccuccuguccacgaauaaagcuguugugagccugucuaacggcgucuccgugcucacaagcaaggugcuggaccuuaaaaauuauauugauaagcaacugcucccgaucgucaacaaacagucuuguuccauuagcaacaucgaaaccguuauugaguuccagcagaagaauaaccgccugcuugagaucacaagagaauuuuccgugaaugccggcgugaccacccccgucucuacauacaugcugacgaacagcgagcuccugucccugaucaaugacaugccuauuaccaacgaucaaaagaaacucaugagcaauaacgugcagaucguucggcagcagucuuauuccauuaugagcaucauuaaggaagaggugcuggcguacgucgugcaacuuccccuguacgggguuaucgacacaccuugcuggaaacuccauaccucuccccuguguacaaccaauacgaaggaaggaagcaacaucugccuuacacgcaccgauagaggcugguauugugacaaugccggguccgugucuuucuuuccucaggcugagaccugcaaaguccagagcaaccggguguucugugauacaaugaacucccugacccucccgagcgaggucaaucugugcaauguggacauuuuuaaccccaaguacgauuguaagaucaugacaucuaaaacggacguuuccagcucugugauuaccucccugggagccaucgucagcugcuauggcaagacaaaaugcaccgcuuccaacaagaaucgcgggauuaucaaaacauucucuaacggaugugauuacgugagcaauaagggcguugacaccguguccgucggcaacacgcucuauuacgugaauaagcaagaagggaaaucucuguaugugaagggagagccuaucauuaacuuuuacgacccccuuguuuucccuagcgaugaauuugacgccuccaucagccaggucaaugagaaaauuaaccagucucuggccuucaucagaaaguccgaugaacuccugcacaaugugaacgcuggcaaaagcaccacaaauauuaugaucaccacaauuaucaucgugauuaucgucauucugcuuucucucaucgcgguggggcugcugcucuacugcaaggcccgguccacccccguuacgcugagcaaggaccagcuuucuggaauuaacaauaucgcuuucagcaacugaggacuagugaagggaacacccaaauuuaauucagccuuaagcacaauuaauuaagagugaaacguaauuguacaagcaguuggucacccaccauagggcaugaucaacaccgcaaccuuuccuuuuucccccagugauucugaaaaaccccucuucccuucagcuugcuuagauguuccaaauuuaguaagcuuaaggcggccuacagaagaaaaagaaaaaaaaggccacaaaaguucccucucacuuucaguaaauaaaauaaaagcagcaacagaaauaaagaaauaaaugaaauucaaaaugaaauaaauauuguguugugcagcauuaaaaaaucaauaaaaauuaaaaaugagcaagaucuaaaaaaaaaaaaaaaaaaaaaaaaaaaaaaaaaaaaaaaaaaaaaaaaaaaaaaaaaaaaaaaaugcaucccccccccccccccccccccccccccccccaaaggcucuuuucagagccaccagaauu

SEQ ID NO: 346 - RNA, 2297 nt, Artificial Sequence
  mRNA product Design f-4 comprising derived and/or modified sequence from HRSV(A2)__F0 (opt6)
gggagagucccgcagucggcguccagcggcucugcuuguucgugugugugucguugcaggccuuauucaagcuuaccauggaacuucuaauauuaaaagcuaacgcaaucacuacuaucuuaaccgcaguaacauucuguuuugcauccggccaaaacauaacagaagaauuuuaccaaucaacuugcucugcagucucaaaagguuaucuaucugcauuaagaacaggcugguacaccucaguaauaacgaucgaacuaucaaacaucaaagaaaacaaauguaauggaacagacgcaaaaguaaaacuaaucaaacaagaacuagacaaauacaaaaacgcaguaaccgaacuccaacuccucaugcaaaguacaccagcaacaaauaacagagcaagacgugaacuaccacguuuuaugaauuacacgcucaauaacgcaaaaaaaacaaauguuacccuaucaaaaaaacgaaaaagaagauuccucggauuccuacuaggcguaggcucagcaauagcuucaggaguagcaguaucaaaaguacuccaccucgaaggagaaguaaacaaaaucaaaagcgcucuccucucaacaaacaaagcaguuguuucacucucaaacggaguaucaguacuaaccucaaaaguacuugaccuaaaaaauuauauagacaaacaacuauuaccaauaguaaacaaacaaagcugcuccaucuccaacaucgagacagucauagaauuucaacaaaaaaauaaccgccuauuagaaauaaccagagaauuuucaguaaacgcaggaguaacuaccccaguaucaacauauauguuaacaaacucagaacuccuaagucuaaucaacgacaugccaauaaccaacgaccaaaaaaaacuaaugagcaacaauguacaaauaguucgucaacaaucuuacuccauaaugucuauaauaaaagaagaaguacucgccuauguaguccaacuaccacuauacggagucaucgauacaccaugcuggaaacuccacacauccccacucuguacuacuaacaccaaagaagguucaaauauaugccuaaccagaacagauagagguugguacugcgauaaugcaggaucaguauccuuuuucccccaagccgaaacaugcaaaguucaauccaauagaguauuuugugauacaaugaacucuuuaacccucccauccgaagucaaucuauguaacgucgacauauuuaacccaaaauacgauugcaaaauaaugacaucaaaaacagacgucucauccucaguuauaacguccuuaggcgcuauaguaucaugcuacggcaaaacaaaauguacagcaucaaacaaaaacagaggaaucauaaaaacuuucucuaacgguugcgacuauguauccaacaaaggugucgacacaguauccguaggcaacacccuuuacuauguuaauaaacaagaaggaaaaucucuauauguaaaaggcgaaccaauuauaaauuuuuacgacccccuugucuuucccucugacgaauuugacgcuuccauaucacaagucaacgaaaaaaucaaccaaucccucgcauucauacgcaaaucagacgaacuacuacauaacgucaacgcaggcaaauccacaacaaacauaaugauaaccacaaucauaauuguaauaauaguaauacuacuuucucuaauagcagucggauuacucuuauacuguaaagcucgaucaacaccagucacccucucuaaagaucaacuauccggaaucaacaacauagcuuucucaaacuaaggacuagugaagggaacacccaaauuuaauucagccuuaagcacaauuaauuaagagugaaacguaauuguacaagcaguuggucacccaccauagggcaugaucaacaccgcaaccuuuccuuuuucccccagugauucugaaaaaccccucuucccuucagcuugcuuagauguuccaaauuuaguaagcuuaaggcggccuacagaagaaaaagaaaaaaaaggccacaaaaguucccucucacuuucaguaaauaaaauaaaagcagcaacagaaauaaagaaauaaaugaaauucaaaaugaaauaaauauuguguugugcagcauuaaaaaaucaauaaaaauuaaaaaugagcaagaucuaaaaaaaaaaaaaaaaaaaaaaaaaaaaaaaaaaaaaaaaaaaaaaaaaaaaaaaaaaaaaaaaugcaucccccccccccccccccccccccccccccccaaaggcucuuuucagagccaccagaauu

SEQ ID NO: 347 - RNA, 2297 nt, Artificial Sequence
  mRNA product Design f-4 comprising derived and/or modified sequence from HRSV(A2)__F0 (opt11)
gggagagucccgcagucggcguccagcggcucugcuuguucgugugugugucguugcaggccuuauucaagcuuaccauggaacuccucauacucaaagccaacgcaaucacaaccauacucaccgccgucaccuucugcuuugcaucuggccagaacaucacugaagaguucuaccaauccacaugcuccgccguaagcaaaggcuaccuauccgcccuacgcaccggcugguacaccagcguaaucaccauagaacucuccaauauaaaagaaaacaaaugcaacggcaccgacgcaaaagucaagcuaauaaaacaagaacucgacaaauacaaaaacgccguuaccgaacuccagcuacucaugcaaucgaccccagcaaccaacaaccgugcgagacgcgaacucccccgcuucaugaacuacacccuaaacaacgccaaaaagaccaacguaacucuauccaagaaacgcaaacgccgcuuccucggauuccuccucggcgucggcuccgcaaucgccagcggcgucgccguuagcaaaguccuucaccucgaaggagaaguaaacaaaauuaaaagcgcccucuuauccacaaacaaggccguaguaucccugucaaacggcgucuccguccuuacauccaaaguccucgaccucaagaacuacauagacaaacagcuacuacccauuguaaauaaacaaagcugcucaauuagcaacaucgaaaccguaaucgaguuccagcagaaaaacaacagacuucucgaaaucacccgcgaguucagcgucaacgccggcguaaccaccccugucucaacauacaugcuaaccaacagcgaacugcucucccucaucaacgacaugcccaucaccaacgaccaaaagaaacucaugagcaacaacguacaaaucgugcgccaacaguccuacucaauaaugucaaucaucaaagaagaagugcuagcauacgucguacaacuaccacucuacggcguaauagauacccccugcuggaagcuccauaccuccccacucuguaccaccaacaccaaagaaggcucaaacaucugccuaacgcgcacagaccguggaugguacugugacaacgccggcuccgucuccuucuucccucaagccgaaacaugcaaaguccaauccaacagagucuucugcgauaccaugaacucccugacacucccaagcgaagucaaccuuugcaacgucgauaucuuuaaccccaaauacgacugcaagaucaugacaucaaaaaccgacguauccuccucuguaauaaccucccuaggcgcaaucguaucaugcuacggcaaaaccaaauguaccgccuccaacaaaaaucgcggcaucaucaaaaccuucucgaacggcugcgacuacgucuccaacaaaggcguagacacaguuuccguaggcaacacccucuacuacgucaauaaacaggaaggcaagucccucuacgucaaaggcgaacccaucaucaauuucuacgacccccucguuuuccccuccgaugaguucgacgcaagcaucagccaggucaacgaaaagauaaaccagucccucgccuucauccgcaaaucagaugaacuccuucacaacguuaacgcaggcaagagcaccaccaacaucaugaucacaacuauaaucaucgucauaaucgucauccuacucucacuaaucgccgucggucuccuacuauauuguaaagcccgaucaacaccggucacacucuccaaagaccaacucuccggaaucaacaauaucgcuuucucgaacuaaggacuagugaagggaacacccaaauuuaauucagccuuaagcacaauuaauuaagagugaaacguaauuguacaagcaguuggucacccaccauagggcaugaucaacaccgcaaccuuuccuuuuucccccagugauucugaaaaaccccucuucccuucagcuugcuuagauguuccaaauuuaguaagcuuaaggcggccuacagaagaaaaagaaaaaaaaggccacaaaaguucccucucacuuucaguaaauaaaauaaaagcagcaacagaaauaaagaaauaaaugaaauucaaaaugaaauaaauauuguguugugcagcauuaaaaaaucaauaaaaauuaaaaaugagcaagaucuaaaaaaaaaaaaaaaaaaaaaaaaaaaaaaaaaaaaaaaaaaaaaaaaaaaaaaaaaaaaaaaaugcaucccccccccccccccccccccccccccccccaaaggcucuuuucagagccaccagaauu

SEQ ID NO: 348 - RNA, 2073 nt, Artificial Sequence
  mRNA product Design f-5 comprising derived and/or modified sequence from HRSV(A2)__F0 (artificial)
gggagacuuucccauucuguagcagaauuugguguugccuguggucuuggucccgcggagaagcuuaccauggaguugcuaauccucaaagcaaaugcaauuaccacaauccucacugcagucacauuuuguuuugcuucuggucaaaacaucacugaagaauuuuaucaaucaacaugcagugcaguuagcaaaggcuaucuuagugcucugagaacugguugguauaccaguguuauaacuauagaauuaaguaauaucaaggaaaauaaguguaauggaacagaugcuaagguaaaauugauaaaacaagaauuagauaaauauaaaaaugcuguaacagaauugcaguugcucaugcaaagcacaccagcaacaaacaaucgagccagaagagaacuaccaagguuuaugaauuauacacucaacaaugccaaaaaaaccaauguaacauuaagcaagaaaaggaaaagaagauuucuugguuuuuuguuagguguuggaucugcaaucgccaguggcguugcuguaucuaagguccugcaccuagaaggggaagugaacaagaucaaaagugcucuacuauccacaaacaaggcuguagucagcuuaucaaauggaguuagugucuuaaccagcaaaguguuagaccucaaaaacuauauagauaaacaauuguuaccuauugugaacaagcaaagcugcagcauaucaaauauagaaacugugauagaguuccaacaaaagaacaacagacuacuagagauuaccagggaauuuaguguuaaugcagguguaacuacaccuguaagcacuuacauguuaacuaauagugaauuauugucauuaaucaaugauaugccuauaacaaaugaucagaaaaaguuaauguccaacaauguucaaauaguuagacagcaaaguuacucuaucauguccauaauaaaagaggaagucuuagcauauguaguacaauuaccacuauaugguguuauagauacacccuguuggaaacuacacacauccccucuauguacaaccaacacaaaagaaggguccaacaucuguuuaacaagaacugacagaggaugguacugugacaaugcaggaucaguaucuuucuucccacaagcugaaacauguaaaguucaaucaaaucgaguauuuugugacacaaugaacaguuuaacauuaccaagugaaguaaaucucugcaauguugacauauucaaccccaaauaugauuguaaaauuaugacuucaaaaacagauguaagcagcuccguuaucacaucucuaggagccauugugucaugcuauggcaaaacuaaauguacagcauccaauaaaaaucguggaaucauaaagacauuuucuaacgggugcgauuauguaucaaauaaagggguggacacugugucuguagguaacacauuauauuauguaaauaagcaagaagguaaaagucucuauguaaaaggugaaccaauaauaaauuucuaugacccauuaguauuccccucugaugaauuugaugcaucaauaucucaagucaacgagaagauuaaccagagccuagcauuuauucguaaauccgaugaauuauuacauaauguaaaugcugguaaauccaccacaaauaucaugauaacuacuauaauuauagugauuauaguaauauuguuaucauuaauugcuguuggacugcucuuauacuguaaggccagaagcacaccagucacacuaagcaaagaucaacugagugguauaaauaauauugcauuuaguaacuaaggacuaguacuggcugcaucucccuuuccucuguccuccauccuucucccaggauggugaagggggaccugguacccagugauccccaccccaggauccuaaaucaugacuuaccugcuaauaaaaacucauuggaaaagugagaagaucuaaaaaaaaaaaaaaaaaaaaaaaaaaaaaaaaaaaaaaaaaaaaaaaaaaaaaaaaaaaaaaaaugcaucccccccccccccccccccccccccccccccaaaggcucuuuucagagccaccagaauu

SEQ ID NO: 349 - RNA, 2073 nt, Artificial Sequence
  mRNA product Design f-5 comprising derived and/or modified sequence from HRSV(A2)__F0 (opt1)
gggagacuuucccauucuguagcagaauuugguguugccuguggucuuggucccgcggagaagcuuaccauggagcugcucauccugaaggccaacgccaucaccaccauccugacggcggugaccuucugcuucgccagcggccagaacaucaccgaggaguucuaccaguccaccugcagcgccgucuccaagggguaccucagcgcccugcggacgggcugguacaccuccgugaucaccaucgagcugagcaacaucaaggagaacaagugcaacgggaccgacgccaaggugaagcucaucaagcaggagcuggacaaguacaagaacgcggucacggagcugcagcuccugaugcaguccaccccggcaaccaacaaccgcgcccggcgcgagcugccccgguucaugaacuacacccucaacaacgccaagaagacgaacgugacccugagcaagaagcgcaagcggcgcuuccugggcuuccuccugggggugggcuccgccaucgcgagcggcgucgccguguccaaggugcugcaccucgagggggaggucaacaagaucaagagcgcccugcuguccaccaacaaggccguggugagccucuccaacggcgucagcgugcugaccuccaaggugcuggaccucaagaacuacaucgacaagcagcugcugcccaucgucaacaagcagagcugcuccaucagcaacaucgagacggugaucgaguuccagcagaagaacaaccggcuccuggagaucacccgcgaguucagcgugaacgccggggucaccacccccguguccacguacaugcugaccaacagcgagcuccugucccugaucaacgacaugccgaucaccaacgaccagaagaagcucaugagcaacaacgugcagaucguccggcagcaguccuacagcaucauguccaucaucaaggaggaggugcuggcguacgugguccagcugccccucuacggcgugaucgacacccccugcuggaagcugcacacgagcccccugugcaccaccaacaccaaggagggguccaacaucugccucacgcgcaccgaccggggcugguacugcgacaacgccggcagcgucuccuucuucccgcaggccgagaccugcaaggugcagagcaaccgcguguucugcgacaccaugaacucccugacgcugcccagcgagguaaaccucugcaacgucgacaucuucaaccccaaguacgacugcaagaucaugaccuccaagaccgacgugagcuccagcgugaucaccucccugggggccaucgucagcugcuacggcaagacgaagugcaccgccagcaacaagaaccgggggaucaucaagaccuucuccaacggcugcgacuacgugagcaacaagggcguggacaccguguccgucgggaacacccuguacuacgugaacaagcaggagggcaagagccucuacgugaagggggagcccaucaucaacuucuacgacccgcuggucuuccccuccgacgaguucgacgcgagcaucucccaggugaacgagaagaucaaccagagccuggccuucauccgcaaguccgacgagcugcuccacaacgugaacgccggcaagagcacgaccaacaucaugaucaccaccaucaucaucgucaucaucgugauccugcugucccucaucgccguggggcugcugcucuacugcaaggcccggagcacgcccgucacccuguccaaggaccagcugagcggcaucaacaacaucgcguucuccaacugaggacuaguacuggcugcaucucccuuuccucuguccuccauccuucucccaggauggugaagggggaccugguacccagugauccccaccccaggauccuaaaucaugacuuaccugcuaauaaaaacucauuggaaaagugagaagaucuaaaaaaaaaaaaaaaaaaaaaaaaaaaaaaaaaaaaaaaaaaaaaaaaaaaaaaaaaaaaaaaaugcaucccccccccccccccccccccccccccccccaaaggcucuuuucagagccaccagaauu

SEQ ID NO: 350 - RNA, 2073 nt, Artificial Sequence
  mRNA product Design f-5 comprising derived and/or modified sequence from HRSV(A2)__F0 (opt1)
gggagacuuucccauucuguagcagaauuugguguugccuguggucuuggucccgcggagaagcuuaccauggagcugcucauccugaaggccaacgccaucaccaccauccugacggcggugaccuucugcuucgccagcggccagaacaucaccgaggaguucuaccaguccacgugcagcgccgucuccaagggguaccucagcgcccugcgcaccggcugguacaccuccgugaucaccaucgagcugagcaacaucaaggagaacaagugcaacgggaccgacgccaaggugaagcucaucaagcaggagcuggacaaguacaagaacgcggucacggagcugcagcuccugaugcaguccacccccgccaccaacaaccgggcccgccgggagcugccgcgcuucaugaacuacacccucaacaacgccaagaagacgaacgugacccugagcaagaagcggaagcgccgguuccugggcuuccuccugggggugggcuccgcgaucgccagcggcgucgccguguccaaggugcugcaccucgagggggaggucaacaagaucaagagcgcccugcuguccaccaacaaggccguggugagccucuccaacggcgucagcgugcugaccuccaaggugcuggaccucaagaacuacaucgacaagcagcugcugcccaucgucaacaagcagagcugcuccaucagcaacaucgagacggugaucgaguuccagcagaagaacaaccgccuccuggagaucacccgggaguucagcgugaacgcgggggucaccacccccguguccacguacaugcugaccaacagcgagcuccugucccugaucaacgacaugcccaucaccaacgaccagaagaagcucaugagcaacaacgugcagaucguccgccagcaguccuacagcaucauguccaucaucaaggaggaggugcuggccuacgugguccagcugccgcucuacggcgugaucgacacccccugcuggaagcugcacacgagcccccugugcaccaccaacaccaaggagggguccaacaucugccucacgcggaccgaccgcggcugguacugcgacaacgccggcagcgucuccuucuucccccaggccgagaccugcaaggugcagagcaaccggguguucugcgacaccaugaacucccugacgcugccgagcgaggucaaccucugcaacguggacaucuucaaccccaaguacgacugcaagaucaugaccuccaagaccgacgugagcuccagcgucaucaccucccugggggccaucgugagcugcuacggcaagacgaagugcaccgcgagcaacaagaaccgcgggaucaucaagaccuucuccaacggcugcgacuacgugagcaacaagggcgucgacaccguguccguggggaacacccuguacuacgucaacaagcaggagggcaagagccucuacgugaagggggagcccaucaucaacuucuacgacccccugguguucccguccgacgaguucgacgccagcaucucccaggucaacgagaagaucaaccagagccuggccuucauccggaaguccgacgagcuccugcacaacgugaacgccggcaagagcacgaccaacaucaugaucaccaccaucaucaucgugaucaucgucauccugcugucccucaucgccguggggcugcugcucuacugcaaggcgcgcagcacgcccgugacccuguccaaggaccagcugagcggcaucaacaacaucgccuucuccaacugaggacuaguacuggcugcaucucccuuuccucuguccuccauccuucucccaggauggugaagggggaccugguacccagugauccccaccccaggauccuaaaucaugacuuaccugcuaauaaaaacucauuggaaaagugagaagaucuaaaaaaaaaaaaaaaaaaaaaaaaaaaaaaaaaaaaaaaaaaaaaaaaaaaaaaaaaaaaaaaaugcaucccccccccccccccccccccccccccccccaaaggcucuuuucagagccaccagaauu

SEQ ID NO: 351 - RNA, 2073 nt, Artificial Sequence
  mRNA product Design f-5 comprising derived and/or modified sequence from HRSV(A2)__F0 (opt2)
gggagacuuucccauucuguagcagaauuugguguugccuguggucuuggucccgcggagaagcuuaccauggagcuccucauccucaaggccaacgccaucaccaccauccucaccgccgucaccuucugcuucgccuccggccagaacaucaccgaggaguucuaccaguccaccugcuccgccgucuccaagggcuaccucuccgcccuccgcaccggcugguacaccuccgucaucaccaucgagcucuccaacaucaaggagaacaagugcaacggcaccgacgccaaggucaagcucaucaagcaggagcucgacaaguacaagaacgccgucaccgagcuccagcuccucaugcaguccacccccgccaccaacaaccgcgcccgccgcgagcucccccgcuucaugaacuacacccucaacaacgccaagaagaccaacgucacccucuccaagaagcgcaagcgccgcuuccucggcuuccuccucggcgucggcuccgccaucgccuccggcgucgccgucuccaagguccuccaccucgagggcgaggucaacaagaucaaguccgcccuccucuccaccaacaaggccgucgucucccucuccaacggcgucuccguccucaccuccaagguccucgaccucaagaacuacaucgacaagcagcuccuccccaucgucaacaagcaguccugcuccaucuccaacaucgagaccgucaucgaguuccagcagaagaacaaccgccuccucgagaucacccgcgaguucuccgucaacgccggcgucaccacccccgucuccaccuacaugcucaccaacuccgagcuccucucccucaucaacgacaugcccaucaccaacgaccagaagaagcucauguccaacaacguccagaucguccgccagcaguccuacuccaucauguccaucaucaaggaggagguccucgccuacgucguccagcucccccucuacggcgucaucgacacccccugcuggaagcuccacaccuccccccucugcaccaccaacaccaaggagggcuccaacaucugccucacccgcaccgaccgcggcugguacugcgacaacgccggcuccgucuccuucuucccccaggccgagaccugcaagguccaguccaaccgcgucuucugcgacaccaugaacucccucacccuccccuccgaggucaaccucugcaacgucgacaucuucaaccccaaguacgacugcaagaucaugaccuccaagaccgacgucuccuccuccgucaucaccucccucggcgccaucgucuccugcuacggcaagaccaagugcaccgccuccaacaagaaccgcggcaucaucaagaccuucuccaacggcugcgacuacgucuccaacaagggcgucgacaccgucuccgucggcaacacccucuacuacgucaacaagcaggagggcaagucccucuacgucaagggcgagcccaucaucaacuucuacgacccccucgucuuccccuccgacgaguucgacgccuccaucucccaggucaacgagaagaucaaccagucccucgccuucauccgcaaguccgacgagcuccuccacaacgucaacgccggcaaguccaccaccaacaucaugaucaccaccaucaucaucgucaucaucgucauccuccucucccucaucgccgucggccuccuccucuacugcaaggcccgcuccacccccgucacccucuccaaggaccagcucuccggcaucaacaacaucgccuucuccaacugaggacuaguacuggcugcaucucccuuuccucuguccuccauccuucucccaggauggugaagggggaccugguacccagugauccccaccccaggauccuaaaucaugacuuaccugcuaauaaaaacucauuggaaaagugagaagaucuaaaaaaaaaaaaaaaaaaaaaaaaaaaaaaaaaaaaaaaaaaaaaaaaaaaaaaaaaaaaaaaaugcaucccccccccccccccccccccccccccccccaaaggcucuuuucagagccaccagaauu

SEQ ID NO: 352 - RNA, 2073 nt, Artificial Sequence
  mRNA product Design f-5 comprising derived and/or modified sequence from HRSV(A2)__F0 (opt3)
gggagacuuucccauucuguagcagaauuugguguugccuguggucuuggucccgcggagaagcuuaccauggagcugcucauccuuaaggccaacgcuauuaccacaauacugacugcagugacguucugcuuugccagcggccagaauaucaccgaagaguucuaccaauccacauguucugcggucucaaaaggguauuugagugcuuuaagaacuggaugguacaccagcguuauuacaaucgaacuguccaacauuaaggagaauaaaugcaacgguaccgacgccaaggugaaacuaaucaagcaggaacucgauaaguauaaaaaugcaguaacugagcugcagcuucugaugcagucuacacccgccaccaacaauagggcucggcgcgaguugccucgauuuaugaacuacacgcucaauaacgcaaagaaaacuaaugugacccugucgaagaaacguaagagaagguuccugggcuuucucuuaggggucggaucagccauagcuagcggcguggccguuaguaaggugcugcaccuugaaggugaggucaacaaaaucaaguccgcguugcugucuacaaauaaagcagugguaagccuauccaacgggguuucagugcucacuucuaagguccuggaccuuaaaaauuauauugauaagcaacuguugccaaucgugaacaaacagagcuguucuauuuccaacaucgaaaccgugauagaguuccagcagaagaauaaccggcuccuggagauuacacgcgaauuuucagucaaugccggaguuaccacgccggugagcacuuacauguuaacaaacagugagcugcucucucuuaucaaugacaugcccauuaccaacgaucaaaagaaacugauguccaauaacguacagaucgugagacagcagagcuauucgaucaugucuauuauaaaggaagaggucuuggcuuacgugguucaacuaccucuguacggcgugaucgacacuccaugcuggaaacuccauacauccccacuguguaccacgaauaccaaggaaggcucaaacauuugccuuacaaggacugaucgggggugguauugugacaaugccggaagugucagcuucuuuccucaggcagagaccugcaaagugcaguccaaccgcguauucugugauacaaugaauagucugacuuugccaagcgagguuaaccucugcaauguggacaucuuuaaccccaaguacgauuguaagauaaugaccucaaaaacagacgucaguuccagcgugauuaccucucugggugcuaucgucucaugcuauggcaagacuaaaugcacggccaguaacaagaaucgagggaucauuaaaacauucagcaacggaugugauuacguguccaauaagggcguugacaccgugucuguagguaacacuuuauauuacgucaauaagcaagaagggaaaucgcuguaugugaagggagagccuaucauuaacuuuuacgacccccuaguuuucccgagcgaugaauuugacgcguccauaucacaggugaaugagaaaaucaaccagagucucgccuucauuagaaagucugaugaacugcuucacaaugucaacgcaggcaaaagcaccacaaauaucaugaucaccacuauuauaaucgugauuaucguaauuuugcugucccucaucgcugugggccugcuucuguacugcaaggccaggucaacacccguuacguugagcaaggaccagcucucugggauaaacaauaucgcuuucuccaacugaggacuaguacuggcugcaucucccuuuccucuguccuccauccuucucccaggauggugaagggggaccugguacccagugauccccaccccaggauccuaaaucaugacuuaccugcuaauaaaaacucauuggaaaagugagaagaucuaaaaaaaaaaaaaaaaaaaaaaaaaaaaaaaaaaaaaaaaaaaaaaaaaaaaaaaaaaaaaaaaugcaucccccccccccccccccccccccccccccccaaaggcucuuuucagagccaccagaauu

SEQ ID NO: 353 - RNA, 2073 nt, Artificial Sequence
  mRNA product Design f-5 comprising derived and/or modified sequence from HRSV(A2)__F0 (opt4)
gggagacuuucccauucuguagcagaauuugguguugccuguggucuuggucccgcggagaagcuuaccauggagcugcugauccugaaggccaacgccaucaccaccauccugaccgccgugaccuucugcuucgccagcggccagaacaucaccgaggaguucuaccagagcaccugcagcgccgugagcaagggcuaccugagcgcccugagaaccggcugguacaccagcgugaucaccaucgagcugagcaacaucaaggagaacaagugcaacggcaccgacgccaaggugaagcugaucaagcaggagcuggacaaguacaagaacgccgugaccgagcugcagcugcugaugcagagcacccccgccaccaacaacagagccagaagagagcugcccagauucaugaacuacacccugaacaacgccaagaagaccaacgugacccugagcaagaagagaaagagaagauuccugggcuuccugcugggcgugggcagcgccaucgccagcggcguggccgugagcaaggugcugcaccuggagggcgaggugaacaagaucaagagcgcccugcugagcaccaacaaggccguggugagccugagcaacggcgugagcgugcugaccagcaaggugcuggaccugaagaacuacaucgacaagcagcugcugcccaucgugaacaagcagagcugcagcaucagcaacaucgagaccgugaucgaguuccagcagaagaacaacagacugcuggagaucaccagagaguucagcgugaacgccggcgugaccacccccgugagcaccuacaugcugaccaacagcgagcugcugagccugaucaacgacaugcccaucaccaacgaccagaagaagcugaugagcaacaacgugcagaucgugagacagcagagcuacagcaucaugagcaucaucaaggaggaggugcuggccuacguggugcagcugccccuguacggcgugaucgacacccccugcuggaagcugcacaccagcccccugugcaccaccaacaccaaggagggcagcaacaucugccugaccagaaccgacagaggcugguacugcgacaacgccggcagcgugagcuucuucccccaggccgagaccugcaaggugcagagcaacagaguguucugcgacaccaugaacagccugacccugcccagcgaggugaaccugugcaacguggacaucuucaaccccaaguacgacugcaagaucaugaccagcaagaccgacgugagcagcagcgugaucaccagccugggcgccaucgugagcugcuacggcaagaccaagugcaccgccagcaacaagaacagaggcaucaucaagaccuucagcaacggcugcgacuacgugagcaacaagggcguggacaccgugagcgugggcaacacccuguacuacgugaacaagcaggagggcaagagccuguacgugaagggcgagcccaucaucaacuucuacgacccccugguguuccccagcgacgaguucgacgccagcaucagccaggugaacgagaagaucaaccagagccuggccuucaucagaaagagcgacgagcugcugcacaacgugaacgccggcaagagcaccaccaacaucaugaucaccaccaucaucaucgugaucaucgugauccugcugagccugaucgccgugggccugcugcuguacugcaaggccagaagcacccccgugacccugagcaaggaccagcugagcggcaucaacaacaucgccuucagcaacugaggacuaguacuggcugcaucucccuuuccucuguccuccauccuucucccaggauggugaagggggaccugguacccagugauccccaccccaggauccuaaaucaugacuuaccugcuaauaaaaacucauuggaaaagugagaagaucuaaaaaaaaaaaaaaaaaaaaaaaaaaaaaaaaaaaaaaaaaaaaaaaaaaaaaaaaaaaaaaaaugcaucccccccccccccccccccccccccccccccaaaggcucuuuucagagccaccagaauu

SEQ ID NO: 354 - RNA, 2073 nt, Artificial Sequence
  mRNA product Design f-5 comprising derived and/or modified sequence from HRSV(A2)__F0 (opt5)
gggagacuuucccauucuguagcagaauuugguguugccuguggucuuggucccgcggagaagcuuaccauggagcugcucauccugaaggccaacgcuauuaccacaauccuuacggccgugaccuucugcuuugcgagcggccagaauauuacagaagaguucuaccaauccaccuguucugcugucagcaaaggguaucuguccgcccucagaacaggaugguacaccucuguuaucacaauugaacugagcaacaucaaggagaauaaaugcaacggcaccgacgccaaggugaaacuuaucaagcaggaacuggauaaguauaaaaaugcugugacggagcuccagcugcugaugcaguccacccccgccacaaacaaucgggcucgcagagagcucccucgguuuaugaacuacacccugaauaacgccaagaaaacaaaugucacccuuucuaagaaacgcaagagacgguuccugggguuucuccugggagugggcagcgcgauugccuccgggguugcugugagcaagguccuucaccuggaaggagaggugaacaaaaucaagucugcccuccuguccacgaauaaagcuguugugagccugucuaacggcgucuccgugcucacaagcaaggugcuggaccuuaaaaauuauauugauaagcaacugcucccgaucgucaacaaacagucuuguuccauuagcaacaucgaaaccguuauugaguuccagcagaagaauaaccgccugcuugagaucacaagagaauuuuccgugaaugccggcgugaccacccccgucucuacauacaugcugacgaacagcgagcuccugucccugaucaaugacaugccuauuaccaacgaucaaaagaaacucaugagcaauaacgugcagaucguucggcagcagucuuauuccauuaugagcaucauuaaggaagaggugcuggcguacgucgugcaacuuccccuguacgggguuaucgacacaccuugcuggaaacuccauaccucuccccuguguacaaccaauacgaaggaaggaagcaacaucugccuuacacgcaccgauagaggcugguauugugacaaugccggguccgugucuuucuuuccucaggcugagaccugcaaaguccagagcaaccggguguucugugauacaaugaacucccugacccucccgagcgaggucaaucugugcaauguggacauuuuuaaccccaaguacgauuguaagaucaugacaucuaaaacggacguuuccagcucugugauuaccucccugggagccaucgucagcugcuauggcaagacaaaaugcaccgcuuccaacaagaaucgcgggauuaucaaaacauucucuaacggaugugauuacgugagcaauaagggcguugacaccguguccgucggcaacacgcucuauuacgugaauaagcaagaagggaaaucucuguaugugaagggagagccuaucauuaacuuuuacgacccccuuguuuucccuagcgaugaauuugacgccuccaucagccaggucaaugagaaaauuaaccagucucuggccuucaucagaaaguccgaugaacuccugcacaaugugaacgcuggcaaaagcaccacaaauauuaugaucaccacaauuaucaucgugauuaucgucauucugcuuucucucaucgcgguggggcugcugcucuacugcaaggcccgguccacccccguuacgcugagcaaggaccagcuuucuggaauuaacaauaucgcuuucagcaacugaggacuaguacuggcugcaucucccuuuccucuguccuccauccuucucccaggauggugaagggggaccugguacccagugauccccaccccaggauccuaaaucaugacuuaccugcuaauaaaaacucauuggaaaagugagaagaucuaaaaaaaaaaaaaaaaaaaaaaaaaaaaaaaaaaaaaaaaaaaaaaaaaaaaaaaaaaaaaaaaugcaucccccccccccccccccccccccccccccccaaaggcucuuuucagagccaccagaauu

SEQ ID NO: 355 - RNA, 2073 nt, Artificial Sequence
  mRNA product Design f-5 comprising derived and/or modified sequence from HRSV(A2)__F0 (opt6)
gggagacuuucccauucuguagcagaauuugguguugccuguggucuuggucccgcggagaagcuuaccauggaacuucuaauauuaaaagcuaacgcaaucacuacuaucuuaaccgcaguaacauucuguuuugcauccggccaaaacauaacagaagaauuuuaccaaucaacuugcucugcagucucaaaagguuaucuaucugcauuaagaacaggcugguacaccucaguaauaacgaucgaacuaucaaacaucaaagaaaacaaauguaauggaacagacgcaaaaguaaaacuaaucaaacaagaacuagacaaauacaaaaacgcaguaaccgaacuccaacuccucaugcaaaguacaccagcaacaaauaacagagcaagacgugaacuaccacguuuuaugaauuacacgcucaauaacgcaaaaaaaacaaauguuacccuaucaaaaaaacgaaaaagaagauuccucggauuccuacuaggcguaggcucagcaauagcuucaggaguagcaguaucaaaaguacuccaccucgaaggagaaguaaacaaaaucaaaagcgcucuccucucaacaaacaaagcaguuguuucacucucaaacggaguaucaguacuaaccucaaaaguacuugaccuaaaaaauuauauagacaaacaacuauuaccaauaguaaacaaacaaagcugcuccaucuccaacaucgagacagucauagaauuucaacaaaaaaauaaccgccuauuagaaauaaccagagaauuuucaguaaacgcaggaguaacuaccccaguaucaacauauauguuaacaaacucagaacuccuaagucuaaucaacgacaugccaauaaccaacgaccaaaaaaaacuaaugagcaacaauguacaaauaguucgucaacaaucuuacuccauaaugucuauaauaaaagaagaaguacucgccuauguaguccaacuaccacuauacggagucaucgauacaccaugcuggaaacuccacacauccccacucuguacuacuaacaccaaagaagguucaaauauaugccuaaccagaacagauagagguugguacugcgauaaugcaggaucaguauccuuuuucccccaagccgaaacaugcaaaguucaauccaauagaguauuuugugauacaaugaacucuuuaacccucccauccgaagucaaucuauguaacgucgacauauuuaacccaaaauacgauugcaaaauaaugacaucaaaaacagacgucucauccucaguuauaacguccuuaggcgcuauaguaucaugcuacggcaaaacaaaauguacagcaucaaacaaaaacagaggaaucauaaaaacuuucucuaacgguugcgacuauguauccaacaaaggugucgacacaguauccguaggcaacacccuuuacuauguuaauaaacaagaaggaaaaucucuauauguaaaaggcgaaccaauuauaaauuuuuacgacccccuugucuuucccucugacgaauuugacgcuuccauaucacaagucaacgaaaaaaucaaccaaucccucgcauucauacgcaaaucagacgaacuacuacauaacgucaacgcaggcaaauccacaacaaacauaaugauaaccacaaucauaauuguaauaauaguaauacuacuuucucuaauagcagucggauuacucuuauacuguaaagcucgaucaacaccagucacccucucuaaagaucaacuauccggaaucaacaacauagcuuucucaaacuaaggacuaguacuggcugcaucucccuuuccucuguccuccauccuucucccaggauggugaagggggaccugguacccagugauccccaccccaggauccuaaaucaugacuuaccugcuaauaaaaacucauuggaaaagugagaagaucuaaaaaaaaaaaaaaaaaaaaaaaaaaaaaaaaaaaaaaaaaaaaaaaaaaaaaaaaaaaaaaaaugcaucccccccccccccccccccccccccccccccaaaggcucuuuucagagccaccagaauu

SEQ ID NO: 356 - RNA, 2073 nt, Artificial Sequence
  mRNA product Design f-5 comprising derived and/or modified sequence from HRSV(A2)__F0 (opt11)
gggagacuuucccauucuguagcagaauuugguguugccuguggucuuggucccgcggagaagcuuaccauggaacuccucauacucaaagccaacgcaaucacaaccauacucaccgccgucaccuucugcuuugcaucuggccagaacaucacugaagaguucuaccaauccacaugcuccgccguaagcaaaggcuaccuauccgcccuacgcaccggcugguacaccagcguaaucaccauagaacucuccaauauaaaagaaaacaaaugcaacggcaccgacgcaaaagucaagcuaauaaaacaagaacucgacaaauacaaaaacgccguuaccgaacuccagcuacucaugcaaucgaccccagcaaccaacaaccgugcgagacgcgaacucccccgcuucaugaacuacacccuaaacaacgccaaaaagaccaacguaacucuauccaagaaacgcaaacgccgcuuccucggauuccuccucggcgucggcuccgcaaucgccagcggcgucgccguuagcaaaguccuucaccucgaaggagaaguaaacaaaauuaaaagcgcccucuuauccacaaacaaggccguaguaucccugucaaacggcgucuccguccuuacauccaaaguccucgaccucaagaacuacauagacaaacagcuacuacccauuguaaauaaacaaagcugcucaauuagcaacaucgaaaccguaaucgaguuccagcagaaaaacaacagacuucucgaaaucacccgcgaguucagcgucaacgccggcguaaccaccccugucucaacauacaugcuaaccaacagcgaacugcucucccucaucaacgacaugcccaucaccaacgaccaaaagaaacucaugagcaacaacguacaaaucgugcgccaacaguccuacucaauaaugucaaucaucaaagaagaagugcuagcauacgucguacaacuaccacucuacggcguaauagauacccccugcuggaagcuccauaccuccccacucuguaccaccaacaccaaagaaggcucaaacaucugccuaacgcgcacagaccguggaugguacugugacaacgccggcuccgucuccuucuucccucaagccgaaacaugcaaaguccaauccaacagagucuucugcgauaccaugaacucccugacacucccaagcgaagucaaccuuugcaacgucgauaucuuuaaccccaaauacgacugcaagaucaugacaucaaaaaccgacguauccuccucuguaauaaccucccuaggcgcaaucguaucaugcuacggcaaaaccaaauguaccgccuccaacaaaaaucgcggcaucaucaaaaccuucucgaacggcugcgacuacgucuccaacaaaggcguagacacaguuuccguaggcaacacccucuacuacgucaauaaacaggaaggcaagucccucuacgucaaaggcgaacccaucaucaauuucuacgacccccucguuuuccccuccgaugaguucgacgcaagcaucagccaggucaacgaaaagauaaaccagucccucgccuucauccgcaaaucagaugaacuccuucacaacguuaacgcaggcaagagcaccaccaacaucaugaucacaacuauaaucaucgucauaaucgucauccuacucucacuaaucgccgucggucuccuacuauauuguaaagcccgaucaacaccggucacacucuccaaagaccaacucuccggaaucaacaauaucgcuuucucgaacuaaggacuaguacuggcugcaucucccuuuccucuguccuccauccuucucccaggauggugaagggggaccugguacccagugauccccaccccaggauccuaaaucaugacuuaccugcuaauaaaaacucauuggaaaagugagaagaucuaaaaaaaaaaaaaaaaaaaaaaaaaaaaaaaaaaaaaaaaaaaaaaaaaaaaaaaaaaaaaaaaugcaucccccccccccccccccccccccccccccccaaaggcucuuuucagagccaccagaauu

SEQ ID NO: 357 - RNA, 2069 nt, Artificial Sequence
  mRNA product Design g-1 comprising derived and/or modified sequence from HRSV(A2)__F0 (artificial)
gggagacuuucccauucuguagcagaauuugguguugccuguggucuuggucccgcggagaagcuuaccauggaguugcuaauccucaaagcaaaugcaauuaccacaauccucacugcagucacauuuuguuuugcuucuggucaaaacaucacugaagaauuuuaucaaucaacaugcagugcaguuagcaaaggcuaucuuagugcucugagaacugguugguauaccaguguuauaacuauagaauuaaguaauaucaaggaaaauaaguguaauggaacagaugcuaagguaaaauugauaaaacaagaauuagauaaauauaaaaaugcuguaacagaauugcaguugcucaugcaaagcacaccagcaacaaacaaucgagccagaagagaacuaccaagguuuaugaauuauacacucaacaaugccaaaaaaaccaauguaacauuaagcaagaaaaggaaaagaagauuucuugguuuuuuguuagguguuggaucugcaaucgccaguggcguugcuguaucuaagguccugcaccuagaaggggaagugaacaagaucaaaagugcucuacuauccacaaacaaggcuguagucagcuuaucaaauggaguuagugucuuaaccagcaaaguguuagaccucaaaaacuauauagauaaacaauuguuaccuauugugaacaagcaaagcugcagcauaucaaauauagaaacugugauagaguuccaacaaaagaacaacagacuacuagagauuaccagggaauuuaguguuaaugcagguguaacuacaccuguaagcacuuacauguuaacuaauagugaauuauugucauuaaucaaugauaugccuauaacaaaugaucagaaaaaguuaauguccaacaauguucaaauaguuagacagcaaaguuacucuaucauguccauaauaaaagaggaagucuuagcauauguaguacaauuaccacuauaugguguuauagauacacccuguuggaaacuacacacauccccucuauguacaaccaacacaaaagaaggguccaacaucuguuuaacaagaacugacagaggaugguacugugacaaugcaggaucaguaucuuucuucccacaagcugaaacauguaaaguucaaucaaaucgaguauuuugugacacaaugaacaguuuaacauuaccaagugaaguaaaucucugcaauguugacauauucaaccccaaauaugauuguaaaauuaugacuucaaaaacagauguaagcagcuccguuaucacaucucuaggagccauugugucaugcuauggcaaaacuaaauguacagcauccaauaaaaaucguggaaucauaaagacauuuucuaacgggugcgauuauguaucaaauaaagggguggacacugugucuguagguaacacauuauauuauguaaauaagcaagaagguaaaagucucuauguaaaaggugaaccaauaauaaauuucuaugacccauuaguauuccccucugaugaauuugaugcaucaauaucucaagucaacgagaagauuaaccagagccuagcauuuauucguaaauccgaugaauuauuacauaauguaaaugcugguaaauccaccacaaauaucaugauaacuacuauaauuauagugauuauaguaauauuguuaucauuaauugcuguuggacugcucuuauacuguaaggccagaagcacaccagucacacuaagcaaagaucaacugagugguauaaauaauauugcauuuaguaacuaaggacuaguggaagcauuuuccuggcugauuaaaagaaauuacucagcuauggucaucuguuccuguuagaaggcuaugcagcauauuauauacuaugcgcauguuaugaaaugcauaauaaaaaauuuuaaaaaaucuaaaagaucuaaaaaaaaaaaaaaaaaaaaaaaaaaaaaaaaaaaaaaaaaaaaaaaaaaaaaaaaaaaaaaaaugcaucccccccccccccccccccccccccccccccaaaggcucuuuucagagccaccagaauu

SEQ ID NO: 358 - RNA, 2069 nt, Artificial Sequence
  mRNA product Design g-1 comprising derived and/or modified sequence from HRSV(A2)__F0 (opt1)
gggagacuuucccauucuguagcagaauuugguguugccuguggucuuggucccgcggagaagcuuaccauggagcugcucauccugaaggccaacgccaucaccaccauccugacggcggugaccuucugcuucgccagcggccagaacaucaccgaggaguucuaccaguccaccugcagcgccgucuccaagggguaccucagcgcccugcggacgggcugguacaccuccgugaucaccaucgagcugagcaacaucaaggagaacaagugcaacgggaccgacgccaaggugaagcucaucaagcaggagcuggacaaguacaagaacgcggucacggagcugcagcuccugaugcaguccaccccggcaaccaacaaccgcgcccggcgcgagcugccccgguucaugaacuacacccucaacaacgccaagaagacgaacgugacccugagcaagaagcgcaagcggcgcuuccugggcuuccuccugggggugggcuccgccaucgcgagcggcgucgccguguccaaggugcugcaccucgagggggaggucaacaagaucaagagcgcccugcuguccaccaacaaggccguggugagccucuccaacggcgucagcgugcugaccuccaaggugcuggaccucaagaacuacaucgacaagcagcugcugcccaucgucaacaagcagagcugcuccaucagcaacaucgagacggugaucgaguuccagcagaagaacaaccggcuccuggagaucacccgcgaguucagcgugaacgccggggucaccacccccguguccacguacaugcugaccaacagcgagcuccugucccugaucaacgacaugccgaucaccaacgaccagaagaagcucaugagcaacaacgugcagaucguccggcagcaguccuacagcaucauguccaucaucaaggaggaggugcuggcguacgugguccagcugccccucuacggcgugaucgacacccccugcuggaagcugcacacgagcccccugugcaccaccaacaccaaggagggguccaacaucugccucacgcgcaccgaccggggcugguacugcgacaacgccggcagcgucuccuucuucccgcaggccgagaccugcaaggugcagagcaaccgcguguucugcgacaccaugaacucccugacgcugcccagcgagguaaaccucugcaacgucgacaucuucaaccccaaguacgacugcaagaucaugaccuccaagaccgacgugagcuccagcgugaucaccucccugggggccaucgucagcugcuacggcaagacgaagugcaccgccagcaacaagaaccgggggaucaucaagaccuucuccaacggcugcgacuacgugagcaacaagggcguggacaccguguccgucgggaacacccuguacuacgugaacaagcaggagggcaagagccucuacgugaagggggagcccaucaucaacuucuacgacccgcuggucuuccccuccgacgaguucgacgcgagcaucucccaggugaacgagaagaucaaccagagccuggccuucauccgcaaguccgacgagcugcuccacaacgugaacgccggcaagagcacgaccaacaucaugaucaccaccaucaucaucgucaucaucgugauccugcugucccucaucgccguggggcugcugcucuacugcaaggcccggagcacgcccgucacccuguccaaggaccagcugagcggcaucaacaacaucgcguucuccaacugaggacuaguggaagcauuuuccuggcugauuaaaagaaauuacucagcuauggucaucuguuccuguuagaaggcuaugcagcauauuauauacuaugcgcauguuaugaaaugcauaauaaaaaauuuuaaaaaaucuaaaagaucuaaaaaaaaaaaaaaaaaaaaaaaaaaaaaaaaaaaaaaaaaaaaaaaaaaaaaaaaaaaaaaaaugcaucccccccccccccccccccccccccccccccaaaggcucuuuucagagccaccagaauu

SEQ ID NO: 359 - RNA, 2069 nt, Artificial Sequence
  mRNA product Design g-1 comprising derived and/or modified sequence from HRSV(A2)__F0 (opt1)
gggagacuuucccauucuguagcagaauuugguguugccuguggucuuggucccgcggagaagcuuaccauggagcugcucauccugaaggccaacgccaucaccaccauccugacggcggugaccuucugcuucgccagcggccagaacaucaccgaggaguucuaccaguccacgugcagcgccgucuccaagggguaccucagcgcccugcgcaccggcugguacaccuccgugaucaccaucgagcugagcaacaucaaggagaacaagugcaacgggaccgacgccaaggugaagcucaucaagcaggagcuggacaaguacaagaacgcggucacggagcugcagcuccugaugcaguccacccccgccaccaacaaccgggcccgccgggagcugccgcgcuucaugaacuacacccucaacaacgccaagaagacgaacgugacccugagcaagaagcggaagcgccgguuccugggcuuccuccugggggugggcuccgcgaucgccagcggcgucgccguguccaaggugcugcaccucgagggggaggucaacaagaucaagagcgcccugcuguccaccaacaaggccguggugagccucuccaacggcgucagcgugcugaccuccaaggugcuggaccucaagaacuacaucgacaagcagcugcugcccaucgucaacaagcagagcugcuccaucagcaacaucgagacggugaucgaguuccagcagaagaacaaccgccuccuggagaucacccgggaguucagcgugaacgcgggggucaccacccccguguccacguacaugcugaccaacagcgagcuccugucccugaucaacgacaugcccaucaccaacgaccagaagaagcucaugagcaacaacgugcagaucguccgccagcaguccuacagcaucauguccaucaucaaggaggaggugcuggccuacgugguccagcugccgcucuacggcgugaucgacacccccugcuggaagcugcacacgagcccccugugcaccaccaacaccaaggagggguccaacaucugccucacgcggaccgaccgcggcugguacugcgacaacgccggcagcgucuccuucuucccccaggccgagaccugcaaggugcagagcaaccggguguucugcgacaccaugaacucccugacgcugccgagcgaggucaaccucugcaacguggacaucuucaaccccaaguacgacugcaagaucaugaccuccaagaccgacgugagcuccagcgucaucaccucccugggggccaucgugagcugcuacggcaagacgaagugcaccgcgagcaacaagaaccgcgggaucaucaagaccuucuccaacggcugcgacuacgugagcaacaagggcgucgacaccguguccguggggaacacccuguacuacgucaacaagcaggagggcaagagccucuacgugaagggggagcccaucaucaacuucuacgacccccugguguucccguccgacgaguucgacgccagcaucucccaggucaacgagaagaucaaccagagccuggccuucauccggaaguccgacgagcuccugcacaacgugaacgccggcaagagcacgaccaacaucaugaucaccaccaucaucaucgugaucaucgucauccugcugucccucaucgccguggggcugcugcucuacugcaaggcgcgcagcacgcccgugacccuguccaaggaccagcugagcggcaucaacaacaucgccuucuccaacugaggacuaguggaagcauuuuccuggcugauuaaaagaaauuacucagcuauggucaucuguuccuguuagaaggcuaugcagcauauuauauacuaugcgcauguuaugaaaugcauaauaaaaaauuuuaaaaaaucuaaaagaucuaaaaaaaaaaaaaaaaaaaaaaaaaaaaaaaaaaaaaaaaaaaaaaaaaaaaaaaaaaaaaaaaugcaucccccccccccccccccccccccccccccccaaaggcucuuuucagagccaccagaauu

SEQ ID NO: 360 - RNA, 2069 nt, Artificial Sequence
  mRNA product Design g-1 comprising derived and/or modified sequence from HRSV(A2)__F0 (opt2)
gggagacuuucccauucuguagcagaauuugguguugccuguggucuuggucccgcggagaagcuuaccauggagcuccucauccucaaggccaacgccaucaccaccauccucaccgccgucaccuucugcuucgccuccggccagaacaucaccgaggaguucuaccaguccaccugcuccgccgucuccaagggcuaccucuccgcccuccgcaccggcugguacaccuccgucaucaccaucgagcucuccaacaucaaggagaacaagugcaacggcaccgacgccaaggucaagcucaucaagcaggagcucgacaaguacaagaacgccgucaccgagcuccagcuccucaugcaguccacccccgccaccaacaaccgcgcccgccgcgagcucccccgcuucaugaacuacacccucaacaacgccaagaagaccaacgucacccucuccaagaagcgcaagcgccgcuuccucggcuuccuccucggcgucggcuccgccaucgccuccggcgucgccgucuccaagguccuccaccucgagggcgaggucaacaagaucaaguccgcccuccucuccaccaacaaggccgucgucucccucuccaacggcgucuccguccucaccuccaagguccucgaccucaagaacuacaucgacaagcagcuccuccccaucgucaacaagcaguccugcuccaucuccaacaucgagaccgucaucgaguuccagcagaagaacaaccgccuccucgagaucacccgcgaguucuccgucaacgccggcgucaccacccccgucuccaccuacaugcucaccaacuccgagcuccucucccucaucaacgacaugcccaucaccaacgaccagaagaagcucauguccaacaacguccagaucguccgccagcaguccuacuccaucauguccaucaucaaggaggagguccucgccuacgucguccagcucccccucuacggcgucaucgacacccccugcuggaagcuccacaccuccccccucugcaccaccaacaccaaggagggcuccaacaucugccucacccgcaccgaccgcggcugguacugcgacaacgccggcuccgucuccuucuucccccaggccgagaccugcaagguccaguccaaccgcgucuucugcgacaccaugaacucccucacccuccccuccgaggucaaccucugcaacgucgacaucuucaaccccaaguacgacugcaagaucaugaccuccaagaccgacgucuccuccuccgucaucaccucccucggcgccaucgucuccugcuacggcaagaccaagugcaccgccuccaacaagaaccgcggcaucaucaagaccuucuccaacggcugcgacuacgucuccaacaagggcgucgacaccgucuccgucggcaacacccucuacuacgucaacaagcaggagggcaagucccucuacgucaagggcgagcccaucaucaacuucuacgacccccucgucuuccccuccgacgaguucgacgccuccaucucccaggucaacgagaagaucaaccagucccucgccuucauccgcaaguccgacgagcuccuccacaacgucaacgccggcaaguccaccaccaacaucaugaucaccaccaucaucaucgucaucaucgucauccuccucucccucaucgccgucggccuccuccucuacugcaaggcccgcuccacccccgucacccucuccaaggaccagcucuccggcaucaacaacaucgccuucuccaacugaggacuaguggaagcauuuuccuggcugauuaaaagaaauuacucagcuauggucaucuguuccuguuagaaggcuaugcagcauauuauauacuaugcgcauguuaugaaaugcauaauaaaaaauuuuaaaaaaucuaaaagaucuaaaaaaaaaaaaaaaaaaaaaaaaaaaaaaaaaaaaaaaaaaaaaaaaaaaaaaaaaaaaaaaaugcaucccccccccccccccccccccccccccccccaaaggcucuuuucagagccaccagaauu

SEQ ID NO: 361 - RNA, 2069 nt, Artificial Sequence
  mRNA product Design g-1 comprising derived and/or modified sequence from HRSV(A2)__F0 (opt3)
gggagacuuucccauucuguagcagaauuugguguugccuguggucuuggucccgcggagaagcuuaccauggagcugcucauccuuaaggccaacgcuauuaccacaauacugacugcagugacguucugcuuugccagcggccagaauaucaccgaagaguucuaccaauccacauguucugcggucucaaaaggguauuugagugcuuuaagaacuggaugguacaccagcguuauuacaaucgaacuguccaacauuaaggagaauaaaugcaacgguaccgacgccaaggugaaacuaaucaagcaggaacucgauaaguauaaaaaugcaguaacugagcugcagcuucugaugcagucuacacccgccaccaacaauagggcucggcgcgaguugccucgauuuaugaacuacacgcucaauaacgcaaagaaaacuaaugugacccugucgaagaaacguaagagaagguuccugggcuuucucuuaggggucggaucagccauagcuagcggcguggccguuaguaaggugcugcaccuugaaggugaggucaacaaaaucaaguccgcguugcugucuacaaauaaagcagugguaagccuauccaacgggguuucagugcucacuucuaagguccuggaccuuaaaaauuauauugauaagcaacuguugccaaucgugaacaaacagagcuguucuauuuccaacaucgaaaccgugauagaguuccagcagaagaauaaccggcuccuggagauuacacgcgaauuuucagucaaugccggaguuaccacgccggugagcacuuacauguuaacaaacagugagcugcucucucuuaucaaugacaugcccauuaccaacgaucaaaagaaacugauguccaauaacguacagaucgugagacagcagagcuauucgaucaugucuauuauaaaggaagaggucuuggcuuacgugguucaacuaccucuguacggcgugaucgacacuccaugcuggaaacuccauacauccccacuguguaccacgaauaccaaggaaggcucaaacauuugccuuacaaggacugaucgggggugguauugugacaaugccggaagugucagcuucuuuccucaggcagagaccugcaaagugcaguccaaccgcguauucugugauacaaugaauagucugacuuugccaagcgagguuaaccucugcaauguggacaucuuuaaccccaaguacgauuguaagauaaugaccucaaaaacagacgucaguuccagcgugauuaccucucugggugcuaucgucucaugcuauggcaagacuaaaugcacggccaguaacaagaaucgagggaucauuaaaacauucagcaacggaugugauuacguguccaauaagggcguugacaccgugucuguagguaacacuuuauauuacgucaauaagcaagaagggaaaucgcuguaugugaagggagagccuaucauuaacuuuuacgacccccuaguuuucccgagcgaugaauuugacgcguccauaucacaggugaaugagaaaaucaaccagagucucgccuucauuagaaagucugaugaacugcuucacaaugucaacgcaggcaaaagcaccacaaauaucaugaucaccacuauuauaaucgugauuaucguaauuuugcugucccucaucgcugugggccugcuucuguacugcaaggccaggucaacacccguuacguugagcaaggaccagcucucugggauaaacaauaucgcuuucuccaacugaggacuaguggaagcauuuuccuggcugauuaaaagaaauuacucagcuauggucaucuguuccuguuagaaggcuaugcagcauauuauauacuaugcgcauguuaugaaaugcauaauaaaaaauuuuaaaaaaucuaaaagaucuaaaaaaaaaaaaaaaaaaaaaaaaaaaaaaaaaaaaaaaaaaaaaaaaaaaaaaaaaaaaaaaaugcaucccccccccccccccccccccccccccccccaaaggcucuuuucagagccaccagaauu

SEQ ID NO: 362 - RNA, 2069 nt, Artificial Sequence
  mRNA product Design g-1 comprising derived and/or modified sequence from HRSV(A2)__F0 (opt4)
gggagacuuucccauucuguagcagaauuugguguugccuguggucuuggucccgcggagaagcuuaccauggagcugcugauccugaaggccaacgccaucaccaccauccugaccgccgugaccuucugcuucgccagcggccagaacaucaccgaggaguucuaccagagcaccugcagcgccgugagcaagggcuaccugagcgcccugagaaccggcugguacaccagcgugaucaccaucgagcugagcaacaucaaggagaacaagugcaacggcaccgacgccaaggugaagcugaucaagcaggagcuggacaaguacaagaacgccgugaccgagcugcagcugcugaugcagagcacccccgccaccaacaacagagccagaagagagcugcccagauucaugaacuacacccugaacaacgccaagaagaccaacgugacccugagcaagaagagaaagagaagauuccugggcuuccugcugggcgugggcagcgccaucgccagcggcguggccgugagcaaggugcugcaccuggagggcgaggugaacaagaucaagagcgcccugcugagcaccaacaaggccguggugagccugagcaacggcgugagcgugcugaccagcaaggugcuggaccugaagaacuacaucgacaagcagcugcugcccaucgugaacaagcagagcugcagcaucagcaacaucgagaccgugaucgaguuccagcagaagaacaacagacugcuggagaucaccagagaguucagcgugaacgccggcgugaccacccccgugagcaccuacaugcugaccaacagcgagcugcugagccugaucaacgacaugcccaucaccaacgaccagaagaagcugaugagcaacaacgugcagaucgugagacagcagagcuacagcaucaugagcaucaucaaggaggaggugcuggccuacguggugcagcugccccuguacggcgugaucgacacccccugcuggaagcugcacaccagcccccugugcaccaccaacaccaaggagggcagcaacaucugccugaccagaaccgacagaggcugguacugcgacaacgccggcagcgugagcuucuucccccaggccgagaccugcaaggugcagagcaacagaguguucugcgacaccaugaacagccugacccugcccagcgaggugaaccugugcaacguggacaucuucaaccccaaguacgacugcaagaucaugaccagcaagaccgacgugagcagcagcgugaucaccagccugggcgccaucgugagcugcuacggcaagaccaagugcaccgccagcaacaagaacagaggcaucaucaagaccuucagcaacggcugcgacuacgugagcaacaagggcguggacaccgugagcgugggcaacacccuguacuacgugaacaagcaggagggcaagagccuguacgugaagggcgagcccaucaucaacuucuacgacccccugguguuccccagcgacgaguucgacgccagcaucagccaggugaacgagaagaucaaccagagccuggccuucaucagaaagagcgacgagcugcugcacaacgugaacgccggcaagagcaccaccaacaucaugaucaccaccaucaucaucgugaucaucgugauccugcugagccugaucgccgugggccugcugcuguacugcaaggccagaagcacccccgugacccugagcaaggaccagcugagcggcaucaacaacaucgccuucagcaacugaggacuaguggaagcauuuuccuggcugauuaaaagaaauuacucagcuauggucaucuguuccuguuagaaggcuaugcagcauauuauauacuaugcgcauguuaugaaaugcauaauaaaaaauuuuaaaaaaucuaaaagaucuaaaaaaaaaaaaaaaaaaaaaaaaaaaaaaaaaaaaaaaaaaaaaaaaaaaaaaaaaaaaaaaaugcaucccccccccccccccccccccccccccccccaaaggcucuuuucagagccaccagaauu

SEQ ID NO: 363 - RNA, 2069 nt, Artificial Sequence
  mRNA product Design g-1 comprising derived and/or modified sequence from HRSV(A2)__F0 (opt5)
gggagacuuucccauucuguagcagaauuugguguugccuguggucuuggucccgcggagaagcuuaccauggagcugcucauccugaaggccaacgcuauuaccacaauccuuacggccgugaccuucugcuuugcgagcggccagaauauuacagaagaguucuaccaauccaccuguucugcugucagcaaaggguaucuguccgcccucagaacaggaugguacaccucuguuaucacaauugaacugagcaacaucaaggagaauaaaugcaacggcaccgacgccaaggugaaacuuaucaagcaggaacuggauaaguauaaaaaugcugugacggagcuccagcugcugaugcaguccacccccgccacaaacaaucgggcucgcagagagcucccucgguuuaugaacuacacccugaauaacgccaagaaaacaaaugucacccuuucuaagaaacgcaagagacgguuccugggguuucuccugggagugggcagcgcgauugccuccgggguugcugugagcaagguccuucaccuggaaggagaggugaacaaaaucaagucugcccuccuguccacgaauaaagcuguugugagccugucuaacggcgucuccgugcucacaagcaaggugcuggaccuuaaaaauuauauugauaagcaacugcucccgaucgucaacaaacagucuuguuccauuagcaacaucgaaaccguuauugaguuccagcagaagaauaaccgccugcuugagaucacaagagaauuuuccgugaaugccggcgugaccacccccgucucuacauacaugcugacgaacagcgagcuccugucccugaucaaugacaugccuauuaccaacgaucaaaagaaacucaugagcaauaacgugcagaucguucggcagcagucuuauuccauuaugagcaucauuaaggaagaggugcuggcguacgucgugcaacuuccccuguacgggguuaucgacacaccuugcuggaaacuccauaccucuccccuguguacaaccaauacgaaggaaggaagcaacaucugccuuacacgcaccgauagaggcugguauugugacaaugccggguccgugucuuucuuuccucaggcugagaccugcaaaguccagagcaaccggguguucugugauacaaugaacucccugacccucccgagcgaggucaaucugugcaauguggacauuuuuaaccccaaguacgauuguaagaucaugacaucuaaaacggacguuuccagcucugugauuaccucccugggagccaucgucagcugcuauggcaagacaaaaugcaccgcuuccaacaagaaucgcgggauuaucaaaacauucucuaacggaugugauuacgugagcaauaagggcguugacaccguguccgucggcaacacgcucuauuacgugaauaagcaagaagggaaaucucuguaugugaagggagagccuaucauuaacuuuuacgacccccuuguuuucccuagcgaugaauuugacgccuccaucagccaggucaaugagaaaauuaaccagucucuggccuucaucagaaaguccgaugaacuccugcacaaugugaacgcuggcaaaagcaccacaaauauuaugaucaccacaauuaucaucgugauuaucgucauucugcuuucucucaucgcgguggggcugcugcucuacugcaaggcccgguccacccccguuacgcugagcaaggaccagcuuucuggaauuaacaauaucgcuuucagcaacugaggacuaguggaagcauuuuccuggcugauuaaaagaaauuacucagcuauggucaucuguuccuguuagaaggcuaugcagcauauuauauacuaugcgcauguuaugaaaugcauaauaaaaaauuuuaaaaaaucuaaaagaucuaaaaaaaaaaaaaaaaaaaaaaaaaaaaaaaaaaaaaaaaaaaaaaaaaaaaaaaaaaaaaaaaugcaucccccccccccccccccccccccccccccccaaaggcucuuuucagagccaccagaauu

SEQ ID NO: 364 - RNA, 2069 nt, Artificial Sequence
  mRNA product Design g-1 comprising derived and/or modified sequence from HRSV(A2)__F0 (opt6)
gggagacuuucccauucuguagcagaauuugguguugccuguggucuuggucccgcggagaagcuuaccauggaacuucuaauauuaaaagcuaacgcaaucacuacuaucuuaaccgcaguaacauucuguuuugcauccggccaaaacauaacagaagaauuuuaccaaucaacuugcucugcagucucaaaagguuaucuaucugcauuaagaacaggcugguacaccucaguaauaacgaucgaacuaucaaacaucaaagaaaacaaauguaauggaacagacgcaaaaguaaaacuaaucaaacaagaacuagacaaauacaaaaacgcaguaaccgaacuccaacuccucaugcaaaguacaccagcaacaaauaacagagcaagacgugaacuaccacguuuuaugaauuacacgcucaauaacgcaaaaaaaacaaauguuacccuaucaaaaaaacgaaaaagaagauuccucggauuccuacuaggcguaggcucagcaauagcuucaggaguagcaguaucaaaaguacuccaccucgaaggagaaguaaacaaaaucaaaagcgcucuccucucaacaaacaaagcaguuguuucacucucaaacggaguaucaguacuaaccucaaaaguacuugaccuaaaaaauuauauagacaaacaacuauuaccaauaguaaacaaacaaagcugcuccaucuccaacaucgagacagucauagaauuucaacaaaaaaauaaccgccuauuagaaauaaccagagaauuuucaguaaacgcaggaguaacuaccccaguaucaacauauauguuaacaaacucagaacuccuaagucuaaucaacgacaugccaauaaccaacgaccaaaaaaaacuaaugagcaacaauguacaaauaguucgucaacaaucuuacuccauaaugucuauaauaaaagaagaaguacucgccuauguaguccaacuaccacuauacggagucaucgauacaccaugcuggaaacuccacacauccccacucuguacuacuaacaccaaagaagguucaaauauaugccuaaccagaacagauagagguugguacugcgauaaugcaggaucaguauccuuuuucccccaagccgaaacaugcaaaguucaauccaauagaguauuuugugauacaaugaacucuuuaacccucccauccgaagucaaucuauguaacgucgacauauuuaacccaaaauacgauugcaaaauaaugacaucaaaaacagacgucucauccucaguuauaacguccuuaggcgcuauaguaucaugcuacggcaaaacaaaauguacagcaucaaacaaaaacagaggaaucauaaaaacuuucucuaacgguugcgacuauguauccaacaaaggugucgacacaguauccguaggcaacacccuuuacuauguuaauaaacaagaaggaaaaucucuauauguaaaaggcgaaccaauuauaaauuuuuacgacccccuugucuuucccucugacgaauuugacgcuuccauaucacaagucaacgaaaaaaucaaccaaucccucgcauucauacgcaaaucagacgaacuacuacauaacgucaacgcaggcaaauccacaacaaacauaaugauaaccacaaucauaauuguaauaauaguaauacuacuuucucuaauagcagucggauuacucuuauacuguaaagcucgaucaacaccagucacccucucuaaagaucaacuauccggaaucaacaacauagcuuucucaaacuaaggacuaguggaagcauuuuccuggcugauuaaaagaaauuacucagcuauggucaucuguuccuguuagaaggcuaugcagcauauuauauacuaugcgcauguuaugaaaugcauaauaaaaaauuuuaaaaaaucuaaaagaucuaaaaaaaaaaaaaaaaaaaaaaaaaaaaaaaaaaaaaaaaaaaaaaaaaaaaaaaaaaaaaaaaugcaucccccccccccccccccccccccccccccccaaaggcucuuuucagagccaccagaauu

SEQ ID NO: 365 - RNA, 2069 nt, Artificial Sequence
  mRNA product Design g-1 comprising derived and/or modified sequence from HRSV(A2)__F0 (opt11)
gggagacuuucccauucuguagcagaauuugguguugccuguggucuuggucccgcggagaagcuuaccauggaacuccucauacucaaagccaacgcaaucacaaccauacucaccgccgucaccuucugcuuugcaucuggccagaacaucacugaagaguucuaccaauccacaugcuccgccguaagcaaaggcuaccuauccgcccuacgcaccggcugguacaccagcguaaucaccauagaacucuccaauauaaaagaaaacaaaugcaacggcaccgacgcaaaagucaagcuaauaaaacaagaacucgacaaauacaaaaacgccguuaccgaacuccagcuacucaugcaaucgaccccagcaaccaacaaccgugcgagacgcgaacucccccgcuucaugaacuacacccuaaacaacgccaaaaagaccaacguaacucuauccaagaaacgcaaacgccgcuuccucggauuccuccucggcgucggcuccgcaaucgccagcggcgucgccguuagcaaaguccuucaccucgaaggagaaguaaacaaaauuaaaagcgcccucuuauccacaaacaaggccguaguaucccugucaaacggcgucuccguccuuacauccaaaguccucgaccucaagaacuacauagacaaacagcuacuacccauuguaaauaaacaaagcugcucaauuagcaacaucgaaaccguaaucgaguuccagcagaaaaacaacagacuucucgaaaucacccgcgaguucagcgucaacgccggcguaaccaccccugucucaacauacaugcuaaccaacagcgaacugcucucccucaucaacgacaugcccaucaccaacgaccaaaagaaacucaugagcaacaacguacaaaucgugcgccaacaguccuacucaauaaugucaaucaucaaagaagaagugcuagcauacgucguacaacuaccacucuacggcguaauagauacccccugcuggaagcuccauaccuccccacucuguaccaccaacaccaaagaaggcucaaacaucugccuaacgcgcacagaccguggaugguacugugacaacgccggcuccgucuccuucuucccucaagccgaaacaugcaaaguccaauccaacagagucuucugcgauaccaugaacucccugacacucccaagcgaagucaaccuuugcaacgucgauaucuuuaaccccaaauacgacugcaagaucaugacaucaaaaaccgacguauccuccucuguaauaaccucccuaggcgcaaucguaucaugcuacggcaaaaccaaauguaccgccuccaacaaaaaucgcggcaucaucaaaaccuucucgaacggcugcgacuacgucuccaacaaaggcguagacacaguuuccguaggcaacacccucuacuacgucaauaaacaggaaggcaagucccucuacgucaaaggcgaacccaucaucaauuucuacgacccccucguuuuccccuccgaugaguucgacgcaagcaucagccaggucaacgaaaagauaaaccagucccucgccuucauccgcaaaucagaugaacuccuucacaacguuaacgcaggcaagagcaccaccaacaucaugaucacaacuauaaucaucgucauaaucgucauccuacucucacuaaucgccgucggucuccuacuauauuguaaagcccgaucaacaccggucacacucuccaaagaccaacucuccggaaucaacaauaucgcuuucucgaacuaaggacuaguggaagcauuuuccuggcugauuaaaagaaauuacucagcuauggucaucuguuccuguuagaaggcuaugcagcauauuauauacuaugcgcauguuaugaaaugcauaauaaaaaauuuuaaaaaaucuaaaagaucuaaaaaaaaaaaaaaaaaaaaaaaaaaaaaaaaaaaaaaaaaaaaaaaaaaaaaaaaaaaaaaaaugcaucccccccccccccccccccccccccccccccaaaggcucuuuucagagccaccagaauu

SEQ ID NO: 366 - RNA, 2084 nt, Artificial Sequence
  mRNA product Design g-2 comprising derived and/or modified sequence from HRSV(A2)__F0 (artificial)
gggagaguccgcucagccagguugcagaagcggcuuagcguguguccuaaucuucucucugcguguagguaggccugugccgcaaacaagcuuaccauggaguugcuaauccucaaagcaaaugcaauuaccacaauccucacugcagucacauuuuguuuugcuucuggucaaaacaucacugaagaauuuuaucaaucaacaugcagugcaguuagcaaaggcuaucuuagugcucugagaacugguugguauaccaguguuauaacuauagaauuaaguaauaucaaggaaaauaaguguaauggaacagaugcuaagguaaaauugauaaaacaagaauuagauaaauauaaaaaugcuguaacagaauugcaguugcucaugcaaagcacaccagcaacaaacaaucgagccagaagagaacuaccaagguuuaugaauuauacacucaacaaugccaaaaaaaccaauguaacauuaagcaagaaaaggaaaagaagauuucuugguuuuuuguuagguguuggaucugcaaucgccaguggcguugcuguaucuaagguccugcaccuagaaggggaagugaacaagaucaaaagugcucuacuauccacaaacaaggcuguagucagcuuaucaaauggaguuagugucuuaaccagcaaaguguuagaccucaaaaacuauauagauaaacaauuguuaccuauugugaacaagcaaagcugcagcauaucaaauauagaaacugugauagaguuccaacaaaagaacaacagacuacuagagauuaccagggaauuuaguguuaaugcagguguaacuacaccuguaagcacuuacauguuaacuaauagugaauuauugucauuaaucaaugauaugccuauaacaaaugaucagaaaaaguuaauguccaacaauguucaaauaguuagacagcaaaguuacucuaucauguccauaauaaaagaggaagucuuagcauauguaguacaauuaccacuauaugguguuauagauacacccuguuggaaacuacacacauccccucuauguacaaccaacacaaaagaaggguccaacaucuguuuaacaagaacugacagaggaugguacugugacaaugcaggaucaguaucuuucuucccacaagcugaaacauguaaaguucaaucaaaucgaguauuuugugacacaaugaacaguuuaacauuaccaagugaaguaaaucucugcaauguugacauauucaaccccaaauaugauuguaaaauuaugacuucaaaaacagauguaagcagcuccguuaucacaucucuaggagccauugugucaugcuauggcaaaacuaaauguacagcauccaauaaaaaucguggaaucauaaagacauuuucuaacgggugcgauuauguaucaaauaaagggguggacacugugucuguagguaacacauuauauuauguaaauaagcaagaagguaaaagucucuauguaaaaggugaaccaauaauaaauuucuaugacccauuaguauuccccucugaugaauuugaugcaucaauaucucaagucaacgagaagauuaaccagagccuagcauuuauucguaaauccgaugaauuauuacauaauguaaaugcugguaaauccaccacaaauaucaugauaacuacuauaauuauagugauuauaguaauauuguuaucauuaauugcuguuggacugcucuuauacuguaaggccagaagcacaccagucacacuaagcaaagaucaacugagugguauaaauaauauugcauuuaguaacuaaggacuaguaauaaggaaacuguaugaaugucugugggcaggaagugaagagauccuucuguaaagguuuuuggaauuaugucugcugaauaauaaacuuuuuugaaauaauaaaucugguagaaaaaugagaucuaaaaaaaaaaaaaaaaaaaaaaaaaaaaaaaaaaaaaaaaaaaaaaaaaaaaaaaaaaaaaaaaugcaucccccccccccccccccccccccccccccccaaaggcucuuuucagagccaccagaauu

SEQ ID NO: 367 - RNA, 2084 nt, Artificial Sequence
  mRNA product Design g-2 comprising derived and/or modified sequence from HRSV(A2)__F0 (opt1)
gggagaguccgcucagccagguugcagaagcggcuuagcguguguccuaaucuucucucugcguguagguaggccugugccgcaaacaagcuuaccauggagcugcucauccugaaggccaacgccaucaccaccauccugacggcggugaccuucugcuucgccagcggccagaacaucaccgaggaguucuaccaguccaccugcagcgccgucuccaagggguaccucagcgcccugcggacgggcugguacaccuccgugaucaccaucgagcugagcaacaucaaggagaacaagugcaacgggaccgacgccaaggugaagcucaucaagcaggagcuggacaaguacaagaacgcggucacggagcugcagcuccugaugcaguccaccccggcaaccaacaaccgcgcccggcgcgagcugccccgguucaugaacuacacccucaacaacgccaagaagacgaacgugacccugagcaagaagcgcaagcggcgcuuccugggcuuccuccugggggugggcuccgccaucgcgagcggcgucgccguguccaaggugcugcaccucgagggggaggucaacaagaucaagagcgcccugcuguccaccaacaaggccguggugagccucuccaacggcgucagcgugcugaccuccaaggugcuggaccucaagaacuacaucgacaagcagcugcugcccaucgucaacaagcagagcugcuccaucagcaacaucgagacggugaucgaguuccagcagaagaacaaccggcuccuggagaucacccgcgaguucagcgugaacgccggggucaccacccccguguccacguacaugcugaccaacagcgagcuccugucccugaucaacgacaugccgaucaccaacgaccagaagaagcucaugagcaacaacgugcagaucguccggcagcaguccuacagcaucauguccaucaucaaggaggaggugcuggcguacgugguccagcugccccucuacggcgugaucgacacccccugcuggaagcugcacacgagcccccugugcaccaccaacaccaaggagggguccaacaucugccucacgcgcaccgaccggggcugguacugcgacaacgccggcagcgucuccuucuucccgcaggccgagaccugcaaggugcagagcaaccgcguguucugcgacaccaugaacucccugacgcugcccagcgagguaaaccucugcaacgucgacaucuucaaccccaaguacgacugcaagaucaugaccuccaagaccgacgugagcuccagcgugaucaccucccugggggccaucgucagcugcuacggcaagacgaagugcaccgccagcaacaagaaccgggggaucaucaagaccuucuccaacggcugcgacuacgugagcaacaagggcguggacaccguguccgucgggaacacccuguacuacgugaacaagcaggagggcaagagccucuacgugaagggggagcccaucaucaacuucuacgacccgcuggucuuccccuccgacgaguucgacgcgagcaucucccaggugaacgagaagaucaaccagagccuggccuucauccgcaaguccgacgagcugcuccacaacgugaacgccggcaagagcacgaccaacaucaugaucaccaccaucaucaucgucaucaucgugauccugcugucccucaucgccguggggcugcugcucuacugcaaggcccggagcacgcccgucacccuguccaaggaccagcugagcggcaucaacaacaucgcguucuccaacugaggacuaguaauaaggaaacuguaugaaugucugugggcaggaagugaagagauccuucuguaaagguuuuuggaauuaugucugcugaauaauaaacuuuuuugaaauaauaaaucugguagaaaaaugagaucuaaaaaaaaaaaaaaaaaaaaaaaaaaaaaaaaaaaaaaaaaaaaaaaaaaaaaaaaaaaaaaaaugcaucccccccccccccccccccccccccccccccaaaggcucuuuucagagccaccagaauu

SEQ ID NO: 368 - RNA, 2084 nt, Artificial Sequence
  mRNA product Design g-2 comprising derived and/or modified sequence from HRSV(A2)__F0 (opt1)
gggagaguccgcucagccagguugcagaagcggcuuagcguguguccuaaucuucucucugcguguagguaggccugugccgcaaacaagcuuaccauggagcugcucauccugaaggccaacgccaucaccaccauccugacggcggugaccuucugcuucgccagcggccagaacaucaccgaggaguucuaccaguccacgugcagcgccgucuccaagggguaccucagcgcccugcgcaccggcugguacaccuccgugaucaccaucgagcugagcaacaucaaggagaacaagugcaacgggaccgacgccaaggugaagcucaucaagcaggagcuggacaaguacaagaacgcggucacggagcugcagcuccugaugcaguccacccccgccaccaacaaccgggcccgccgggagcugccgcgcuucaugaacuacacccucaacaacgccaagaagacgaacgugacccugagcaagaagcggaagcgccgguuccugggcuuccuccugggggugggcuccgcgaucgccagcggcgucgccguguccaaggugcugcaccucgagggggaggucaacaagaucaagagcgcccugcuguccaccaacaaggccguggugagccucuccaacggcgucagcgugcugaccuccaaggugcuggaccucaagaacuacaucgacaagcagcugcugcccaucgucaacaagcagagcugcuccaucagcaacaucgagacggugaucgaguuccagcagaagaacaaccgccuccuggagaucacccgggaguucagcgugaacgcgggggucaccacccccguguccacguacaugcugaccaacagcgagcuccugucccugaucaacgacaugcccaucaccaacgaccagaagaagcucaugagcaacaacgugcagaucguccgccagcaguccuacagcaucauguccaucaucaaggaggaggugcuggccuacgugguccagcugccgcucuacggcgugaucgacacccccugcuggaagcugcacacgagcccccugugcaccaccaacaccaaggagggguccaacaucugccucacgcggaccgaccgcggcugguacugcgacaacgccggcagcgucuccuucuucccccaggccgagaccugcaaggugcagagcaaccggguguucugcgacaccaugaacucccugacgcugccgagcgaggucaaccucugcaacguggacaucuucaaccccaaguacgacugcaagaucaugaccuccaagaccgacgugagcuccagcgucaucaccucccugggggccaucgugagcugcuacggcaagacgaagugcaccgcgagcaacaagaaccgcgggaucaucaagaccuucuccaacggcugcgacuacgugagcaacaagggcgucgacaccguguccguggggaacacccuguacuacgucaacaagcaggagggcaagagccucuacgugaagggggagcccaucaucaacuucuacgacccccugguguucccguccgacgaguucgacgccagcaucucccaggucaacgagaagaucaaccagagccuggccuucauccggaaguccgacgagcuccugcacaacgugaacgccggcaagagcacgaccaacaucaugaucaccaccaucaucaucgugaucaucgucauccugcugucccucaucgccguggggcugcugcucuacugcaaggcgcgcagcacgcccgugacccuguccaaggaccagcugagcggcaucaacaacaucgccuucuccaacugaggacuaguaauaaggaaacuguaugaaugucugugggcaggaagugaagagauccuucuguaaagguuuuuggaauuaugucugcugaauaauaaacuuuuuugaaauaauaaaucugguagaaaaaugagaucuaaaaaaaaaaaaaaaaaaaaaaaaaaaaaaaaaaaaaaaaaaaaaaaaaaaaaaaaaaaaaaaaugcaucccccccccccccccccccccccccccccccaaaggcucuuuucagagccaccagaauu

SEQ ID NO: 369 - RNA, 2084 nt, Artificial Sequence
  mRNA product Design g-2 comprising derived and/or modified sequence from HRSV(A2)__F0 (opt2)
gggagaguccgcucagccagguugcagaagcggcuuagcguguguccuaaucuucucucugcguguagguaggccugugccgcaaacaagcuuaccauggagcuccucauccucaaggccaacgccaucaccaccauccucaccgccgucaccuucugcuucgccuccggccagaacaucaccgaggaguucuaccaguccaccugcuccgccgucuccaagggcuaccucuccgcccuccgcaccggcugguacaccuccgucaucaccaucgagcucuccaacaucaaggagaacaagugcaacggcaccgacgccaaggucaagcucaucaagcaggagcucgacaaguacaagaacgccgucaccgagcuccagcuccucaugcaguccacccccgccaccaacaaccgcgcccgccgcgagcucccccgcuucaugaacuacacccucaacaacgccaagaagaccaacgucacccucuccaagaagcgcaagcgccgcuuccucggcuuccuccucggcgucggcuccgccaucgccuccggcgucgccgucuccaagguccuccaccucgagggcgaggucaacaagaucaaguccgcccuccucuccaccaacaaggccgucgucucccucuccaacggcgucuccguccucaccuccaagguccucgaccucaagaacuacaucgacaagcagcuccuccccaucgucaacaagcaguccugcuccaucuccaacaucgagaccgucaucgaguuccagcagaagaacaaccgccuccucgagaucacccgcgaguucuccgucaacgccggcgucaccacccccgucuccaccuacaugcucaccaacuccgagcuccucucccucaucaacgacaugcccaucaccaacgaccagaagaagcucauguccaacaacguccagaucguccgccagcaguccuacuccaucauguccaucaucaaggaggagguccucgccuacgucguccagcucccccucuacggcgucaucgacacccccugcuggaagcuccacaccuccccccucugcaccaccaacaccaaggagggcuccaacaucugccucacccgcaccgaccgcggcugguacugcgacaacgccggcuccgucuccuucuucccccaggccgagaccugcaagguccaguccaaccgcgucuucugcgacaccaugaacucccucacccuccccuccgaggucaaccucugcaacgucgacaucuucaaccccaaguacgacugcaagaucaugaccuccaagaccgacgucuccuccuccgucaucaccucccucggcgccaucgucuccugcuacggcaagaccaagugcaccgccuccaacaagaaccgcggcaucaucaagaccuucuccaacggcugcgacuacgucuccaacaagggcgucgacaccgucuccgucggcaacacccucuacuacgucaacaagcaggagggcaagucccucuacgucaagggcgagcccaucaucaacuucuacgacccccucgucuuccccuccgacgaguucgacgccuccaucucccaggucaacgagaagaucaaccagucccucgccuucauccgcaaguccgacgagcuccuccacaacgucaacgccggcaaguccaccaccaacaucaugaucaccaccaucaucaucgucaucaucgucauccuccucucccucaucgccgucggccuccuccucuacugcaaggcccgcuccacccccgucacccucuccaaggaccagcucuccggcaucaacaacaucgccuucuccaacugaggacuaguaauaaggaaacuguaugaaugucugugggcaggaagugaagagauccuucuguaaagguuuuuggaauuaugucugcugaauaauaaacuuuuuugaaauaauaaaucugguagaaaaaugagaucuaaaaaaaaaaaaaaaaaaaaaaaaaaaaaaaaaaaaaaaaaaaaaaaaaaaaaaaaaaaaaaaaugcaucccccccccccccccccccccccccccccccaaaggcucuuuucagagccaccagaauu

SEQ ID NO: 370 - RNA, 2084 nt, Artificial Sequence
  mRNA product Design g-2 comprising derived and/or modified sequence from HRSV(A2)__F0 (opt3)
gggagaguccgcucagccagguugcagaagcggcuuagcguguguccuaaucuucucucugcguguagguaggccugugccgcaaacaagcuuaccauggagcugcucauccuuaaggccaacgcuauuaccacaauacugacugcagugacguucugcuuugccagcggccagaauaucaccgaagaguucuaccaauccacauguucugcggucucaaaaggguauuugagugcuuuaagaacuggaugguacaccagcguuauuacaaucgaacuguccaacauuaaggagaauaaaugcaacgguaccgacgccaaggugaaacuaaucaagcaggaacucgauaaguauaaaaaugcaguaacugagcugcagcuucugaugcagucuacacccgccaccaacaauagggcucggcgcgaguugccucgauuuaugaacuacacgcucaauaacgcaaagaaaacuaaugugacccugucgaagaaacguaagagaagguuccugggcuuucucuuaggggucggaucagccauagcuagcggcguggccguuaguaaggugcugcaccuugaaggugaggucaacaaaaucaaguccgcguugcugucuacaaauaaagcagugguaagccuauccaacgggguuucagugcucacuucuaagguccuggaccuuaaaaauuauauugauaagcaacuguugccaaucgugaacaaacagagcuguucuauuuccaacaucgaaaccgugauagaguuccagcagaagaauaaccggcuccuggagauuacacgcgaauuuucagucaaugccggaguuaccacgccggugagcacuuacauguuaacaaacagugagcugcucucucuuaucaaugacaugcccauuaccaacgaucaaaagaaacugauguccaauaacguacagaucgugagacagcagagcuauucgaucaugucuauuauaaaggaagaggucuuggcuuacgugguucaacuaccucuguacggcgugaucgacacuccaugcuggaaacuccauacauccccacuguguaccacgaauaccaaggaaggcucaaacauuugccuuacaaggacugaucgggggugguauugugacaaugccggaagugucagcuucuuuccucaggcagagaccugcaaagugcaguccaaccgcguauucugugauacaaugaauagucugacuuugccaagcgagguuaaccucugcaauguggacaucuuuaaccccaaguacgauuguaagauaaugaccucaaaaacagacgucaguuccagcgugauuaccucucugggugcuaucgucucaugcuauggcaagacuaaaugcacggccaguaacaagaaucgagggaucauuaaaacauucagcaacggaugugauuacguguccaauaagggcguugacaccgugucuguagguaacacuuuauauuacgucaauaagcaagaagggaaaucgcuguaugugaagggagagccuaucauuaacuuuuacgacccccuaguuuucccgagcgaugaauuugacgcguccauaucacaggugaaugagaaaaucaaccagagucucgccuucauuagaaagucugaugaacugcuucacaaugucaacgcaggcaaaagcaccacaaauaucaugaucaccacuauuauaaucgugauuaucguaauuuugcugucccucaucgcugugggccugcuucuguacugcaaggccaggucaacacccguuacguugagcaaggaccagcucucugggauaaacaauaucgcuuucuccaacugaggacuaguaauaaggaaacuguaugaaugucugugggcaggaagugaagagauccuucuguaaagguuuuuggaauuaugucugcugaauaauaaacuuuuuugaaauaauaaaucugguagaaaaaugagaucuaaaaaaaaaaaaaaaaaaaaaaaaaaaaaaaaaaaaaaaaaaaaaaaaaaaaaaaaaaaaaaaaugcaucccccccccccccccccccccccccccccccaaaggcucuuuucagagccaccagaauu

SEQ ID NO: 371 - RNA, 2084 nt, Artificial Sequence
  mRNA product Design g-2 comprising derived and/or modified sequence from HRSV(A2)__F0 (opt4)
gggagaguccgcucagccagguugcagaagcggcuuagcguguguccuaaucuucucucugcguguagguaggccugugccgcaaacaagcuuaccauggagcugcugauccugaaggccaacgccaucaccaccauccugaccgccgugaccuucugcuucgccagcggccagaacaucaccgaggaguucuaccagagcaccugcagcgccgugagcaagggcuaccugagcgcccugagaaccggcugguacaccagcgugaucaccaucgagcugagcaacaucaaggagaacaagugcaacggcaccgacgccaaggugaagcugaucaagcaggagcuggacaaguacaagaacgccgugaccgagcugcagcugcugaugcagagcacccccgccaccaacaacagagccagaagagagcugcccagauucaugaacuacacccugaacaacgccaagaagaccaacgugacccugagcaagaagagaaagagaagauuccugggcuuccugcugggcgugggcagcgccaucgccagcggcguggccgugagcaaggugcugcaccuggagggcgaggugaacaagaucaagagcgcccugcugagcaccaacaaggccguggugagccugagcaacggcgugagcgugcugaccagcaaggugcuggaccugaagaacuacaucgacaagcagcugcugcccaucgugaacaagcagagcugcagcaucagcaacaucgagaccgugaucgaguuccagcagaagaacaacagacugcuggagaucaccagagaguucagcgugaacgccggcgugaccacccccgugagcaccuacaugcugaccaacagcgagcugcugagccugaucaacgacaugcccaucaccaacgaccagaagaagcugaugagcaacaacgugcagaucgugagacagcagagcuacagcaucaugagcaucaucaaggaggaggugcuggccuacguggugcagcugccccuguacggcgugaucgacacccccugcuggaagcugcacaccagcccccugugcaccaccaacaccaaggagggcagcaacaucugccugaccagaaccgacagaggcugguacugcgacaacgccggcagcgugagcuucuucccccaggccgagaccugcaaggugcagagcaacagaguguucugcgacaccaugaacagccugacccugcccagcgaggugaaccugugcaacguggacaucuucaaccccaaguacgacugcaagaucaugaccagcaagaccgacgugagcagcagcgugaucaccagccugggcgccaucgugagcugcuacggcaagaccaagugcaccgccagcaacaagaacagaggcaucaucaagaccuucagcaacggcugcgacuacgugagcaacaagggcguggacaccgugagcgugggcaacacccuguacuacgugaacaagcaggagggcaagagccuguacgugaagggcgagcccaucaucaacuucuacgacccccugguguuccccagcgacgaguucgacgccagcaucagccaggugaacgagaagaucaaccagagccuggccuucaucagaaagagcgacgagcugcugcacaacgugaacgccggcaagagcaccaccaacaucaugaucaccaccaucaucaucgugaucaucgugauccugcugagccugaucgccgugggccugcugcuguacugcaaggccagaagcacccccgugacccugagcaaggaccagcugagcggcaucaacaacaucgccuucagcaacugaggacuaguaauaaggaaacuguaugaaugucugugggcaggaagugaagagauccuucuguaaagguuuuuggaauuaugucugcugaauaauaaacuuuuuugaaauaauaaaucugguagaaaaaugagaucuaaaaaaaaaaaaaaaaaaaaaaaaaaaaaaaaaaaaaaaaaaaaaaaaaaaaaaaaaaaaaaaaugcaucccccccccccccccccccccccccccccccaaaggcucuuuucagagccaccagaauu

SEQ ID NO: 372 - RNA, 2084 nt, Artificial Sequence
  mRNA product Design g-2 comprising derived and/or modified sequence from HRSV(A2)__F0 (opt5)
gggagaguccgcucagccagguugcagaagcggcuuagcguguguccuaaucuucucucugcguguagguaggccugugccgcaaacaagcuuaccauggagcugcucauccugaaggccaacgcuauuaccacaauccuuacggccgugaccuucugcuuugcgagcggccagaauauuacagaagaguucuaccaauccaccuguucugcugucagcaaaggguaucuguccgcccucagaacaggaugguacaccucuguuaucacaauugaacugagcaacaucaaggagaauaaaugcaacggcaccgacgccaaggugaaacuuaucaagcaggaacuggauaaguauaaaaaugcugugacggagcuccagcugcugaugcaguccacccccgccacaaacaaucgggcucgcagagagcucccucgguuuaugaacuacacccugaauaacgccaagaaaacaaaugucacccuuucuaagaaacgcaagagacgguuccugggguuucuccugggagugggcagcgcgauugccuccgggguugcugugagcaagguccuucaccuggaaggagaggugaacaaaaucaagucugcccuccuguccacgaauaaagcuguugugagccugucuaacggcgucuccgugcucacaagcaaggugcuggaccuuaaaaauuauauugauaagcaacugcucccgaucgucaacaaacagucuuguuccauuagcaacaucgaaaccguuauugaguuccagcagaagaauaaccgccugcuugagaucacaagagaauuuuccgugaaugccggcgugaccacccccgucucuacauacaugcugacgaacagcgagcuccugucccugaucaaugacaugccuauuaccaacgaucaaaagaaacucaugagcaauaacgugcagaucguucggcagcagucuuauuccauuaugagcaucauuaaggaagaggugcuggcguacgucgugcaacuuccccuguacgggguuaucgacacaccuugcuggaaacuccauaccucuccccuguguacaaccaauacgaaggaaggaagcaacaucugccuuacacgcaccgauagaggcugguauugugacaaugccggguccgugucuuucuuuccucaggcugagaccugcaaaguccagagcaaccggguguucugugauacaaugaacucccugacccucccgagcgaggucaaucugugcaauguggacauuuuuaaccccaaguacgauuguaagaucaugacaucuaaaacggacguuuccagcucugugauuaccucccugggagccaucgucagcugcuauggcaagacaaaaugcaccgcuuccaacaagaaucgcgggauuaucaaaacauucucuaacggaugugauuacgugagcaauaagggcguugacaccguguccgucggcaacacgcucuauuacgugaauaagcaagaagggaaaucucuguaugugaagggagagccuaucauuaacuuuuacgacccccuuguuuucccuagcgaugaauuugacgccuccaucagccaggucaaugagaaaauuaaccagucucuggccuucaucagaaaguccgaugaacuccugcacaaugugaacgcuggcaaaagcaccacaaauauuaugaucaccacaauuaucaucgugauuaucgucauucugcuuucucucaucgcgguggggcugcugcucuacugcaaggcccgguccacccccguuacgcugagcaaggaccagcuuucuggaauuaacaauaucgcuuucagcaacugaggacuaguaauaaggaaacuguaugaaugucugugggcaggaagugaagagauccuucuguaaagguuuuuggaauuaugucugcugaauaauaaacuuuuuugaaauaauaaaucugguagaaaaaugagaucuaaaaaaaaaaaaaaaaaaaaaaaaaaaaaaaaaaaaaaaaaaaaaaaaaaaaaaaaaaaaaaaaugcaucccccccccccccccccccccccccccccccaaaggcucuuuucagagccaccagaauu

SEQ ID NO: 373 - RNA, 2084 nt, Artificial Sequence
  mRNA product Design g-2 comprising derived and/or modified sequence from HRSV(A2)__F0 (opt6)
gggagaguccgcucagccagguugcagaagcggcuuagcguguguccuaaucuucucucugcguguagguaggccugugccgcaaacaagcuuaccauggaacuucuaauauuaaaagcuaacgcaaucacuacuaucuuaaccgcaguaacauucuguuuugcauccggccaaaacauaacagaagaauuuuaccaaucaacuugcucugcagucucaaaagguuaucuaucugcauuaagaacaggcugguacaccucaguaauaacgaucgaacuaucaaacaucaaagaaaacaaauguaauggaacagacgcaaaaguaaaacuaaucaaacaagaacuagacaaauacaaaaacgcaguaaccgaacuccaacuccucaugcaaaguacaccagcaacaaauaacagagcaagacgugaacuaccacguuuuaugaauuacacgcucaauaacgcaaaaaaaacaaauguuacccuaucaaaaaaacgaaaaagaagauuccucggauuccuacuaggcguaggcucagcaauagcuucaggaguagcaguaucaaaaguacuccaccucgaaggagaaguaaacaaaaucaaaagcgcucuccucucaacaaacaaagcaguuguuucacucucaaacggaguaucaguacuaaccucaaaaguacuugaccuaaaaaauuauauagacaaacaacuauuaccaauaguaaacaaacaaagcugcuccaucuccaacaucgagacagucauagaauuucaacaaaaaaauaaccgccuauuagaaauaaccagagaauuuucaguaaacgcaggaguaacuaccccaguaucaacauauauguuaacaaacucagaacuccuaagucuaaucaacgacaugccaauaaccaacgaccaaaaaaaacuaaugagcaacaauguacaaauaguucgucaacaaucuuacuccauaaugucuauaauaaaagaagaaguacucgccuauguaguccaacuaccacuauacggagucaucgauacaccaugcuggaaacuccacacauccccacucuguacuacuaacaccaaagaagguucaaauauaugccuaaccagaacagauagagguugguacugcgauaaugcaggaucaguauccuuuuucccccaagccgaaacaugcaaaguucaauccaauagaguauuuugugauacaaugaacucuuuaacccucccauccgaagucaaucuauguaacgucgacauauuuaacccaaaauacgauugcaaaauaaugacaucaaaaacagacgucucauccucaguuauaacguccuuaggcgcuauaguaucaugcuacggcaaaacaaaauguacagcaucaaacaaaaacagaggaaucauaaaaacuuucucuaacgguugcgacuauguauccaacaaaggugucgacacaguauccguaggcaacacccuuuacuauguuaauaaacaagaaggaaaaucucuauauguaaaaggcgaaccaauuauaaauuuuuacgacccccuugucuuucccucugacgaauuugacgcuuccauaucacaagucaacgaaaaaaucaaccaaucccucgcauucauacgcaaaucagacgaacuacuacauaacgucaacgcaggcaaauccacaacaaacauaaugauaaccacaaucauaauuguaauaauaguaauacuacuuucucuaauagcagucggauuacucuuauacuguaaagcucgaucaacaccagucacccucucuaaagaucaacuauccggaaucaacaacauagcuuucucaaacuaaggacuaguaauaaggaaacuguaugaaugucugugggcaggaagugaagagauccuucuguaaagguuuuuggaauuaugucugcugaauaauaaacuuuuuugaaauaauaaaucugguagaaaaaugagaucuaaaaaaaaaaaaaaaaaaaaaaaaaaaaaaaaaaaaaaaaaaaaaaaaaaaaaaaaaaaaaaaaugcaucccccccccccccccccccccccccccccccaaaggcucuuuucagagccaccagaauu

SEQ ID NO: 374 - RNA, 2084 nt, Artificial Sequence
  mRNA product Design g-2 comprising derived and/or modified sequence from HRSV(A2)__F0 (opt11)
gggagaguccgcucagccagguugcagaagcggcuuagcguguguccuaaucuucucucugcguguagguaggccugugccgcaaacaagcuuaccauggaacuccucauacucaaagccaacgcaaucacaaccauacucaccgccgucaccuucugcuuugcaucuggccagaacaucacugaagaguucuaccaauccacaugcuccgccguaagcaaaggcuaccuauccgcccuacgcaccggcugguacaccagcguaaucaccauagaacucuccaauauaaaagaaaacaaaugcaacggcaccgacgcaaaagucaagcuaauaaaacaagaacucgacaaauacaaaaacgccguuaccgaacuccagcuacucaugcaaucgaccccagcaaccaacaaccgugcgagacgcgaacucccccgcuucaugaacuacacccuaaacaacgccaaaaagaccaacguaacucuauccaagaaacgcaaacgccgcuuccucggauuccuccucggcgucggcuccgcaaucgccagcggcgucgccguuagcaaaguccuucaccucgaaggagaaguaaacaaaauuaaaagcgcccucuuauccacaaacaaggccguaguaucccugucaaacggcgucuccguccuuacauccaaaguccucgaccucaagaacuacauagacaaacagcuacuacccauuguaaauaaacaaagcugcucaauuagcaacaucgaaaccguaaucgaguuccagcagaaaaacaacagacuucucgaaaucacccgcgaguucagcgucaacgccggcguaaccaccccugucucaacauacaugcuaaccaacagcgaacugcucucccucaucaacgacaugcccaucaccaacgaccaaaagaaacucaugagcaacaacguacaaaucgugcgccaacaguccuacucaauaaugucaaucaucaaagaagaagugcuagcauacgucguacaacuaccacucuacggcguaauagauacccccugcuggaagcuccauaccuccccacucuguaccaccaacaccaaagaaggcucaaacaucugccuaacgcgcacagaccguggaugguacugugacaacgccggcuccgucuccuucuucccucaagccgaaacaugcaaaguccaauccaacagagucuucugcgauaccaugaacucccugacacucccaagcgaagucaaccuuugcaacgucgauaucuuuaaccccaaauacgacugcaagaucaugacaucaaaaaccgacguauccuccucuguaauaaccucccuaggcgcaaucguaucaugcuacggcaaaaccaaauguaccgccuccaacaaaaaucgcggcaucaucaaaaccuucucgaacggcugcgacuacgucuccaacaaaggcguagacacaguuuccguaggcaacacccucuacuacgucaauaaacaggaaggcaagucccucuacgucaaaggcgaacccaucaucaauuucuacgacccccucguuuuccccuccgaugaguucgacgcaagcaucagccaggucaacgaaaagauaaaccagucccucgccuucauccgcaaaucagaugaacuccuucacaacguuaacgcaggcaagagcaccaccaacaucaugaucacaacuauaaucaucgucauaaucgucauccuacucucacuaaucgccgucggucuccuacuauauuguaaagcccgaucaacaccggucacacucuccaaagaccaacucuccggaaucaacaauaucgcuuucucgaacuaaggacuaguaauaaggaaacuguaugaaugucugugggcaggaagugaagagauccuucuguaaagguuuuuggaauuaugucugcugaauaauaaacuuuuuugaaauaauaaaucugguagaaaaaugagaucuaaaaaaaaaaaaaaaaaaaaaaaaaaaaaaaaaaaaaaaaaaaaaaaaaaaaaaaaaaaaaaaaugcaucccccccccccccccccccccccccccccccaaaggcucuuuucagagccaccagaauu

SEQ ID NO: 375 - RNA, 2316 nt, Artificial Sequence
  mRNA product Design g-3 comprising derived and/or modified sequence from HRSV(A2)__F0 (artificial)
gggagaguccgcucagccagguugcagaagcggcuuagcguguguccuaaucuucucucugcguguagguaggccugugccgcaaacaagcuuaccauggaguugcuaauccucaaagcaaaugcaauuaccacaauccucacugcagucacauuuuguuuugcuucuggucaaaacaucacugaagaauuuuaucaaucaacaugcagugcaguuagcaaaggcuaucuuagugcucugagaacugguugguauaccaguguuauaacuauagaauuaaguaauaucaaggaaaauaaguguaauggaacagaugcuaagguaaaauugauaaaacaagaauuagauaaauauaaaaaugcuguaacagaauugcaguugcucaugcaaagcacaccagcaacaaacaaucgagccagaagagaacuaccaagguuuaugaauuauacacucaacaaugccaaaaaaaccaauguaacauuaagcaagaaaaggaaaagaagauuucuugguuuuuuguuagguguuggaucugcaaucgccaguggcguugcuguaucuaagguccugcaccuagaaggggaagugaacaagaucaaaagugcucuacuauccacaaacaaggcuguagucagcuuaucaaauggaguuagugucuuaaccagcaaaguguuagaccucaaaaacuauauagauaaacaauuguuaccuauugugaacaagcaaagcugcagcauaucaaauauagaaacugugauagaguuccaacaaaagaacaacagacuacuagagauuaccagggaauuuaguguuaaugcagguguaacuacaccuguaagcacuuacauguuaacuaauagugaauuauugucauuaaucaaugauaugccuauaacaaaugaucagaaaaaguuaauguccaacaauguucaaauaguuagacagcaaaguuacucuaucauguccauaauaaaagaggaagucuuagcauauguaguacaauuaccacuauaugguguuauagauacacccuguuggaaacuacacacauccccucuauguacaaccaacacaaaagaaggguccaacaucuguuuaacaagaacugacagaggaugguacugugacaaugcaggaucaguaucuuucuucccacaagcugaaacauguaaaguucaaucaaaucgaguauuuugugacacaaugaacaguuuaacauuaccaagugaaguaaaucucugcaauguugacauauucaaccccaaauaugauuguaaaauuaugacuucaaaaacagauguaagcagcuccguuaucacaucucuaggagccauugugucaugcuauggcaaaacuaaauguacagcauccaauaaaaaucguggaaucauaaagacauuuucuaacgggugcgauuauguaucaaauaaagggguggacacugugucuguagguaacacauuauauuauguaaauaagcaagaagguaaaagucucuauguaaaaggugaaccaauaauaaauuucuaugacccauuaguauuccccucugaugaauuugaugcaucaauaucucaagucaacgagaagauuaaccagagccuagcauuuauucguaaauccgaugaauuauuacauaauguaaaugcugguaaauccaccacaaauaucaugauaacuacuauaauuauagugauuauaguaauauuguuaucauuaauugcuguuggacugcucuuauacuguaaggccagaagcacaccagucacacuaagcaaagaucaacugagugguauaaauaauauugcauuuaguaacuaaggacuagugaagggaacacccaaauuuaauucagccuuaagcacaauuaauuaagagugaaacguaauuguacaagcaguuggucacccaccauagggcaugaucaacaccgcaaccuuuccuuuuucccccagugauucugaaaaaccccucuucccuucagcuugcuuagauguuccaaauuuaguaagcuuaaggcggccuacagaagaaaaagaaaaaaaaggccacaaaaguucccucucacuuucaguaaauaaaauaaaagcagcaacagaaauaaagaaauaaaugaaauucaaaaugaaauaaauauuguguugugcagcauuaaaaaaucaauaaaaauuaaaaaugagcaagaucuaaaaaaaaaaaaaaaaaaaaaaaaaaaaaaaaaaaaaaaaaaaaaaaaaaaaaaaaaaaaaaaaugcaucccccccccccccccccccccccccccccccaaaggcucuuuucagagccaccagaauu

SEQ ID NO: 376 - RNA, 2316 nt, Artificial Sequence
  mRNA product Design g-3 comprising derived and/or modified sequence from HRSV(A2)__F0 (opt1)
gggagaguccgcucagccagguugcagaagcggcuuagcguguguccuaaucuucucucugcguguagguaggccugugccgcaaacaagcuuaccauggagcugcucauccugaaggccaacgccaucaccaccauccugacggcggugaccuucugcuucgccagcggccagaacaucaccgaggaguucuaccaguccaccugcagcgccgucuccaagggguaccucagcgcccugcggacgggcugguacaccuccgugaucaccaucgagcugagcaacaucaaggagaacaagugcaacgggaccgacgccaaggugaagcucaucaagcaggagcuggacaaguacaagaacgcggucacggagcugcagcuccugaugcaguccaccccggcaaccaacaaccgcgcccggcgcgagcugccccgguucaugaacuacacccucaacaacgccaagaagacgaacgugacccugagcaagaagcgcaagcggcgcuuccugggcuuccuccugggggugggcuccgccaucgcgagcggcgucgccguguccaaggugcugcaccucgagggggaggucaacaagaucaagagcgcccugcuguccaccaacaaggccguggugagccucuccaacggcgucagcgugcugaccuccaaggugcuggaccucaagaacuacaucgacaagcagcugcugcccaucgucaacaagcagagcugcuccaucagcaacaucgagacggugaucgaguuccagcagaagaacaaccggcuccuggagaucacccgcgaguucagcgugaacgccggggucaccacccccguguccacguacaugcugaccaacagcgagcuccugucccugaucaacgacaugccgaucaccaacgaccagaagaagcucaugagcaacaacgugcagaucguccggcagcaguccuacagcaucauguccaucaucaaggaggaggugcuggcguacgugguccagcugccccucuacggcgugaucgacacccccugcuggaagcugcacacgagcccccugugcaccaccaacaccaaggagggguccaacaucugccucacgcgcaccgaccggggcugguacugcgacaacgccggcagcgucuccuucuucccgcaggccgagaccugcaaggugcagagcaaccgcguguucugcgacaccaugaacucccugacgcugcccagcgagguaaaccucugcaacgucgacaucuucaaccccaaguacgacugcaagaucaugaccuccaagaccgacgugagcuccagcgugaucaccucccugggggccaucgucagcugcuacggcaagacgaagugcaccgccagcaacaagaaccgggggaucaucaagaccuucuccaacggcugcgacuacgugagcaacaagggcguggacaccguguccgucgggaacacccuguacuacgugaacaagcaggagggcaagagccucuacgugaagggggagcccaucaucaacuucuacgacccgcuggucuuccccuccgacgaguucgacgcgagcaucucccaggugaacgagaagaucaaccagagccuggccuucauccgcaaguccgacgagcugcuccacaacgugaacgccggcaagagcacgaccaacaucaugaucaccaccaucaucaucgucaucaucgugauccugcugucccucaucgccguggggcugcugcucuacugcaaggcccggagcacgcccgucacccuguccaaggaccagcugagcggcaucaacaacaucgcguucuccaacugaggacuagugaagggaacacccaaauuuaauucagccuuaagcacaauuaauuaagagugaaacguaauuguacaagcaguuggucacccaccauagggcaugaucaacaccgcaaccuuuccuuuuucccccagugauucugaaaaaccccucuucccuucagcuugcuuagauguuccaaauuuaguaagcuuaaggcggccuacagaagaaaaagaaaaaaaaggccacaaaaguucccucucacuuucaguaaauaaaauaaaagcagcaacagaaauaaagaaauaaaugaaauucaaaaugaaauaaauauuguguugugcagcauuaaaaaaucaauaaaaauuaaaaaugagcaagaucuaaaaaaaaaaaaaaaaaaaaaaaaaaaaaaaaaaaaaaaaaaaaaaaaaaaaaaaaaaaaaaaaugcaucccccccccccccccccccccccccccccccaaaggcucuuuucagagccaccagaauu

SEQ ID NO: 377 - RNA, 2316 nt, Artificial Sequence
  mRNA product Design g-3 comprising derived and/or modified sequence from HRSV(A2)__F0 (opt1)
gggagaguccgcucagccagguugcagaagcggcuuagcguguguccuaaucuucucucugcguguagguaggccugugccgcaaacaagcuuaccauggagcugcucauccugaaggccaacgccaucaccaccauccugacggcggugaccuucugcuucgccagcggccagaacaucaccgaggaguucuaccaguccacgugcagcgccgucuccaagggguaccucagcgcccugcgcaccggcugguacaccuccgugaucaccaucgagcugagcaacaucaaggagaacaagugcaacgggaccgacgccaaggugaagcucaucaagcaggagcuggacaaguacaagaacgcggucacggagcugcagcuccugaugcaguccacccccgccaccaacaaccgggcccgccgggagcugccgcgcuucaugaacuacacccucaacaacgccaagaagacgaacgugacccugagcaagaagcggaagcgccgguuccugggcuuccuccugggggugggcuccgcgaucgccagcggcgucgccguguccaaggugcugcaccucgagggggaggucaacaagaucaagagcgcccugcuguccaccaacaaggccguggugagccucuccaacggcgucagcgugcugaccuccaaggugcuggaccucaagaacuacaucgacaagcagcugcugcccaucgucaacaagcagagcugcuccaucagcaacaucgagacggugaucgaguuccagcagaagaacaaccgccuccuggagaucacccgggaguucagcgugaacgcgggggucaccacccccguguccacguacaugcugaccaacagcgagcuccugucccugaucaacgacaugcccaucaccaacgaccagaagaagcucaugagcaacaacgugcagaucguccgccagcaguccuacagcaucauguccaucaucaaggaggaggugcuggccuacgugguccagcugccgcucuacggcgugaucgacacccccugcuggaagcugcacacgagcccccugugcaccaccaacaccaaggagggguccaacaucugccucacgcggaccgaccgcggcugguacugcgacaacgccggcagcgucuccuucuucccccaggccgagaccugcaaggugcagagcaaccggguguucugcgacaccaugaacucccugacgcugccgagcgaggucaaccucugcaacguggacaucuucaaccccaaguacgacugcaagaucaugaccuccaagaccgacgugagcuccagcgucaucaccucccugggggccaucgugagcugcuacggcaagacgaagugcaccgcgagcaacaagaaccgcgggaucaucaagaccuucuccaacggcugcgacuacgugagcaacaagggcgucgacaccguguccguggggaacacccuguacuacgucaacaagcaggagggcaagagccucuacgugaagggggagcccaucaucaacuucuacgacccccugguguucccguccgacgaguucgacgccagcaucucccaggucaacgagaagaucaaccagagccuggccuucauccggaaguccgacgagcuccugcacaacgugaacgccggcaagagcacgaccaacaucaugaucaccaccaucaucaucgugaucaucgucauccugcugucccucaucgccguggggcugcugcucuacugcaaggcgcgcagcacgcccgugacccuguccaaggaccagcugagcggcaucaacaacaucgccuucuccaacugaggacuagugaagggaacacccaaauuuaauucagccuuaagcacaauuaauuaagagugaaacguaauuguacaagcaguuggucacccaccauagggcaugaucaacaccgcaaccuuuccuuuuucccccagugauucugaaaaaccccucuucccuucagcuugcuuagauguuccaaauuuaguaagcuuaaggcggccuacagaagaaaaagaaaaaaaaggccacaaaaguucccucucacuuucaguaaauaaaauaaaagcagcaacagaaauaaagaaauaaaugaaauucaaaaugaaauaaauauuguguugugcagcauuaaaaaaucaauaaaaauuaaaaaugagcaagaucuaaaaaaaaaaaaaaaaaaaaaaaaaaaaaaaaaaaaaaaaaaaaaaaaaaaaaaaaaaaaaaaaugcaucccccccccccccccccccccccccccccccaaaggcucuuuucagagccaccagaauu

SEQ ID NO: 378 - RNA, 2316 nt, Artificial Sequence
  mRNA product Design g-3 comprising derived and/or modified sequence from HRSV(A2)__F0 (opt2)
gggagaguccgcucagccagguugcagaagcggcuuagcguguguccuaaucuucucucugcguguagguaggccugugccgcaaacaagcuuaccauggagcuccucauccucaaggccaacgccaucaccaccauccucaccgccgucaccuucugcuucgccuccggccagaacaucaccgaggaguucuaccaguccaccugcuccgccgucuccaagggcuaccucuccgcccuccgcaccggcugguacaccuccgucaucaccaucgagcucuccaacaucaaggagaacaagugcaacggcaccgacgccaaggucaagcucaucaagcaggagcucgacaaguacaagaacgccgucaccgagcuccagcuccucaugcaguccacccccgccaccaacaaccgcgcccgccgcgagcucccccgcuucaugaacuacacccucaacaacgccaagaagaccaacgucacccucuccaagaagcgcaagcgccgcuuccucggcuuccuccucggcgucggcuccgccaucgccuccggcgucgccgucuccaagguccuccaccucgagggcgaggucaacaagaucaaguccgcccuccucuccaccaacaaggccgucgucucccucuccaacggcgucuccguccucaccuccaagguccucgaccucaagaacuacaucgacaagcagcuccuccccaucgucaacaagcaguccugcuccaucuccaacaucgagaccgucaucgaguuccagcagaagaacaaccgccuccucgagaucacccgcgaguucuccgucaacgccggcgucaccacccccgucuccaccuacaugcucaccaacuccgagcuccucucccucaucaacgacaugcccaucaccaacgaccagaagaagcucauguccaacaacguccagaucguccgccagcaguccuacuccaucauguccaucaucaaggaggagguccucgccuacgucguccagcucccccucuacggcgucaucgacacccccugcuggaagcuccacaccuccccccucugcaccaccaacaccaaggagggcuccaacaucugccucacccgcaccgaccgcggcugguacugcgacaacgccggcuccgucuccuucuucccccaggccgagaccugcaagguccaguccaaccgcgucuucugcgacaccaugaacucccucacccuccccuccgaggucaaccucugcaacgucgacaucuucaaccccaaguacgacugcaagaucaugaccuccaagaccgacgucuccuccuccgucaucaccucccucggcgccaucgucuccugcuacggcaagaccaagugcaccgccuccaacaagaaccgcggcaucaucaagaccuucuccaacggcugcgacuacgucuccaacaagggcgucgacaccgucuccgucggcaacacccucuacuacgucaacaagcaggagggcaagucccucuacgucaagggcgagcccaucaucaacuucuacgacccccucgucuuccccuccgacgaguucgacgccuccaucucccaggucaacgagaagaucaaccagucccucgccuucauccgcaaguccgacgagcuccuccacaacgucaacgccggcaaguccaccaccaacaucaugaucaccaccaucaucaucgucaucaucgucauccuccucucccucaucgccgucggccuccuccucuacugcaaggcccgcuccacccccgucacccucuccaaggaccagcucuccggcaucaacaacaucgccuucuccaacugaggacuagugaagggaacacccaaauuuaauucagccuuaagcacaauuaauuaagagugaaacguaauuguacaagcaguuggucacccaccauagggcaugaucaacaccgcaaccuuuccuuuuucccccagugauucugaaaaaccccucuucccuucagcuugcuuagauguuccaaauuuaguaagcuuaaggcggccuacagaagaaaaagaaaaaaaaggccacaaaaguucccucucacuuucaguaaauaaaauaaaagcagcaacagaaauaaagaaauaaaugaaauucaaaaugaaauaaauauuguguugugcagcauuaaaaaaucaauaaaaauuaaaaaugagcaagaucuaaaaaaaaaaaaaaaaaaaaaaaaaaaaaaaaaaaaaaaaaaaaaaaaaaaaaaaaaaaaaaaaugcaucccccccccccccccccccccccccccccccaaaggcucuuuucagagccaccagaauu

SEQ ID NO: 379 - RNA, 2316 nt, Artificial Sequence
  mRNA product Design g-3 comprising derived and/or modified sequence from HRSV(A2)__F0 (opt3)
gggagaguccgcucagccagguugcagaagcggcuuagcguguguccuaaucuucucucugcguguagguaggccugugccgcaaacaagcuuaccauggagcugcucauccuuaaggccaacgcuauuaccacaauacugacugcagugacguucugcuuugccagcggccagaauaucaccgaagaguucuaccaauccacauguucugcggucucaaaaggguauuugagugcuuuaagaacuggaugguacaccagcguuauuacaaucgaacuguccaacauuaaggagaauaaaugcaacgguaccgacgccaaggugaaacuaaucaagcaggaacucgauaaguauaaaaaugcaguaacugagcugcagcuucugaugcagucuacacccgccaccaacaauagggcucggcgcgaguugccucgauuuaugaacuacacgcucaauaacgcaaagaaaacuaaugugacccugucgaagaaacguaagagaagguuccugggcuuucucuuaggggucggaucagccauagcuagcggcguggccguuaguaaggugcugcaccuugaaggugaggucaacaaaaucaaguccgcguugcugucuacaaauaaagcagugguaagccuauccaacgggguuucagugcucacuucuaagguccuggaccuuaaaaauuauauugauaagcaacuguugccaaucgugaacaaacagagcuguucuauuuccaacaucgaaaccgugauagaguuccagcagaagaauaaccggcuccuggagauuacacgcgaauuuucagucaaugccggaguuaccacgccggugagcacuuacauguuaacaaacagugagcugcucucucuuaucaaugacaugcccauuaccaacgaucaaaagaaacugauguccaauaacguacagaucgugagacagcagagcuauucgaucaugucuauuauaaaggaagaggucuuggcuuacgugguucaacuaccucuguacggcgugaucgacacuccaugcuggaaacuccauacauccccacuguguaccacgaauaccaaggaaggcucaaacauuugccuuacaaggacugaucgggggugguauugugacaaugccggaagugucagcuucuuuccucaggcagagaccugcaaagugcaguccaaccgcguauucugugauacaaugaauagucugacuuugccaagcgagguuaaccucugcaauguggacaucuuuaaccccaaguacgauuguaagauaaugaccucaaaaacagacgucaguuccagcgugauuaccucucugggugcuaucgucucaugcuauggcaagacuaaaugcacggccaguaacaagaaucgagggaucauuaaaacauucagcaacggaugugauuacguguccaauaagggcguugacaccgugucuguagguaacacuuuauauuacgucaauaagcaagaagggaaaucgcuguaugugaagggagagccuaucauuaacuuuuacgacccccuaguuuucccgagcgaugaauuugacgcguccauaucacaggugaaugagaaaaucaaccagagucucgccuucauuagaaagucugaugaacugcuucacaaugucaacgcaggcaaaagcaccacaaauaucaugaucaccacuauuauaaucgugauuaucguaauuuugcugucccucaucgcugugggccugcuucuguacugcaaggccaggucaacacccguuacguugagcaaggaccagcucucugggauaaacaauaucgcuuucuccaacugaggacuagugaagggaacacccaaauuuaauucagccuuaagcacaauuaauuaagagugaaacguaauuguacaagcaguuggucacccaccauagggcaugaucaacaccgcaaccuuuccuuuuucccccagugauucugaaaaaccccucuucccuucagcuugcuuagauguuccaaauuuaguaagcuuaaggcggccuacagaagaaaaagaaaaaaaaggccacaaaaguucccucucacuuucaguaaauaaaauaaaagcagcaacagaaauaaagaaauaaaugaaauucaaaaugaaauaaauauuguguugugcagcauuaaaaaaucaauaaaaauuaaaaaugagcaagaucuaaaaaaaaaaaaaaaaaaaaaaaaaaaaaaaaaaaaaaaaaaaaaaaaaaaaaaaaaaaaaaaaugcaucccccccccccccccccccccccccccccccaaaggcucuuuucagagccaccagaauu

SEQ ID NO: 380 - RNA, 2316 nt, Artificial Sequence
  mRNA product Design g-3 comprising derived and/or modified sequence from HRSV(A2)__F0 (opt4)
gggagaguccgcucagccagguugcagaagcggcuuagcguguguccuaaucuucucucugcguguagguaggccugugccgcaaacaagcuuaccauggagcugcugauccugaaggccaacgccaucaccaccauccugaccgccgugaccuucugcuucgccagcggccagaacaucaccgaggaguucuaccagagcaccugcagcgccgugagcaagggcuaccugagcgcccugagaaccggcugguacaccagcgugaucaccaucgagcugagcaacaucaaggagaacaagugcaacggcaccgacgccaaggugaagcugaucaagcaggagcuggacaaguacaagaacgccgugaccgagcugcagcugcugaugcagagcacccccgccaccaacaacagagccagaagagagcugcccagauucaugaacuacacccugaacaacgccaagaagaccaacgugacccugagcaagaagagaaagagaagauuccugggcuuccugcugggcgugggcagcgccaucgccagcggcguggccgugagcaaggugcugcaccuggagggcgaggugaacaagaucaagagcgcccugcugagcaccaacaaggccguggugagccugagcaacggcgugagcgugcugaccagcaaggugcuggaccugaagaacuacaucgacaagcagcugcugcccaucgugaacaagcagagcugcagcaucagcaacaucgagaccgugaucgaguuccagcagaagaacaacagacugcuggagaucaccagagaguucagcgugaacgccggcgugaccacccccgugagcaccuacaugcugaccaacagcgagcugcugagccugaucaacgacaugcccaucaccaacgaccagaagaagcugaugagcaacaacgugcagaucgugagacagcagagcuacagcaucaugagcaucaucaaggaggaggugcuggccuacguggugcagcugccccuguacggcgugaucgacacccccugcuggaagcugcacaccagcccccugugcaccaccaacaccaaggagggcagcaacaucugccugaccagaaccgacagaggcugguacugcgacaacgccggcagcgugagcuucuucccccaggccgagaccugcaaggugcagagcaacagaguguucugcgacaccaugaacagccugacccugcccagcgaggugaaccugugcaacguggacaucuucaaccccaaguacgacugcaagaucaugaccagcaagaccgacgugagcagcagcgugaucaccagccugggcgccaucgugagcugcuacggcaagaccaagugcaccgccagcaacaagaacagaggcaucaucaagaccuucagcaacggcugcgacuacgugagcaacaagggcguggacaccgugagcgugggcaacacccuguacuacgugaacaagcaggagggcaagagccuguacgugaagggcgagcccaucaucaacuucuacgacccccugguguuccccagcgacgaguucgacgccagcaucagccaggugaacgagaagaucaaccagagccuggccuucaucagaaagagcgacgagcugcugcacaacgugaacgccggcaagagcaccaccaacaucaugaucaccaccaucaucaucgugaucaucgugauccugcugagccugaucgccgugggccugcugcuguacugcaaggccagaagcacccccgugacccugagcaaggaccagcugagcggcaucaacaacaucgccuucagcaacugaggacuagugaagggaacacccaaauuuaauucagccuuaagcacaauuaauuaagagugaaacguaauuguacaagcaguuggucacccaccauagggcaugaucaacaccgcaaccuuuccuuuuucccccagugauucugaaaaaccccucuucccuucagcuugcuuagauguuccaaauuuaguaagcuuaaggcggccuacagaagaaaaagaaaaaaaaggccacaaaaguucccucucacuuucaguaaauaaaauaaaagcagcaacagaaauaaagaaauaaaugaaauucaaaaugaaauaaauauuguguugugcagcauuaaaaaaucaauaaaaauuaaaaaugagcaagaucuaaaaaaaaaaaaaaaaaaaaaaaaaaaaaaaaaaaaaaaaaaaaaaaaaaaaaaaaaaaaaaaaugcaucccccccccccccccccccccccccccccccaaaggcucuuuucagagccaccagaauu

SEQ ID NO: 381 - RNA, 2316 nt, Artificial Sequence
  mRNA product Design g-3 comprising derived and/or modified sequence from HRSV(A2)__F0 (opt5)
gggagaguccgcucagccagguugcagaagcggcuuagcguguguccuaaucuucucucugcguguagguaggccugugccgcaaacaagcuuaccauggagcugcucauccugaaggccaacgcuauuaccacaauccuuacggccgugaccuucugcuuugcgagcggccagaauauuacagaagaguucuaccaauccaccuguucugcugucagcaaaggguaucuguccgcccucagaacaggaugguacaccucuguuaucacaauugaacugagcaacaucaaggagaauaaaugcaacggcaccgacgccaaggugaaacuuaucaagcaggaacuggauaaguauaaaaaugcugugacggagcuccagcugcugaugcaguccacccccgccacaaacaaucgggcucgcagagagcucccucgguuuaugaacuacacccugaauaacgccaagaaaacaaaugucacccuuucuaagaaacgcaagagacgguuccugggguuucuccugggagugggcagcgcgauugccuccgggguugcugugagcaagguccuucaccuggaaggagaggugaacaaaaucaagucugcccuccuguccacgaauaaagcuguugugagccugucuaacggcgucuccgugcucacaagcaaggugcuggaccuuaaaaauuauauugauaagcaacugcucccgaucgucaacaaacagucuuguuccauuagcaacaucgaaaccguuauugaguuccagcagaagaauaaccgccugcuugagaucacaagagaauuuuccgugaaugccggcgugaccacccccgucucuacauacaugcugacgaacagcgagcuccugucccugaucaaugacaugccuauuaccaacgaucaaaagaaacucaugagcaauaacgugcagaucguucggcagcagucuuauuccauuaugagcaucauuaaggaagaggugcuggcguacgucgugcaacuuccccuguacgggguuaucgacacaccuugcuggaaacuccauaccucuccccuguguacaaccaauacgaaggaaggaagcaacaucugccuuacacgcaccgauagaggcugguauugugacaaugccggguccgugucuuucuuuccucaggcugagaccugcaaaguccagagcaaccggguguucugugauacaaugaacucccugacccucccgagcgaggucaaucugugcaauguggacauuuuuaaccccaaguacgauuguaagaucaugacaucuaaaacggacguuuccagcucugugauuaccucccugggagccaucgucagcugcuauggcaagacaaaaugcaccgcuuccaacaagaaucgcgggauuaucaaaacauucucuaacggaugugauuacgugagcaauaagggcguugacaccguguccgucggcaacacgcucuauuacgugaauaagcaagaagggaaaucucuguaugugaagggagagccuaucauuaacuuuuacgacccccuuguuuucccuagcgaugaauuugacgccuccaucagccaggucaaugagaaaauuaaccagucucuggccuucaucagaaaguccgaugaacuccugcacaaugugaacgcuggcaaaagcaccacaaauauuaugaucaccacaauuaucaucgugauuaucgucauucugcuuucucucaucgcgguggggcugcugcucuacugcaaggcccgguccacccccguuacgcugagcaaggaccagcuuucuggaauuaacaauaucgcuuucagcaacugaggacuagugaagggaacacccaaauuuaauucagccuuaagcacaauuaauuaagagugaaacguaauuguacaagcaguuggucacccaccauagggcaugaucaacaccgcaaccuuuccuuuuucccccagugauucugaaaaaccccucuucccuucagcuugcuuagauguuccaaauuuaguaagcuuaaggcggccuacagaagaaaaagaaaaaaaaggccacaaaaguucccucucacuuucaguaaauaaaauaaaagcagcaacagaaauaaagaaauaaaugaaauucaaaaugaaauaaauauuguguugugcagcauuaaaaaaucaauaaaaauuaaaaaugagcaagaucuaaaaaaaaaaaaaaaaaaaaaaaaaaaaaaaaaaaaaaaaaaaaaaaaaaaaaaaaaaaaaaaaugcaucccccccccccccccccccccccccccccccaaaggcucuuuucagagccaccagaauu

SEQ ID NO: 382 - RNA, 2316 nt, Artificial Sequence
  mRNA product Design g-3 comprising derived and/or modified sequence from HRSV(A2)__F0 (opt6)
gggagaguccgcucagccagguugcagaagcggcuuagcguguguccuaaucuucucucugcguguagguaggccugugccgcaaacaagcuuaccauggaacuucuaauauuaaaagcuaacgcaaucacuacuaucuuaaccgcaguaacauucuguuuugcauccggccaaaacauaacagaagaauuuuaccaaucaacuugcucugcagucucaaaagguuaucuaucugcauuaagaacaggcugguacaccucaguaauaacgaucgaacuaucaaacaucaaagaaaacaaauguaauggaacagacgcaaaaguaaaacuaaucaaacaagaacuagacaaauacaaaaacgcaguaaccgaacuccaacuccucaugcaaaguacaccagcaacaaauaacagagcaagacgugaacuaccacguuuuaugaauuacacgcucaauaacgcaaaaaaaacaaauguuacccuaucaaaaaaacgaaaaagaagauuccucggauuccuacuaggcguaggcucagcaauagcuucaggaguagcaguaucaaaaguacuccaccucgaaggagaaguaaacaaaaucaaaagcgcucuccucucaacaaacaaagcaguuguuucacucucaaacggaguaucaguacuaaccucaaaaguacuugaccuaaaaaauuauauagacaaacaacuauuaccaauaguaaacaaacaaagcugcuccaucuccaacaucgagacagucauagaauuucaacaaaaaaauaaccgccuauuagaaauaaccagagaauuuucaguaaacgcaggaguaacuaccccaguaucaacauauauguuaacaaacucagaacuccuaagucuaaucaacgacaugccaauaaccaacgaccaaaaaaaacuaaugagcaacaauguacaaauaguucgucaacaaucuuacuccauaaugucuauaauaaaagaagaaguacucgccuauguaguccaacuaccacuauacggagucaucgauacaccaugcuggaaacuccacacauccccacucuguacuacuaacaccaaagaagguucaaauauaugccuaaccagaacagauagagguugguacugcgauaaugcaggaucaguauccuuuuucccccaagccgaaacaugcaaaguucaauccaauagaguauuuugugauacaaugaacucuuuaacccucccauccgaagucaaucuauguaacgucgacauauuuaacccaaaauacgauugcaaaauaaugacaucaaaaacagacgucucauccucaguuauaacguccuuaggcgcuauaguaucaugcuacggcaaaacaaaauguacagcaucaaacaaaaacagaggaaucauaaaaacuuucucuaacgguugcgacuauguauccaacaaaggugucgacacaguauccguaggcaacacccuuuacuauguuaauaaacaagaaggaaaaucucuauauguaaaaggcgaaccaauuauaaauuuuuacgacccccuugucuuucccucugacgaauuugacgcuuccauaucacaagucaacgaaaaaaucaaccaaucccucgcauucauacgcaaaucagacgaacuacuacauaacgucaacgcaggcaaauccacaacaaacauaaugauaaccacaaucauaauuguaauaauaguaauacuacuuucucuaauagcagucggauuacucuuauacuguaaagcucgaucaacaccagucacccucucuaaagaucaacuauccggaaucaacaacauagcuuucucaaacuaaggacuagugaagggaacacccaaauuuaauucagccuuaagcacaauuaauuaagagugaaacguaauuguacaagcaguuggucacccaccauagggcaugaucaacaccgcaaccuuuccuuuuucccccagugauucugaaaaaccccucuucccuucagcuugcuuagauguuccaaauuuaguaagcuuaaggcggccuacagaagaaaaagaaaaaaaaggccacaaaaguucccucucacuuucaguaaauaaaauaaaagcagcaacagaaauaaagaaauaaaugaaauucaaaaugaaauaaauauuguguugugcagcauuaaaaaaucaauaaaaauuaaaaaugagcaagaucuaaaaaaaaaaaaaaaaaaaaaaaaaaaaaaaaaaaaaaaaaaaaaaaaaaaaaaaaaaaaaaaaugcaucccccccccccccccccccccccccccccccaaaggcucuuuucagagccaccagaauu

SEQ ID NO: 383 - RNA, 2316 nt, Artificial Sequence
  mRNA product Design g-3 comprising derived and/or modified sequence from HRSV(A2)__F0 (opt11)
gggagaguccgcucagccagguugcagaagcggcuuagcguguguccuaaucuucucucugcguguagguaggccugugccgcaaacaagcuuaccauggaacuccucauacucaaagccaacgcaaucacaaccauacucaccgccgucaccuucugcuuugcaucuggccagaacaucacugaagaguucuaccaauccacaugcuccgccguaagcaaaggcuaccuauccgcccuacgcaccggcugguacaccagcguaaucaccauagaacucuccaauauaaaagaaaacaaaugcaacggcaccgacgcaaaagucaagcuaauaaaacaagaacucgacaaauacaaaaacgccguuaccgaacuccagcuacucaugcaaucgaccccagcaaccaacaaccgugcgagacgcgaacucccccgcuucaugaacuacacccuaaacaacgccaaaaagaccaacguaacucuauccaagaaacgcaaacgccgcuuccucggauuccuccucggcgucggcuccgcaaucgccagcggcgucgccguuagcaaaguccuucaccucgaaggagaaguaaacaaaauuaaaagcgcccucuuauccacaaacaaggccguaguaucccugucaaacggcgucuccguccuuacauccaaaguccucgaccucaagaacuacauagacaaacagcuacuacccauuguaaauaaacaaagcugcucaauuagcaacaucgaaaccguaaucgaguuccagcagaaaaacaacagacuucucgaaaucacccgcgaguucagcgucaacgccggcguaaccaccccugucucaacauacaugcuaaccaacagcgaacugcucucccucaucaacgacaugcccaucaccaacgaccaaaagaaacucaugagcaacaacguacaaaucgugcgccaacaguccuacucaauaaugucaaucaucaaagaagaagugcuagcauacgucguacaacuaccacucuacggcguaauagauacccccugcuggaagcuccauaccuccccacucuguaccaccaacaccaaagaaggcucaaacaucugccuaacgcgcacagaccguggaugguacugugacaacgccggcuccgucuccuucuucccucaagccgaaacaugcaaaguccaauccaacagagucuucugcgauaccaugaacucccugacacucccaagcgaagucaaccuuugcaacgucgauaucuuuaaccccaaauacgacugcaagaucaugacaucaaaaaccgacguauccuccucuguaauaaccucccuaggcgcaaucguaucaugcuacggcaaaaccaaauguaccgccuccaacaaaaaucgcggcaucaucaaaaccuucucgaacggcugcgacuacgucuccaacaaaggcguagacacaguuuccguaggcaacacccucuacuacgucaauaaacaggaaggcaagucccucuacgucaaaggcgaacccaucaucaauuucuacgacccccucguuuuccccuccgaugaguucgacgcaagcaucagccaggucaacgaaaagauaaaccagucccucgccuucauccgcaaaucagaugaacuccuucacaacguuaacgcaggcaagagcaccaccaacaucaugaucacaacuauaaucaucgucauaaucgucauccuacucucacuaaucgccgucggucuccuacuauauuguaaagcccgaucaacaccggucacacucuccaaagaccaacucuccggaaucaacaauaucgcuuucucgaacuaaggacuagugaagggaacacccaaauuuaauucagccuuaagcacaauuaauuaagagugaaacguaauuguacaagcaguuggucacccaccauagggcaugaucaacaccgcaaccuuuccuuuuucccccagugauucugaaaaaccccucuucccuucagcuugcuuagauguuccaaauuuaguaagcuuaaggcggccuacagaagaaaaagaaaaaaaaggccacaaaaguucccucucacuuucaguaaauaaaauaaaagcagcaacagaaauaaagaaauaaaugaaauucaaaaugaaauaaauauuguguugugcagcauuaaaaaaucaauaaaaauuaaaaaugagcaagaucuaaaaaaaaaaaaaaaaaaaaaaaaaaaaaaaaaaaaaaaaaaaaaaaaaaaaaaaaaaaaaaaaugcaucccccccccccccccccccccccccccccccaaaggcucuuuucagagccaccagaauu

SEQ ID NO: 384 - RNA, 2111 nt, Artificial Sequence
  mRNA product Design g-4 comprising derived and/or modified sequence from HRSV(A2)__F0 (artificial)
gggagacuccugucgggcggaaguaggaggaguagaguuuaaaaacaguacucuuuuuccgguucgggacguaguugaagcaacgacaagccggauaaccgcucuugagacaggaagcuuaccauggaguugcuaauccucaaagcaaaugcaauuaccacaauccucacugcagucacauuuuguuuugcuucuggucaaaacaucacugaagaauuuuaucaaucaacaugcagugcaguuagcaaaggcuaucuuagugcucugagaacugguugguauaccaguguuauaacuauagaauuaaguaauaucaaggaaaauaaguguaauggaacagaugcuaagguaaaauugauaaaacaagaauuagauaaauauaaaaaugcuguaacagaauugcaguugcucaugcaaagcacaccagcaacaaacaaucgagccagaagagaacuaccaagguuuaugaauuauacacucaacaaugccaaaaaaaccaauguaacauuaagcaagaaaaggaaaagaagauuucuugguuuuuuguuagguguuggaucugcaaucgccaguggcguugcuguaucuaagguccugcaccuagaaggggaagugaacaagaucaaaagugcucuacuauccacaaacaaggcuguagucagcuuaucaaauggaguuagugucuuaaccagcaaaguguuagaccucaaaaacuauauagauaaacaauuguuaccuauugugaacaagcaaagcugcagcauaucaaauauagaaacugugauagaguuccaacaaaagaacaacagacuacuagagauuaccagggaauuuaguguuaaugcagguguaacuacaccuguaagcacuuacauguuaacuaauagugaauuauugucauuaaucaaugauaugccuauaacaaaugaucagaaaaaguuaauguccaacaauguucaaauaguuagacagcaaaguuacucuaucauguccauaauaaaagaggaagucuuagcauauguaguacaauuaccacuauaugguguuauagauacacccuguuggaaacuacacacauccccucuauguacaaccaacacaaaagaaggguccaacaucuguuuaacaagaacugacagaggaugguacugugacaaugcaggaucaguaucuuucuucccacaagcugaaacauguaaaguucaaucaaaucgaguauuuugugacacaaugaacaguuuaacauuaccaagugaaguaaaucucugcaauguugacauauucaaccccaaauaugauuguaaaauuaugacuucaaaaacagauguaagcagcuccguuaucacaucucuaggagccauugugucaugcuauggcaaaacuaaauguacagcauccaauaaaaaucguggaaucauaaagacauuuucuaacgggugcgauuauguaucaaauaaagggguggacacugugucuguagguaacacauuauauuauguaaauaagcaagaagguaaaagucucuauguaaaaggugaaccaauaauaaauuucuaugacccauuaguauuccccucugaugaauuugaugcaucaauaucucaagucaacgagaagauuaaccagagccuagcauuuauucguaaauccgaugaauuauuacauaauguaaaugcugguaaauccaccacaaauaucaugauaacuacuauaauuauagugauuauaguaauauuguuaucauuaauugcuguuggacugcucuuauacuguaaggccagaagcacaccagucacacuaagcaaagaucaacugagugguauaaauaauauugcauuuaguaacuaaggacuaguaauaaggaaacuguaugaaugucugugggcaggaagugaagagauccuucuguaaagguuuuuggaauuaugucugcugaauaauaaacuuuuuugaaauaauaaaucugguagaaaaaugagaucuaaaaaaaaaaaaaaaaaaaaaaaaaaaaaaaaaaaaaaaaaaaaaaaaaaaaaaaaaaaaaaaaugcaucccccccccccccccccccccccccccccccaaaggcucuuuucagagccaccagaauu

SEQ ID NO: 385 - RNA, 2111 nt, Artificial Sequence
  mRNA product Design g-4 comprising derived and/or modified sequence from HRSV(A2)__F0 (opt1)
gggagacuccugucgggcggaaguaggaggaguagaguuuaaaaacaguacucuuuuuccgguucgggacguaguugaagcaacgacaagccggauaaccgcucuugagacaggaagcuuaccauggagcugcucauccugaaggccaacgccaucaccaccauccugacggcggugaccuucugcuucgccagcggccagaacaucaccgaggaguucuaccaguccaccugcagcgccgucuccaagggguaccucagcgcccugcggacgggcugguacaccuccgugaucaccaucgagcugagcaacaucaaggagaacaagugcaacgggaccgacgccaaggugaagcucaucaagcaggagcuggacaaguacaagaacgcggucacggagcugcagcuccugaugcaguccaccccggcaaccaacaaccgcgcccggcgcgagcugccccgguucaugaacuacacccucaacaacgccaagaagacgaacgugacccugagcaagaagcgcaagcggcgcuuccugggcuuccuccugggggugggcuccgccaucgcgagcggcgucgccguguccaaggugcugcaccucgagggggaggucaacaagaucaagagcgcccugcuguccaccaacaaggccguggugagccucuccaacggcgucagcgugcugaccuccaaggugcuggaccucaagaacuacaucgacaagcagcugcugcccaucgucaacaagcagagcugcuccaucagcaacaucgagacggugaucgaguuccagcagaagaacaaccggcuccuggagaucacccgcgaguucagcgugaacgccggggucaccacccccguguccacguacaugcugaccaacagcgagcuccugucccugaucaacgacaugccgaucaccaacgaccagaagaagcucaugagcaacaacgugcagaucguccggcagcaguccuacagcaucauguccaucaucaaggaggaggugcuggcguacgugguccagcugccccucuacggcgugaucgacacccccugcuggaagcugcacacgagcccccugugcaccaccaacaccaaggagggguccaacaucugccucacgcgcaccgaccggggcugguacugcgacaacgccggcagcgucuccuucuucccgcaggccgagaccugcaaggugcagagcaaccgcguguucugcgacaccaugaacucccugacgcugcccagcgagguaaaccucugcaacgucgacaucuucaaccccaaguacgacugcaagaucaugaccuccaagaccgacgugagcuccagcgugaucaccucccugggggccaucgucagcugcuacggcaagacgaagugcaccgccagcaacaagaaccgggggaucaucaagaccuucuccaacggcugcgacuacgugagcaacaagggcguggacaccguguccgucgggaacacccuguacuacgugaacaagcaggagggcaagagccucuacgugaagggggagcccaucaucaacuucuacgacccgcuggucuuccccuccgacgaguucgacgcgagcaucucccaggugaacgagaagaucaaccagagccuggccuucauccgcaaguccgacgagcugcuccacaacgugaacgccggcaagagcacgaccaacaucaugaucaccaccaucaucaucgucaucaucgugauccugcugucccucaucgccguggggcugcugcucuacugcaaggcccggagcacgcccgucacccuguccaaggaccagcugagcggcaucaacaacaucgcguucuccaacugaggacuaguaauaaggaaacuguaugaaugucugugggcaggaagugaagagauccuucuguaaagguuuuuggaauuaugucugcugaauaauaaacuuuuuugaaauaauaaaucugguagaaaaaugagaucuaaaaaaaaaaaaaaaaaaaaaaaaaaaaaaaaaaaaaaaaaaaaaaaaaaaaaaaaaaaaaaaaugcaucccccccccccccccccccccccccccccccaaaggcucuuuucagagccaccagaauu

SEQ ID NO: 386 - RNA, 2111 nt, Artificial Sequence
  mRNA product Design g-4 comprising derived and/or modified sequence from HRSV(A2)__F0 (opt1)
gggagacuccugucgggcggaaguaggaggaguagaguuuaaaaacaguacucuuuuuccgguucgggacguaguugaagcaacgacaagccggauaaccgcucuugagacaggaagcuuaccauggagcugcucauccugaaggccaacgccaucaccaccauccugacggcggugaccuucugcuucgccagcggccagaacaucaccgaggaguucuaccaguccacgugcagcgccgucuccaagggguaccucagcgcccugcgcaccggcugguacaccuccgugaucaccaucgagcugagcaacaucaaggagaacaagugcaacgggaccgacgccaaggugaagcucaucaagcaggagcuggacaaguacaagaacgcggucacggagcugcagcuccugaugcaguccacccccgccaccaacaaccgggcccgccgggagcugccgcgcuucaugaacuacacccucaacaacgccaagaagacgaacgugacccugagcaagaagcggaagcgccgguuccugggcuuccuccugggggugggcuccgcgaucgccagcggcgucgccguguccaaggugcugcaccucgagggggaggucaacaagaucaagagcgcccugcuguccaccaacaaggccguggugagccucuccaacggcgucagcgugcugaccuccaaggugcuggaccucaagaacuacaucgacaagcagcugcugcccaucgucaacaagcagagcugcuccaucagcaacaucgagacggugaucgaguuccagcagaagaacaaccgccuccuggagaucacccgggaguucagcgugaacgcgggggucaccacccccguguccacguacaugcugaccaacagcgagcuccugucccugaucaacgacaugcccaucaccaacgaccagaagaagcucaugagcaacaacgugcagaucguccgccagcaguccuacagcaucauguccaucaucaaggaggaggugcuggccuacgugguccagcugccgcucuacggcgugaucgacacccccugcuggaagcugcacacgagcccccugugcaccaccaacaccaaggagggguccaacaucugccucacgcggaccgaccgcggcugguacugcgacaacgccggcagcgucuccuucuucccccaggccgagaccugcaaggugcagagcaaccggguguucugcgacaccaugaacucccugacgcugccgagcgaggucaaccucugcaacguggacaucuucaaccccaaguacgacugcaagaucaugaccuccaagaccgacgugagcuccagcgucaucaccucccugggggccaucgugagcugcuacggcaagacgaagugcaccgcgagcaacaagaaccgcgggaucaucaagaccuucuccaacggcugcgacuacgugagcaacaagggcgucgacaccguguccguggggaacacccuguacuacgucaacaagcaggagggcaagagccucuacgugaagggggagcccaucaucaacuucuacgacccccugguguucccguccgacgaguucgacgccagcaucucccaggucaacgagaagaucaaccagagccuggccuucauccggaaguccgacgagcuccugcacaacgugaacgccggcaagagcacgaccaacaucaugaucaccaccaucaucaucgugaucaucgucauccugcugucccucaucgccguggggcugcugcucuacugcaaggcgcgcagcacgcccgugacccuguccaaggaccagcugagcggcaucaacaacaucgccuucuccaacugaggacuaguaauaaggaaacuguaugaaugucugugggcaggaagugaagagauccuucuguaaagguuuuuggaauuaugucugcugaauaauaaacuuuuuugaaauaauaaaucugguagaaaaaugagaucuaaaaaaaaaaaaaaaaaaaaaaaaaaaaaaaaaaaaaaaaaaaaaaaaaaaaaaaaaaaaaaaaugcaucccccccccccccccccccccccccccccccaaaggcucuuuucagagccaccagaauu

SEQ ID NO: 387 - RNA, 2111 nt, Artificial Sequence
  mRNA product Design g-4 comprising derived and/or modified sequence from HRSV(A2)__F0 (opt2)
gggagacuccugucgggcggaaguaggaggaguagaguuuaaaaacaguacucuuuuuccgguucgggacguaguugaagcaacgacaagccggauaaccgcucuugagacaggaagcuuaccauggagcuccucauccucaaggccaacgccaucaccaccauccucaccgccgucaccuucugcuucgccuccggccagaacaucaccgaggaguucuaccaguccaccugcuccgccgucuccaagggcuaccucuccgcccuccgcaccggcugguacaccuccgucaucaccaucgagcucuccaacaucaaggagaacaagugcaacggcaccgacgccaaggucaagcucaucaagcaggagcucgacaaguacaagaacgccgucaccgagcuccagcuccucaugcaguccacccccgccaccaacaaccgcgcccgccgcgagcucccccgcuucaugaacuacacccucaacaacgccaagaagaccaacgucacccucuccaagaagcgcaagcgccgcuuccucggcuuccuccucggcgucggcuccgccaucgccuccggcgucgccgucuccaagguccuccaccucgagggcgaggucaacaagaucaaguccgcccuccucuccaccaacaaggccgucgucucccucuccaacggcgucuccguccucaccuccaagguccucgaccucaagaacuacaucgacaagcagcuccuccccaucgucaacaagcaguccugcuccaucuccaacaucgagaccgucaucgaguuccagcagaagaacaaccgccuccucgagaucacccgcgaguucuccgucaacgccggcgucaccacccccgucuccaccuacaugcucaccaacuccgagcuccucucccucaucaacgacaugcccaucaccaacgaccagaagaagcucauguccaacaacguccagaucguccgccagcaguccuacuccaucauguccaucaucaaggaggagguccucgccuacgucguccagcucccccucuacggcgucaucgacacccccugcuggaagcuccacaccuccccccucugcaccaccaacaccaaggagggcuccaacaucugccucacccgcaccgaccgcggcugguacugcgacaacgccggcuccgucuccuucuucccccaggccgagaccugcaagguccaguccaaccgcgucuucugcgacaccaugaacucccucacccuccccuccgaggucaaccucugcaacgucgacaucuucaaccccaaguacgacugcaagaucaugaccuccaagaccgacgucuccuccuccgucaucaccucccucggcgccaucgucuccugcuacggcaagaccaagugcaccgccuccaacaagaaccgcggcaucaucaagaccuucuccaacggcugcgacuacgucuccaacaagggcgucgacaccgucuccgucggcaacacccucuacuacgucaacaagcaggagggcaagucccucuacgucaagggcgagcccaucaucaacuucuacgacccccucgucuuccccuccgacgaguucgacgccuccaucucccaggucaacgagaagaucaaccagucccucgccuucauccgcaaguccgacgagcuccuccacaacgucaacgccggcaaguccaccaccaacaucaugaucaccaccaucaucaucgucaucaucgucauccuccucucccucaucgccgucggccuccuccucuacugcaaggcccgcuccacccccgucacccucuccaaggaccagcucuccggcaucaacaacaucgccuucuccaacugaggacuaguaauaaggaaacuguaugaaugucugugggcaggaagugaagagauccuucuguaaagguuuuuggaauuaugucugcugaauaauaaacuuuuuugaaauaauaaaucugguagaaaaaugagaucuaaaaaaaaaaaaaaaaaaaaaaaaaaaaaaaaaaaaaaaaaaaaaaaaaaaaaaaaaaaaaaaaugcaucccccccccccccccccccccccccccccccaaaggcucuuuucagagccaccagaauu

SEQ ID NO: 388 - RNA, 2111 nt, Artificial Sequence
  mRNA product Design g-4 comprising derived and/or modified sequence from HRSV(A2)__F0 (opt3)
gggagacuccugucgggcggaaguaggaggaguagaguuuaaaaacaguacucuuuuuccgguucgggacguaguugaagcaacgacaagccggauaaccgcucuugagacaggaagcuuaccauggagcugcucauccuuaaggccaacgcuauuaccacaauacugacugcagugacguucugcuuugccagcggccagaauaucaccgaagaguucuaccaauccacauguucugcggucucaaaaggguauuugagugcuuuaagaacuggaugguacaccagcguuauuacaaucgaacuguccaacauuaaggagaauaaaugcaacgguaccgacgccaaggugaaacuaaucaagcaggaacucgauaaguauaaaaaugcaguaacugagcugcagcuucugaugcagucuacacccgccaccaacaauagggcucggcgcgaguugccucgauuuaugaacuacacgcucaauaacgcaaagaaaacuaaugugacccugucgaagaaacguaagagaagguuccugggcuuucucuuaggggucggaucagccauagcuagcggcguggccguuaguaaggugcugcaccuugaaggugaggucaacaaaaucaaguccgcguugcugucuacaaauaaagcagugguaagccuauccaacgggguuucagugcucacuucuaagguccuggaccuuaaaaauuauauugauaagcaacuguugccaaucgugaacaaacagagcuguucuauuuccaacaucgaaaccgugauagaguuccagcagaagaauaaccggcuccuggagauuacacgcgaauuuucagucaaugccggaguuaccacgccggugagcacuuacauguuaacaaacagugagcugcucucucuuaucaaugacaugcccauuaccaacgaucaaaagaaacugauguccaauaacguacagaucgugagacagcagagcuauucgaucaugucuauuauaaaggaagaggucuuggcuuacgugguucaacuaccucuguacggcgugaucgacacuccaugcuggaaacuccauacauccccacuguguaccacgaauaccaaggaaggcucaaacauuugccuuacaaggacugaucgggggugguauugugacaaugccggaagugucagcuucuuuccucaggcagagaccugcaaagugcaguccaaccgcguauucugugauacaaugaauagucugacuuugccaagcgagguuaaccucugcaauguggacaucuuuaaccccaaguacgauuguaagauaaugaccucaaaaacagacgucaguuccagcgugauuaccucucugggugcuaucgucucaugcuauggcaagacuaaaugcacggccaguaacaagaaucgagggaucauuaaaacauucagcaacggaugugauuacguguccaauaagggcguugacaccgugucuguagguaacacuuuauauuacgucaauaagcaagaagggaaaucgcuguaugugaagggagagccuaucauuaacuuuuacgacccccuaguuuucccgagcgaugaauuugacgcguccauaucacaggugaaugagaaaaucaaccagagucucgccuucauuagaaagucugaugaacugcuucacaaugucaacgcaggcaaaagcaccacaaauaucaugaucaccacuauuauaaucgugauuaucguaauuuugcugucccucaucgcugugggccugcuucuguacugcaaggccaggucaacacccguuacguugagcaaggaccagcucucugggauaaacaauaucgcuuucuccaacugaggacuaguaauaaggaaacuguaugaaugucugugggcaggaagugaagagauccuucuguaaagguuuuuggaauuaugucugcugaauaauaaacuuuuuugaaauaauaaaucugguagaaaaaugagaucuaaaaaaaaaaaaaaaaaaaaaaaaaaaaaaaaaaaaaaaaaaaaaaaaaaaaaaaaaaaaaaaaugcaucccccccccccccccccccccccccccccccaaaggcucuuuucagagccaccagaauu

SEQ ID NO: 389 - RNA, 2111 nt, Artificial Sequence
  mRNA product Design g-4 comprising derived and/or modified sequence from HRSV(A2)__F0 (opt4)
gggagacuccugucgggcggaaguaggaggaguagaguuuaaaaacaguacucuuuuuccgguucgggacguaguugaagcaacgacaagccggauaaccgcucuugagacaggaagcuuaccauggagcugcugauccugaaggccaacgccaucaccaccauccugaccgccgugaccuucugcuucgccagcggccagaacaucaccgaggaguucuaccagagcaccugcagcgccgugagcaagggcuaccugagcgcccugagaaccggcugguacaccagcgugaucaccaucgagcugagcaacaucaaggagaacaagugcaacggcaccgacgccaaggugaagcugaucaagcaggagcuggacaaguacaagaacgccgugaccgagcugcagcugcugaugcagagcacccccgccaccaacaacagagccagaagagagcugcccagauucaugaacuacacccugaacaacgccaagaagaccaacgugacccugagcaagaagagaaagagaagauuccugggcuuccugcugggcgugggcagcgccaucgccagcggcguggccgugagcaaggugcugcaccuggagggcgaggugaacaagaucaagagcgcccugcugagcaccaacaaggccguggugagccugagcaacggcgugagcgugcugaccagcaaggugcuggaccugaagaacuacaucgacaagcagcugcugcccaucgugaacaagcagagcugcagcaucagcaacaucgagaccgugaucgaguuccagcagaagaacaacagacugcuggagaucaccagagaguucagcgugaacgccggcgugaccacccccgugagcaccuacaugcugaccaacagcgagcugcugagccugaucaacgacaugcccaucaccaacgaccagaagaagcugaugagcaacaacgugcagaucgugagacagcagagcuacagcaucaugagcaucaucaaggaggaggugcuggccuacguggugcagcugccccuguacggcgugaucgacacccccugcuggaagcugcacaccagcccccugugcaccaccaacaccaaggagggcagcaacaucugccugaccagaaccgacagaggcugguacugcgacaacgccggcagcgugagcuucuucccccaggccgagaccugcaaggugcagagcaacagaguguucugcgacaccaugaacagccugacccugcccagcgaggugaaccugugcaacguggacaucuucaaccccaaguacgacugcaagaucaugaccagcaagaccgacgugagcagcagcgugaucaccagccugggcgccaucgugagcugcuacggcaagaccaagugcaccgccagcaacaagaacagaggcaucaucaagaccuucagcaacggcugcgacuacgugagcaacaagggcguggacaccgugagcgugggcaacacccuguacuacgugaacaagcaggagggcaagagccuguacgugaagggcgagcccaucaucaacuucuacgacccccugguguuccccagcgacgaguucgacgccagcaucagccaggugaacgagaagaucaaccagagccuggccuucaucagaaagagcgacgagcugcugcacaacgugaacgccggcaagagcaccaccaacaucaugaucaccaccaucaucaucgugaucaucgugauccugcugagccugaucgccgugggccugcugcuguacugcaaggccagaagcacccccgugacccugagcaaggaccagcugagcggcaucaacaacaucgccuucagcaacugaggacuaguaauaaggaaacuguaugaaugucugugggcaggaagugaagagauccuucuguaaagguuuuuggaauuaugucugcugaauaauaaacuuuuuugaaauaauaaaucugguagaaaaaugagaucuaaaaaaaaaaaaaaaaaaaaaaaaaaaaaaaaaaaaaaaaaaaaaaaaaaaaaaaaaaaaaaaaugcaucccccccccccccccccccccccccccccccaaaggcucuuuucagagccaccagaauu

SEQ ID NO: 390 - RNA, 2111 nt, Artificial Sequence
  mRNA product Design g-4 comprising derived and/or modified sequence from HRSV(A2)__F0 (opt5)
gggagacuccugucgggcggaaguaggaggaguagaguuuaaaaacaguacucuuuuuccgguucgggacguaguugaagcaacgacaagccggauaaccgcucuugagacaggaagcuuaccauggagcugcucauccugaaggccaacgcuauuaccacaauccuuacggccgugaccuucugcuuugcgagcggccagaauauuacagaagaguucuaccaauccaccuguucugcugucagcaaaggguaucuguccgcccucagaacaggaugguacaccucuguuaucacaauugaacugagcaacaucaaggagaauaaaugcaacggcaccgacgccaaggugaaacuuaucaagcaggaacuggauaaguauaaaaaugcugugacggagcuccagcugcugaugcaguccacccccgccacaaacaaucgggcucgcagagagcucccucgguuuaugaacuacacccugaauaacgccaagaaaacaaaugucacccuuucuaagaaacgcaagagacgguuccugggguuucuccugggagugggcagcgcgauugccuccgggguugcugugagcaagguccuucaccuggaaggagaggugaacaaaaucaagucugcccuccuguccacgaauaaagcuguugugagccugucuaacggcgucuccgugcucacaagcaaggugcuggaccuuaaaaauuauauugauaagcaacugcucccgaucgucaacaaacagucuuguuccauuagcaacaucgaaaccguuauugaguuccagcagaagaauaaccgccugcuugagaucacaagagaauuuuccgugaaugccggcgugaccacccccgucucuacauacaugcugacgaacagcgagcuccugucccugaucaaugacaugccuauuaccaacgaucaaaagaaacucaugagcaauaacgugcagaucguucggcagcagucuuauuccauuaugagcaucauuaaggaagaggugcuggcguacgucgugcaacuuccccuguacgggguuaucgacacaccuugcuggaaacuccauaccucuccccuguguacaaccaauacgaaggaaggaagcaacaucugccuuacacgcaccgauagaggcugguauugugacaaugccggguccgugucuuucuuuccucaggcugagaccugcaaaguccagagcaaccggguguucugugauacaaugaacucccugacccucccgagcgaggucaaucugugcaauguggacauuuuuaaccccaaguacgauuguaagaucaugacaucuaaaacggacguuuccagcucugugauuaccucccugggagccaucgucagcugcuauggcaagacaaaaugcaccgcuuccaacaagaaucgcgggauuaucaaaacauucucuaacggaugugauuacgugagcaauaagggcguugacaccguguccgucggcaacacgcucuauuacgugaauaagcaagaagggaaaucucuguaugugaagggagagccuaucauuaacuuuuacgacccccuuguuuucccuagcgaugaauuugacgccuccaucagccaggucaaugagaaaauuaaccagucucuggccuucaucagaaaguccgaugaacuccugcacaaugugaacgcuggcaaaagcaccacaaauauuaugaucaccacaauuaucaucgugauuaucgucauucugcuuucucucaucgcgguggggcugcugcucuacugcaaggcccgguccacccccguuacgcugagcaaggaccagcuuucuggaauuaacaauaucgcuuucagcaacugaggacuaguaauaaggaaacuguaugaaugucugugggcaggaagugaagagauccuucuguaaagguuuuuggaauuaugucugcugaauaauaaacuuuuuugaaauaauaaaucugguagaaaaaugagaucuaaaaaaaaaaaaaaaaaaaaaaaaaaaaaaaaaaaaaaaaaaaaaaaaaaaaaaaaaaaaaaaaugcaucccccccccccccccccccccccccccccccaaaggcucuuuucagagccaccagaauu

SEQ ID NO: 391 - RNA, 2111 nt, Artificial Sequence
  mRNA product Design g-4 comprising derived and/or modified sequence from HRSV(A2)__F0 (opt6)
gggagacuccugucgggcggaaguaggaggaguagaguuuaaaaacaguacucuuuuuccgguucgggacguaguugaagcaacgacaagccggauaaccgcucuugagacaggaagcuuaccauggaacuucuaauauuaaaagcuaacgcaaucacuacuaucuuaaccgcaguaacauucuguuuugcauccggccaaaacauaacagaagaauuuuaccaaucaacuugcucugcagucucaaaagguuaucuaucugcauuaagaacaggcugguacaccucaguaauaacgaucgaacuaucaaacaucaaagaaaacaaauguaauggaacagacgcaaaaguaaaacuaaucaaacaagaacuagacaaauacaaaaacgcaguaaccgaacuccaacuccucaugcaaaguacaccagcaacaaauaacagagcaagacgugaacuaccacguuuuaugaauuacacgcucaauaacgcaaaaaaaacaaauguuacccuaucaaaaaaacgaaaaagaagauuccucggauuccuacuaggcguaggcucagcaauagcuucaggaguagcaguaucaaaaguacuccaccucgaaggagaaguaaacaaaaucaaaagcgcucuccucucaacaaacaaagcaguuguuucacucucaaacggaguaucaguacuaaccucaaaaguacuugaccuaaaaaauuauauagacaaacaacuauuaccaauaguaaacaaacaaagcugcuccaucuccaacaucgagacagucauagaauuucaacaaaaaaauaaccgccuauuagaaauaaccagagaauuuucaguaaacgcaggaguaacuaccccaguaucaacauauauguuaacaaacucagaacuccuaagucuaaucaacgacaugccaauaaccaacgaccaaaaaaaacuaaugagcaacaauguacaaauaguucgucaacaaucuuacuccauaaugucuauaauaaaagaagaaguacucgccuauguaguccaacuaccacuauacggagucaucgauacaccaugcuggaaacuccacacauccccacucuguacuacuaacaccaaagaagguucaaauauaugccuaaccagaacagauagagguugguacugcgauaaugcaggaucaguauccuuuuucccccaagccgaaacaugcaaaguucaauccaauagaguauuuugugauacaaugaacucuuuaacccucccauccgaagucaaucuauguaacgucgacauauuuaacccaaaauacgauugcaaaauaaugacaucaaaaacagacgucucauccucaguuauaacguccuuaggcgcuauaguaucaugcuacggcaaaacaaaauguacagcaucaaacaaaaacagaggaaucauaaaaacuuucucuaacgguugcgacuauguauccaacaaaggugucgacacaguauccguaggcaacacccuuuacuauguuaauaaacaagaaggaaaaucucuauauguaaaaggcgaaccaauuauaaauuuuuacgacccccuugucuuucccucugacgaauuugacgcuuccauaucacaagucaacgaaaaaaucaaccaaucccucgcauucauacgcaaaucagacgaacuacuacauaacgucaacgcaggcaaauccacaacaaacauaaugauaaccacaaucauaauuguaauaauaguaauacuacuuucucuaauagcagucggauuacucuuauacuguaaagcucgaucaacaccagucacccucucuaaagaucaacuauccggaaucaacaacauagcuuucucaaacuaaggacuaguaauaaggaaacuguaugaaugucugugggcaggaagugaagagauccuucuguaaagguuuuuggaauuaugucugcugaauaauaaacuuuuuugaaauaauaaaucugguagaaaaaugagaucuaaaaaaaaaaaaaaaaaaaaaaaaaaaaaaaaaaaaaaaaaaaaaaaaaaaaaaaaaaaaaaaaugcaucccccccccccccccccccccccccccccccaaaggcucuuuucagagccaccagaauu

SEQ ID NO: 392 - RNA, 2111 nt, Artificial Sequence
  mRNA product Design g-4 comprising derived and/or modified sequence from HRSV(A2)__F0 (opt11)
gggagacuccugucgggcggaaguaggaggaguagaguuuaaaaacaguacucuuuuuccgguucgggacguaguugaagcaacgacaagccggauaaccgcucuugagacaggaagcuuaccauggaacuccucauacucaaagccaacgcaaucacaaccauacucaccgccgucaccuucugcuuugcaucuggccagaacaucacugaagaguucuaccaauccacaugcuccgccguaagcaaaggcuaccuauccgcccuacgcaccggcugguacaccagcguaaucaccauagaacucuccaauauaaaagaaaacaaaugcaacggcaccgacgcaaaagucaagcuaauaaaacaagaacucgacaaauacaaaaacgccguuaccgaacuccagcuacucaugcaaucgaccccagcaaccaacaaccgugcgagacgcgaacucccccgcuucaugaacuacacccuaaacaacgccaaaaagaccaacguaacucuauccaagaaacgcaaacgccgcuuccucggauuccuccucggcgucggcuccgcaaucgccagcggcgucgccguuagcaaaguccuucaccucgaaggagaaguaaacaaaauuaaaagcgcccucuuauccacaaacaaggccguaguaucccugucaaacggcgucuccguccuuacauccaaaguccucgaccucaagaacuacauagacaaacagcuacuacccauuguaaauaaacaaagcugcucaauuagcaacaucgaaaccguaaucgaguuccagcagaaaaacaacagacuucucgaaaucacccgcgaguucagcgucaacgccggcguaaccaccccugucucaacauacaugcuaaccaacagcgaacugcucucccucaucaacgacaugcccaucaccaacgaccaaaagaaacucaugagcaacaacguacaaaucgugcgccaacaguccuacucaauaaugucaaucaucaaagaagaagugcuagcauacgucguacaacuaccacucuacggcguaauagauacccccugcuggaagcuccauaccuccccacucuguaccaccaacaccaaagaaggcucaaacaucugccuaacgcgcacagaccguggaugguacugugacaacgccggcuccgucuccuucuucccucaagccgaaacaugcaaaguccaauccaacagagucuucugcgauaccaugaacucccugacacucccaagcgaagucaaccuuugcaacgucgauaucuuuaaccccaaauacgacugcaagaucaugacaucaaaaaccgacguauccuccucuguaauaaccucccuaggcgcaaucguaucaugcuacggcaaaaccaaauguaccgccuccaacaaaaaucgcggcaucaucaaaaccuucucgaacggcugcgacuacgucuccaacaaaggcguagacacaguuuccguaggcaacacccucuacuacgucaauaaacaggaaggcaagucccucuacgucaaaggcgaacccaucaucaauuucuacgacccccucguuuuccccuccgaugaguucgacgcaagcaucagccaggucaacgaaaagauaaaccagucccucgccuucauccgcaaaucagaugaacuccuucacaacguuaacgcaggcaagagcaccaccaacaucaugaucacaacuauaaucaucgucauaaucgucauccuacucucacuaaucgccgucggucuccuacuauauuguaaagcccgaucaacaccggucacacucuccaaagaccaacucuccggaaucaacaauaucgcuuucucgaacuaaggacuaguaauaaggaaacuguaugaaugucugugggcaggaagugaagagauccuucuguaaagguuuuuggaauuaugucugcugaauaauaaacuuuuuugaaauaauaaaucugguagaaaaaugagaucuaaaaaaaaaaaaaaaaaaaaaaaaaaaaaaaaaaaaaaaaaaaaaaaaaaaaaaaaaaaaaaaaugcaucccccccccccccccccccccccccccccccaaaggcucuuuucagagccaccagaauu

SEQ ID NO: 393 - RNA, 2087 nt, Artificial Sequence
  mRNA product Design g-5 comprising derived and/or modified sequence from HRSV(A2)__F0 (artificial)
gggagacccgugacccggaaguuguacggcuacgcgacuuucccucccacaaacccucgcgcccuuccuuuccuacuugggcccggcagaaagcuuaccauggaguugcuaauccucaaagcaaaugcaauuaccacaauccucacugcagucacauuuuguuuugcuucuggucaaaacaucacugaagaauuuuaucaaucaacaugcagugcaguuagcaaaggcuaucuuagugcucugagaacugguugguauaccaguguuauaacuauagaauuaaguaauaucaaggaaaauaaguguaauggaacagaugcuaagguaaaauugauaaaacaagaauuagauaaauauaaaaaugcuguaacagaauugcaguugcucaugcaaagcacaccagcaacaaacaaucgagccagaagagaacuaccaagguuuaugaauuauacacucaacaaugccaaaaaaaccaauguaacauuaagcaagaaaaggaaaagaagauuucuugguuuuuuguuagguguuggaucugcaaucgccaguggcguugcuguaucuaagguccugcaccuagaaggggaagugaacaagaucaaaagugcucuacuauccacaaacaaggcuguagucagcuuaucaaauggaguuagugucuuaaccagcaaaguguuagaccucaaaaacuauauagauaaacaauuguuaccuauugugaacaagcaaagcugcagcauaucaaauauagaaacugugauagaguuccaacaaaagaacaacagacuacuagagauuaccagggaauuuaguguuaaugcagguguaacuacaccuguaagcacuuacauguuaacuaauagugaauuauugucauuaaucaaugauaugccuauaacaaaugaucagaaaaaguuaauguccaacaauguucaaauaguuagacagcaaaguuacucuaucauguccauaauaaaagaggaagucuuagcauauguaguacaauuaccacuauaugguguuauagauacacccuguuggaaacuacacacauccccucuauguacaaccaacacaaaagaaggguccaacaucuguuuaacaagaacugacagaggaugguacugugacaaugcaggaucaguaucuuucuucccacaagcugaaacauguaaaguucaaucaaaucgaguauuuugugacacaaugaacaguuuaacauuaccaagugaaguaaaucucugcaauguugacauauucaaccccaaauaugauuguaaaauuaugacuucaaaaacagauguaagcagcuccguuaucacaucucuaggagccauugugucaugcuauggcaaaacuaaauguacagcauccaauaaaaaucguggaaucauaaagacauuuucuaacgggugcgauuauguaucaaauaaagggguggacacugugucuguagguaacacauuauauuauguaaauaagcaagaagguaaaagucucuauguaaaaggugaaccaauaauaaauuucuaugacccauuaguauuccccucugaugaauuugaugcaucaauaucucaagucaacgagaagauuaaccagagccuagcauuuauucguaaauccgaugaauuauuacauaauguaaaugcugguaaauccaccacaaauaucaugauaacuacuauaauuauagugauuauaguaauauuguuaucauuaauugcuguuggacugcucuuauacuguaaggccagaagcacaccagucacacuaagcaaagaucaacugagugguauaaauaauauugcauuuaguaacuaaggacuaguaauaaggaaacuguaugaaugucugugggcaggaagugaagagauccuucuguaaagguuuuuggaauuaugucugcugaauaauaaacuuuuuugaaauaauaaaucugguagaaaaaugagaucuaaaaaaaaaaaaaaaaaaaaaaaaaaaaaaaaaaaaaaaaaaaaaaaaaaaaaaaaaaaaaaaaugcaucccccccccccccccccccccccccccccccaaaggcucuuuucagagccaccagaauu

SEQ ID NO: 394 - RNA, 2087 nt, Artificial Sequence
  mRNA product Design g-5 comprising derived and/or modified sequence from HRSV(A2)__F0 (opt1)
gggagacccgugacccggaaguuguacggcuacgcgacuuucccucccacaaacccucgcgcccuuccuuuccuacuugggcccggcagaaagcuuaccauggagcugcucauccugaaggccaacgccaucaccaccauccugacggcggugaccuucugcuucgccagcggccagaacaucaccgaggaguucuaccaguccaccugcagcgccgucuccaagggguaccucagcgcccugcggacgggcugguacaccuccgugaucaccaucgagcugagcaacaucaaggagaacaagugcaacgggaccgacgccaaggugaagcucaucaagcaggagcuggacaaguacaagaacgcggucacggagcugcagcuccugaugcaguccaccccggcaaccaacaaccgcgcccggcgcgagcugccccgguucaugaacuacacccucaacaacgccaagaagacgaacgugacccugagcaagaagcgcaagcggcgcuuccugggcuuccuccugggggugggcuccgccaucgcgagcggcgucgccguguccaaggugcugcaccucgagggggaggucaacaagaucaagagcgcccugcuguccaccaacaaggccguggugagccucuccaacggcgucagcgugcugaccuccaaggugcuggaccucaagaacuacaucgacaagcagcugcugcccaucgucaacaagcagagcugcuccaucagcaacaucgagacggugaucgaguuccagcagaagaacaaccggcuccuggagaucacccgcgaguucagcgugaacgccggggucaccacccccguguccacguacaugcugaccaacagcgagcuccugucccugaucaacgacaugccgaucaccaacgaccagaagaagcucaugagcaacaacgugcagaucguccggcagcaguccuacagcaucauguccaucaucaaggaggaggugcuggcguacgugguccagcugccccucuacggcgugaucgacacccccugcuggaagcugcacacgagcccccugugcaccaccaacaccaaggagggguccaacaucugccucacgcgcaccgaccggggcugguacugcgacaacgccggcagcgucuccuucuucccgcaggccgagaccugcaaggugcagagcaaccgcguguucugcgacaccaugaacucccugacgcugcccagcgagguaaaccucugcaacgucgacaucuucaaccccaaguacgacugcaagaucaugaccuccaagaccgacgugagcuccagcgugaucaccucccugggggccaucgucagcugcuacggcaagacgaagugcaccgccagcaacaagaaccgggggaucaucaagaccuucuccaacggcugcgacuacgugagcaacaagggcguggacaccguguccgucgggaacacccuguacuacgugaacaagcaggagggcaagagccucuacgugaagggggagcccaucaucaacuucuacgacccgcuggucuuccccuccgacgaguucgacgcgagcaucucccaggugaacgagaagaucaaccagagccuggccuucauccgcaaguccgacgagcugcuccacaacgugaacgccggcaagagcacgaccaacaucaugaucaccaccaucaucaucgucaucaucgugauccugcugucccucaucgccguggggcugcugcucuacugcaaggcccggagcacgcccgucacccuguccaaggaccagcugagcggcaucaacaacaucgcguucuccaacugaggacuaguaauaaggaaacuguaugaaugucugugggcaggaagugaagagauccuucuguaaagguuuuuggaauuaugucugcugaauaauaaacuuuuuugaaauaauaaaucugguagaaaaaugagaucuaaaaaaaaaaaaaaaaaaaaaaaaaaaaaaaaaaaaaaaaaaaaaaaaaaaaaaaaaaaaaaaaugcaucccccccccccccccccccccccccccccccaaaggcucuuuucagagccaccagaauu

SEQ ID NO: 395 - RNA, 2087 nt, Artificial Sequence
  mRNA product Design g-5 comprising derived and/or modified sequence from HRSV(A2)__F0 (opt1)
gggagacccgugacccggaaguuguacggcuacgcgacuuucccucccacaaacccucgcgcccuuccuuuccuacuugggcccggcagaaagcuuaccauggagcugcucauccugaaggccaacgccaucaccaccauccugacggcggugaccuucugcuucgccagcggccagaacaucaccgaggaguucuaccaguccacgugcagcgccgucuccaagggguaccucagcgcccugcgcaccggcugguacaccuccgugaucaccaucgagcugagcaacaucaaggagaacaagugcaacgggaccgacgccaaggugaagcucaucaagcaggagcuggacaaguacaagaacgcggucacggagcugcagcuccugaugcaguccacccccgccaccaacaaccgggcccgccgggagcugccgcgcuucaugaacuacacccucaacaacgccaagaagacgaacgugacccugagcaagaagcggaagcgccgguuccugggcuuccuccugggggugggcuccgcgaucgccagcggcgucgccguguccaaggugcugcaccucgagggggaggucaacaagaucaagagcgcccugcuguccaccaacaaggccguggugagccucuccaacggcgucagcgugcugaccuccaaggugcuggaccucaagaacuacaucgacaagcagcugcugcccaucgucaacaagcagagcugcuccaucagcaacaucgagacggugaucgaguuccagcagaagaacaaccgccuccuggagaucacccgggaguucagcgugaacgcgggggucaccacccccguguccacguacaugcugaccaacagcgagcuccugucccugaucaacgacaugcccaucaccaacgaccagaagaagcucaugagcaacaacgugcagaucguccgccagcaguccuacagcaucauguccaucaucaaggaggaggugcuggccuacgugguccagcugccgcucuacggcgugaucgacacccccugcuggaagcugcacacgagcccccugugcaccaccaacaccaaggagggguccaacaucugccucacgcggaccgaccgcggcugguacugcgacaacgccggcagcgucuccuucuucccccaggccgagaccugcaaggugcagagcaaccggguguucugcgacaccaugaacucccugacgcugccgagcgaggucaaccucugcaacguggacaucuucaaccccaaguacgacugcaagaucaugaccuccaagaccgacgugagcuccagcgucaucaccucccugggggccaucgugagcugcuacggcaagacgaagugcaccgcgagcaacaagaaccgcgggaucaucaagaccuucuccaacggcugcgacuacgugagcaacaagggcgucgacaccguguccguggggaacacccuguacuacgucaacaagcaggagggcaagagccucuacgugaagggggagcccaucaucaacuucuacgacccccugguguucccguccgacgaguucgacgccagcaucucccaggucaacgagaagaucaaccagagccuggccuucauccggaaguccgacgagcuccugcacaacgugaacgccggcaagagcacgaccaacaucaugaucaccaccaucaucaucgugaucaucgucauccugcugucccucaucgccguggggcugcugcucuacugcaaggcgcgcagcacgcccgugacccuguccaaggaccagcugagcggcaucaacaacaucgccuucuccaacugaggacuaguaauaaggaaacuguaugaaugucugugggcaggaagugaagagauccuucuguaaagguuuuuggaauuaugucugcugaauaauaaacuuuuuugaaauaauaaaucugguagaaaaaugagaucuaaaaaaaaaaaaaaaaaaaaaaaaaaaaaaaaaaaaaaaaaaaaaaaaaaaaaaaaaaaaaaaaugcaucccccccccccccccccccccccccccccccaaaggcucuuuucagagccaccagaauu

SEQ ID NO: 396 - RNA, 2087 nt, Artificial Sequence
  mRNA product Design g-5 comprising derived and/or modified sequence from HRSV(A2)__F0 (opt2)
gggagacccgugacccggaaguuguacggcuacgcgacuuucccucccacaaacccucgcgcccuuccuuuccuacuugggcccggcagaaagcuuaccauggagcuccucauccucaaggccaacgccaucaccaccauccucaccgccgucaccuucugcuucgccuccggccagaacaucaccgaggaguucuaccaguccaccugcuccgccgucuccaagggcuaccucuccgcccuccgcaccggcugguacaccuccgucaucaccaucgagcucuccaacaucaaggagaacaagugcaacggcaccgacgccaaggucaagcucaucaagcaggagcucgacaaguacaagaacgccgucaccgagcuccagcuccucaugcaguccacccccgccaccaacaaccgcgcccgccgcgagcucccccgcuucaugaacuacacccucaacaacgccaagaagaccaacgucacccucuccaagaagcgcaagcgccgcuuccucggcuuccuccucggcgucggcuccgccaucgccuccggcgucgccgucuccaagguccuccaccucgagggcgaggucaacaagaucaaguccgcccuccucuccaccaacaaggccgucgucucccucuccaacggcgucuccguccucaccuccaagguccucgaccucaagaacuacaucgacaagcagcuccuccccaucgucaacaagcaguccugcuccaucuccaacaucgagaccgucaucgaguuccagcagaagaacaaccgccuccucgagaucacccgcgaguucuccgucaacgccggcgucaccacccccgucuccaccuacaugcucaccaacuccgagcuccucucccucaucaacgacaugcccaucaccaacgaccagaagaagcucauguccaacaacguccagaucguccgccagcaguccuacuccaucauguccaucaucaaggaggagguccucgccuacgucguccagcucccccucuacggcgucaucgacacccccugcuggaagcuccacaccuccccccucugcaccaccaacaccaaggagggcuccaacaucugccucacccgcaccgaccgcggcugguacugcgacaacgccggcuccgucuccuucuucccccaggccgagaccugcaagguccaguccaaccgcgucuucugcgacaccaugaacucccucacccuccccuccgaggucaaccucugcaacgucgacaucuucaaccccaaguacgacugcaagaucaugaccuccaagaccgacgucuccuccuccgucaucaccucccucggcgccaucgucuccugcuacggcaagaccaagugcaccgccuccaacaagaaccgcggcaucaucaagaccuucuccaacggcugcgacuacgucuccaacaagggcgucgacaccgucuccgucggcaacacccucuacuacgucaacaagcaggagggcaagucccucuacgucaagggcgagcccaucaucaacuucuacgacccccucgucuuccccuccgacgaguucgacgccuccaucucccaggucaacgagaagaucaaccagucccucgccuucauccgcaaguccgacgagcuccuccacaacgucaacgccggcaaguccaccaccaacaucaugaucaccaccaucaucaucgucaucaucgucauccuccucucccucaucgccgucggccuccuccucuacugcaaggcccgcuccacccccgucacccucuccaaggaccagcucuccggcaucaacaacaucgccuucuccaacugaggacuaguaauaaggaaacuguaugaaugucugugggcaggaagugaagagauccuucuguaaagguuuuuggaauuaugucugcugaauaauaaacuuuuuugaaauaauaaaucugguagaaaaaugagaucuaaaaaaaaaaaaaaaaaaaaaaaaaaaaaaaaaaaaaaaaaaaaaaaaaaaaaaaaaaaaaaaaugcaucccccccccccccccccccccccccccccccaaaggcucuuuucagagccaccagaauu

SEQ ID NO: 397 - RNA, 2087 nt, Artificial Sequence
  mRNA product Design g-5 comprising derived and/or modified sequence from HRSV(A2)__F0 (opt3)
gggagacccgugacccggaaguuguacggcuacgcgacuuucccucccacaaacccucgcgcccuuccuuuccuacuugggcccggcagaaagcuuaccauggagcugcucauccuuaaggccaacgcuauuaccacaauacugacugcagugacguucugcuuugccagcggccagaauaucaccgaagaguucuaccaauccacauguucugcggucucaaaaggguauuugagugcuuuaagaacuggaugguacaccagcguuauuacaaucgaacuguccaacauuaaggagaauaaaugcaacgguaccgacgccaaggugaaacuaaucaagcaggaacucgauaaguauaaaaaugcaguaacugagcugcagcuucugaugcagucuacacccgccaccaacaauagggcucggcgcgaguugccucgauuuaugaacuacacgcucaauaacgcaaagaaaacuaaugugacccugucgaagaaacguaagagaagguuccugggcuuucucuuaggggucggaucagccauagcuagcggcguggccguuaguaaggugcugcaccuugaaggugaggucaacaaaaucaaguccgcguugcugucuacaaauaaagcagugguaagccuauccaacgggguuucagugcucacuucuaagguccuggaccuuaaaaauuauauugauaagcaacuguugccaaucgugaacaaacagagcuguucuauuuccaacaucgaaaccgugauagaguuccagcagaagaauaaccggcuccuggagauuacacgcgaauuuucagucaaugccggaguuaccacgccggugagcacuuacauguuaacaaacagugagcugcucucucuuaucaaugacaugcccauuaccaacgaucaaaagaaacugauguccaauaacguacagaucgugagacagcagagcuauucgaucaugucuauuauaaaggaagaggucuuggcuuacgugguucaacuaccucuguacggcgugaucgacacuccaugcuggaaacuccauacauccccacuguguaccacgaauaccaaggaaggcucaaacauuugccuuacaaggacugaucgggggugguauugugacaaugccggaagugucagcuucuuuccucaggcagagaccugcaaagugcaguccaaccgcguauucugugauacaaugaauagucugacuuugccaagcgagguuaaccucugcaauguggacaucuuuaaccccaaguacgauuguaagauaaugaccucaaaaacagacgucaguuccagcgugauuaccucucugggugcuaucgucucaugcuauggcaagacuaaaugcacggccaguaacaagaaucgagggaucauuaaaacauucagcaacggaugugauuacguguccaauaagggcguugacaccgugucuguagguaacacuuuauauuacgucaauaagcaagaagggaaaucgcuguaugugaagggagagccuaucauuaacuuuuacgacccccuaguuuucccgagcgaugaauuugacgcguccauaucacaggugaaugagaaaaucaaccagagucucgccuucauuagaaagucugaugaacugcuucacaaugucaacgcaggcaaaagcaccacaaauaucaugaucaccacuauuauaaucgugauuaucguaauuuugcugucccucaucgcugugggccugcuucuguacugcaaggccaggucaacacccguuacguugagcaaggaccagcucucugggauaaacaauaucgcuuucuccaacugaggacuaguaauaaggaaacuguaugaaugucugugggcaggaagugaagagauccuucuguaaagguuuuuggaauuaugucugcugaauaauaaacuuuuuugaaauaauaaaucugguagaaaaaugagaucuaaaaaaaaaaaaaaaaaaaaaaaaaaaaaaaaaaaaaaaaaaaaaaaaaaaaaaaaaaaaaaaaugcaucccccccccccccccccccccccccccccccaaaggcucuuuucagagccaccagaauu

SEQ ID NO: 398 - RNA, 2087 nt, Artificial Sequence
  mRNA product Design g-5 comprising derived and/or modified sequence from HRSV(A2)__F0 (opt4)
gggagacccgugacccggaaguuguacggcuacgcgacuuucccucccacaaacccucgcgcccuuccuuuccuacuugggcccggcagaaagcuuaccauggagcugcugauccugaaggccaacgccaucaccaccauccugaccgccgugaccuucugcuucgccagcggccagaacaucaccgaggaguucuaccagagcaccugcagcgccgugagcaagggcuaccugagcgcccugagaaccggcugguacaccagcgugaucaccaucgagcugagcaacaucaaggagaacaagugcaacggcaccgacgccaaggugaagcugaucaagcaggagcuggacaaguacaagaacgccgugaccgagcugcagcugcugaugcagagcacccccgccaccaacaacagagccagaagagagcugcccagauucaugaacuacacccugaacaacgccaagaagaccaacgugacccugagcaagaagagaaagagaagauuccugggcuuccugcugggcgugggcagcgccaucgccagcggcguggccgugagcaaggugcugcaccuggagggcgaggugaacaagaucaagagcgcccugcugagcaccaacaaggccguggugagccugagcaacggcgugagcgugcugaccagcaaggugcuggaccugaagaacuacaucgacaagcagcugcugcccaucgugaacaagcagagcugcagcaucagcaacaucgagaccgugaucgaguuccagcagaagaacaacagacugcuggagaucaccagagaguucagcgugaacgccggcgugaccacccccgugagcaccuacaugcugaccaacagcgagcugcugagccugaucaacgacaugcccaucaccaacgaccagaagaagcugaugagcaacaacgugcagaucgugagacagcagagcuacagcaucaugagcaucaucaaggaggaggugcuggccuacguggugcagcugccccuguacggcgugaucgacacccccugcuggaagcugcacaccagcccccugugcaccaccaacaccaaggagggcagcaacaucugccugaccagaaccgacagaggcugguacugcgacaacgccggcagcgugagcuucuucccccaggccgagaccugcaaggugcagagcaacagaguguucugcgacaccaugaacagccugacccugcccagcgaggugaaccugugcaacguggacaucuucaaccccaaguacgacugcaagaucaugaccagcaagaccgacgugagcagcagcgugaucaccagccugggcgccaucgugagcugcuacggcaagaccaagugcaccgccagcaacaagaacagaggcaucaucaagaccuucagcaacggcugcgacuacgugagcaacaagggcguggacaccgugagcgugggcaacacccuguacuacgugaacaagcaggagggcaagagccuguacgugaagggcgagcccaucaucaacuucuacgacccccugguguuccccagcgacgaguucgacgccagcaucagccaggugaacgagaagaucaaccagagccuggccuucaucagaaagagcgacgagcugcugcacaacgugaacgccggcaagagcaccaccaacaucaugaucaccaccaucaucaucgugaucaucgugauccugcugagccugaucgccgugggccugcugcuguacugcaaggccagaagcacccccgugacccugagcaaggaccagcugagcggcaucaacaacaucgccuucagcaacugaggacuaguaauaaggaaacuguaugaaugucugugggcaggaagugaagagauccuucuguaaagguuuuuggaauuaugucugcugaauaauaaacuuuuuugaaauaauaaaucugguagaaaaaugagaucuaaaaaaaaaaaaaaaaaaaaaaaaaaaaaaaaaaaaaaaaaaaaaaaaaaaaaaaaaaaaaaaaugcaucccccccccccccccccccccccccccccccaaaggcucuuuucagagccaccagaauu

SEQ ID NO: 399 - RNA, 2087 nt, Artificial Sequence
  mRNA product Design g-5 comprising derived and/or modified sequence from HRSV(A2)__F0 (opt5)
gggagacccgugacccggaaguuguacggcuacgcgacuuucccucccacaaacccucgcgcccuuccuuuccuacuugggcccggcagaaagcuuaccauggagcugcucauccugaaggccaacgcuauuaccacaauccuuacggccgugaccuucugcuuugcgagcggccagaauauuacagaagaguucuaccaauccaccuguucugcugucagcaaaggguaucuguccgcccucagaacaggaugguacaccucuguuaucacaauugaacugagcaacaucaaggagaauaaaugcaacggcaccgacgccaaggugaaacuuaucaagcaggaacuggauaaguauaaaaaugcugugacggagcuccagcugcugaugcaguccacccccgccacaaacaaucgggcucgcagagagcucccucgguuuaugaacuacacccugaauaacgccaagaaaacaaaugucacccuuucuaagaaacgcaagagacgguuccugggguuucuccugggagugggcagcgcgauugccuccgggguugcugugagcaagguccuucaccuggaaggagaggugaacaaaaucaagucugcccuccuguccacgaauaaagcuguugugagccugucuaacggcgucuccgugcucacaagcaaggugcuggaccuuaaaaauuauauugauaagcaacugcucccgaucgucaacaaacagucuuguuccauuagcaacaucgaaaccguuauugaguuccagcagaagaauaaccgccugcuugagaucacaagagaauuuuccgugaaugccggcgugaccacccccgucucuacauacaugcugacgaacagcgagcuccugucccugaucaaugacaugccuauuaccaacgaucaaaagaaacucaugagcaauaacgugcagaucguucggcagcagucuuauuccauuaugagcaucauuaaggaagaggugcuggcguacgucgugcaacuuccccuguacgggguuaucgacacaccuugcuggaaacuccauaccucuccccuguguacaaccaauacgaaggaaggaagcaacaucugccuuacacgcaccgauagaggcugguauugugacaaugccggguccgugucuuucuuuccucaggcugagaccugcaaaguccagagcaaccggguguucugugauacaaugaacucccugacccucccgagcgaggucaaucugugcaauguggacauuuuuaaccccaaguacgauuguaagaucaugacaucuaaaacggacguuuccagcucugugauuaccucccugggagccaucgucagcugcuauggcaagacaaaaugcaccgcuuccaacaagaaucgcgggauuaucaaaacauucucuaacggaugugauuacgugagcaauaagggcguugacaccguguccgucggcaacacgcucuauuacgugaauaagcaagaagggaaaucucuguaugugaagggagagccuaucauuaacuuuuacgacccccuuguuuucccuagcgaugaauuugacgccuccaucagccaggucaaugagaaaauuaaccagucucuggccuucaucagaaaguccgaugaacuccugcacaaugugaacgcuggcaaaagcaccacaaauauuaugaucaccacaauuaucaucgugauuaucgucauucugcuuucucucaucgcgguggggcugcugcucuacugcaaggcccgguccacccccguuacgcugagcaaggaccagcuuucuggaauuaacaauaucgcuuucagcaacugaggacuaguaauaaggaaacuguaugaaugucugugggcaggaagugaagagauccuucuguaaagguuuuuggaauuaugucugcugaauaauaaacuuuuuugaaauaauaaaucugguagaaaaaugagaucuaaaaaaaaaaaaaaaaaaaaaaaaaaaaaaaaaaaaaaaaaaaaaaaaaaaaaaaaaaaaaaaaugcaucccccccccccccccccccccccccccccccaaaggcucuuuucagagccaccagaauu

SEQ ID NO: 400 - RNA, 2087 nt, Artificial Sequence
  mRNA product Design g-5 comprising derived and/or modified sequence from HRSV(A2)__F0 (opt6)
gggagacccgugacccggaaguuguacggcuacgcgacuuucccucccacaaacccucgcgcccuuccuuuccuacuugggcccggcagaaagcuuaccauggaacuucuaauauuaaaagcuaacgcaaucacuacuaucuuaaccgcaguaacauucuguuuugcauccggccaaaacauaacagaagaauuuuaccaaucaacuugcucugcagucucaaaagguuaucuaucugcauuaagaacaggcugguacaccucaguaauaacgaucgaacuaucaaacaucaaagaaaacaaauguaauggaacagacgcaaaaguaaaacuaaucaaacaagaacuagacaaauacaaaaacgcaguaaccgaacuccaacuccucaugcaaaguacaccagcaacaaauaacagagcaagacgugaacuaccacguuuuaugaauuacacgcucaauaacgcaaaaaaaacaaauguuacccuaucaaaaaaacgaaaaagaagauuccucggauuccuacuaggcguaggcucagcaauagcuucaggaguagcaguaucaaaaguacuccaccucgaaggagaaguaaacaaaaucaaaagcgcucuccucucaacaaacaaagcaguuguuucacucucaaacggaguaucaguacuaaccucaaaaguacuugaccuaaaaaauuauauagacaaacaacuauuaccaauaguaaacaaacaaagcugcuccaucuccaacaucgagacagucauagaauuucaacaaaaaaauaaccgccuauuagaaauaaccagagaauuuucaguaaacgcaggaguaacuaccccaguaucaacauauauguuaacaaacucagaacuccuaagucuaaucaacgacaugccaauaaccaacgaccaaaaaaaacuaaugagcaacaauguacaaauaguucgucaacaaucuuacuccauaaugucuauaauaaaagaagaaguacucgccuauguaguccaacuaccacuauacggagucaucgauacaccaugcuggaaacuccacacauccccacucuguacuacuaacaccaaagaagguucaaauauaugccuaaccagaacagauagagguugguacugcgauaaugcaggaucaguauccuuuuucccccaagccgaaacaugcaaaguucaauccaauagaguauuuugugauacaaugaacucuuuaacccucccauccgaagucaaucuauguaacgucgacauauuuaacccaaaauacgauugcaaaauaaugacaucaaaaacagacgucucauccucaguuauaacguccuuaggcgcuauaguaucaugcuacggcaaaacaaaauguacagcaucaaacaaaaacagaggaaucauaaaaacuuucucuaacgguugcgacuauguauccaacaaaggugucgacacaguauccguaggcaacacccuuuacuauguuaauaaacaagaaggaaaaucucuauauguaaaaggcgaaccaauuauaaauuuuuacgacccccuugucuuucccucugacgaauuugacgcuuccauaucacaagucaacgaaaaaaucaaccaaucccucgcauucauacgcaaaucagacgaacuacuacauaacgucaacgcaggcaaauccacaacaaacauaaugauaaccacaaucauaauuguaauaauaguaauacuacuuucucuaauagcagucggauuacucuuauacuguaaagcucgaucaacaccagucacccucucuaaagaucaacuauccggaaucaacaacauagcuuucucaaacuaaggacuaguaauaaggaaacuguaugaaugucugugggcaggaagugaagagauccuucuguaaagguuuuuggaauuaugucugcugaauaauaaacuuuuuugaaauaauaaaucugguagaaaaaugagaucuaaaaaaaaaaaaaaaaaaaaaaaaaaaaaaaaaaaaaaaaaaaaaaaaaaaaaaaaaaaaaaaaugcaucccccccccccccccccccccccccccccccaaaggcucuuuucagagccaccagaauu

SEQ ID NO: 401 - RNA, 2087 nt, Artificial Sequence
  mRNA product Design g-5 comprising derived and/or modified sequence from HRSV(A2)__F0 (opt11)
gggagacccgugacccggaaguuguacggcuacgcgacuuucccucccacaaacccucgcgcccuuccuuuccuacuugggcccggcagaaagcuuaccauggaacuccucauacucaaagccaacgcaaucacaaccauacucaccgccgucaccuucugcuuugcaucuggccagaacaucacugaagaguucuaccaauccacaugcuccgccguaagcaaaggcuaccuauccgcccuacgcaccggcugguacaccagcguaaucaccauagaacucuccaauauaaaagaaaacaaaugcaacggcaccgacgcaaaagucaagcuaauaaaacaagaacucgacaaauacaaaaacgccguuaccgaacuccagcuacucaugcaaucgaccccagcaaccaacaaccgugcgagacgcgaacucccccgcuucaugaacuacacccuaaacaacgccaaaaagaccaacguaacucuauccaagaaacgcaaacgccgcuuccucggauuccuccucggcgucggcuccgcaaucgccagcggcgucgccguuagcaaaguccuucaccucgaaggagaaguaaacaaaauuaaaagcgcccucuuauccacaaacaaggccguaguaucccugucaaacggcgucuccguccuuacauccaaaguccucgaccucaagaacuacauagacaaacagcuacuacccauuguaaauaaacaaagcugcucaauuagcaacaucgaaaccguaaucgaguuccagcagaaaaacaacagacuucucgaaaucacccgcgaguucagcgucaacgccggcguaaccaccccugucucaacauacaugcuaaccaacagcgaacugcucucccucaucaacgacaugcccaucaccaacgaccaaaagaaacucaugagcaacaacguacaaaucgugcgccaacaguccuacucaauaaugucaaucaucaaagaagaagugcuagcauacgucguacaacuaccacucuacggcguaauagauacccccugcuggaagcuccauaccuccccacucuguaccaccaacaccaaagaaggcucaaacaucugccuaacgcgcacagaccguggaugguacugugacaacgccggcuccgucuccuucuucccucaagccgaaacaugcaaaguccaauccaacagagucuucugcgauaccaugaacucccugacacucccaagcgaagucaaccuuugcaacgucgauaucuuuaaccccaaauacgacugcaagaucaugacaucaaaaaccgacguauccuccucuguaauaaccucccuaggcgcaaucguaucaugcuacggcaaaaccaaauguaccgccuccaacaaaaaucgcggcaucaucaaaaccuucucgaacggcugcgacuacgucuccaacaaaggcguagacacaguuuccguaggcaacacccucuacuacgucaauaaacaggaaggcaagucccucuacgucaaaggcgaacccaucaucaauuucuacgacccccucguuuuccccuccgaugaguucgacgcaagcaucagccaggucaacgaaaagauaaaccagucccucgccuucauccgcaaaucagaugaacuccuucacaacguuaacgcaggcaagagcaccaccaacaucaugaucacaacuauaaucaucgucauaaucgucauccuacucucacuaaucgccgucggucuccuacuauauuguaaagcccgaucaacaccggucacacucuccaaagaccaacucuccggaaucaacaauaucgcuuucucgaacuaaggacuaguaauaaggaaacuguaugaaugucugugggcaggaagugaagagauccuucuguaaagguuuuuggaauuaugucugcugaauaauaaacuuuuuugaaauaauaaaucugguagaaaaaugagaucuaaaaaaaaaaaaaaaaaaaaaaaaaaaaaaaaaaaaaaaaaaaaaaaaaaaaaaaaaaaaaaaaugcaucccccccccccccccccccccccccccccccaaaggcucuuuucagagccaccagaauu

SEQ ID NO: 402 - RNA, 2103 nt, Artificial Sequence
  mRNA product Design h-1 comprising derived and/or modified sequence from HRSV(A2)__F0 (artificial)
gggagacccgugacccggaaguuguacggcuacgcgacuuucccucccacaaacccucgcgcccuuccuuuccuacuugggcccggcagaaagcuuaccauggaguugcuaauccucaaagcaaaugcaauuaccacaauccucacugcagucacauuuuguuuugcuucuggucaaaacaucacugaagaauuuuaucaaucaacaugcagugcaguuagcaaaggcuaucuuagugcucugagaacugguugguauaccaguguuauaacuauagaauuaaguaauaucaaggaaaauaaguguaauggaacagaugcuaagguaaaauugauaaaacaagaauuagauaaauauaaaaaugcuguaacagaauugcaguugcucaugcaaagcacaccagcaacaaacaaucgagccagaagagaacuaccaagguuuaugaauuauacacucaacaaugccaaaaaaaccaauguaacauuaagcaagaaaaggaaaagaagauuucuugguuuuuuguuagguguuggaucugcaaucgccaguggcguugcuguaucuaagguccugcaccuagaaggggaagugaacaagaucaaaagugcucuacuauccacaaacaaggcuguagucagcuuaucaaauggaguuagugucuuaaccagcaaaguguuagaccucaaaaacuauauagauaaacaauuguuaccuauugugaacaagcaaagcugcagcauaucaaauauagaaacugugauagaguuccaacaaaagaacaacagacuacuagagauuaccagggaauuuaguguuaaugcagguguaacuacaccuguaagcacuuacauguuaacuaauagugaauuauugucauuaaucaaugauaugccuauaacaaaugaucagaaaaaguuaauguccaacaauguucaaauaguuagacagcaaaguuacucuaucauguccauaauaaaagaggaagucuuagcauauguaguacaauuaccacuauaugguguuauagauacacccuguuggaaacuacacacauccccucuauguacaaccaacacaaaagaaggguccaacaucuguuuaacaagaacugacagaggaugguacugugacaaugcaggaucaguaucuuucuucccacaagcugaaacauguaaaguucaaucaaaucgaguauuuugugacacaaugaacaguuuaacauuaccaagugaaguaaaucucugcaauguugacauauucaaccccaaauaugauuguaaaauuaugacuucaaaaacagauguaagcagcuccguuaucacaucucuaggagccauugugucaugcuauggcaaaacuaaauguacagcauccaauaaaaaucguggaaucauaaagacauuuucuaacgggugcgauuauguaucaaauaaagggguggacacugugucuguagguaacacauuauauuauguaaauaagcaagaagguaaaagucucuauguaaaaggugaaccaauaauaaauuucuaugacccauuaguauuccccucugaugaauuugaugcaucaauaucucaagucaacgagaagauuaaccagagccuagcauuuauucguaaauccgaugaauuauuacauaauguaaaugcugguaaauccaccacaaauaucaugauaacuacuauaauuauagugauuauaguaauauuguuaucauuaauugcuguuggacugcucuuauacuguaaggccagaagcacaccagucacacuaagcaaagaucaacugagugguauaaauaauauugcauuuaguaacuaaggacuaguacuggcugcaucucccuuuccucuguccuccauccuucucccaggauggugaagggggaccugguacccagugauccccaccccaggauccuaaaucaugacuuaccugcuaauaaaaacucauuggaaaagugagaagaucuaaaaaaaaaaaaaaaaaaaaaaaaaaaaaaaaaaaaaaaaaaaaaaaaaaaaaaaaaaaaaaaaugcaucccccccccccccccccccccccccccccccaaaggcucuuuucagagccaccagaauu

SEQ ID NO: 403 - RNA, 2103 nt, Artificial Sequence
  mRNA product Design h-1 comprising derived and/or modified sequence from HRSV(A2)__F0 (opt1)
gggagacccgugacccggaaguuguacggcuacgcgacuuucccucccacaaacccucgcgcccuuccuuuccuacuugggcccggcagaaagcuuaccauggagcugcucauccugaaggccaacgccaucaccaccauccugacggcggugaccuucugcuucgccagcggccagaacaucaccgaggaguucuaccaguccaccugcagcgccgucuccaagggguaccucagcgcccugcggacgggcugguacaccuccgugaucaccaucgagcugagcaacaucaaggagaacaagugcaacgggaccgacgccaaggugaagcucaucaagcaggagcuggacaaguacaagaacgcggucacggagcugcagcuccugaugcaguccaccccggcaaccaacaaccgcgcccggcgcgagcugccccgguucaugaacuacacccucaacaacgccaagaagacgaacgugacccugagcaagaagcgcaagcggcgcuuccugggcuuccuccugggggugggcuccgccaucgcgagcggcgucgccguguccaaggugcugcaccucgagggggaggucaacaagaucaagagcgcccugcuguccaccaacaaggccguggugagccucuccaacggcgucagcgugcugaccuccaaggugcuggaccucaagaacuacaucgacaagcagcugcugcccaucgucaacaagcagagcugcuccaucagcaacaucgagacggugaucgaguuccagcagaagaacaaccggcuccuggagaucacccgcgaguucagcgugaacgccggggucaccacccccguguccacguacaugcugaccaacagcgagcuccugucccugaucaacgacaugccgaucaccaacgaccagaagaagcucaugagcaacaacgugcagaucguccggcagcaguccuacagcaucauguccaucaucaaggaggaggugcuggcguacgugguccagcugccccucuacggcgugaucgacacccccugcuggaagcugcacacgagcccccugugcaccaccaacaccaaggagggguccaacaucugccucacgcgcaccgaccggggcugguacugcgacaacgccggcagcgucuccuucuucccgcaggccgagaccugcaaggugcagagcaaccgcguguucugcgacaccaugaacucccugacgcugcccagcgagguaaaccucugcaacgucgacaucuucaaccccaaguacgacugcaagaucaugaccuccaagaccgacgugagcuccagcgugaucaccucccugggggccaucgucagcugcuacggcaagacgaagugcaccgccagcaacaagaaccgggggaucaucaagaccuucuccaacggcugcgacuacgugagcaacaagggcguggacaccguguccgucgggaacacccuguacuacgugaacaagcaggagggcaagagccucuacgugaagggggagcccaucaucaacuucuacgacccgcuggucuuccccuccgacgaguucgacgcgagcaucucccaggugaacgagaagaucaaccagagccuggccuucauccgcaaguccgacgagcugcuccacaacgugaacgccggcaagagcacgaccaacaucaugaucaccaccaucaucaucgucaucaucgugauccugcugucccucaucgccguggggcugcugcucuacugcaaggcccggagcacgcccgucacccuguccaaggaccagcugagcggcaucaacaacaucgcguucuccaacugaggacuaguacuggcugcaucucccuuuccucuguccuccauccuucucccaggauggugaagggggaccugguacccagugauccccaccccaggauccuaaaucaugacuuaccugcuaauaaaaacucauuggaaaagugagaagaucuaaaaaaaaaaaaaaaaaaaaaaaaaaaaaaaaaaaaaaaaaaaaaaaaaaaaaaaaaaaaaaaaugcaucccccccccccccccccccccccccccccccaaaggcucuuuucagagccaccagaauu

SEQ ID NO: 404 - RNA, 2103 nt, Artificial Sequence
  mRNA product Design h-1 comprising derived and/or modified sequence from HRSV(A2)__F0 (opt1)
gggagacccgugacccggaaguuguacggcuacgcgacuuucccucccacaaacccucgcgcccuuccuuuccuacuugggcccggcagaaagcuuaccauggagcugcucauccugaaggccaacgccaucaccaccauccugacggcggugaccuucugcuucgccagcggccagaacaucaccgaggaguucuaccaguccacgugcagcgccgucuccaagggguaccucagcgcccugcgcaccggcugguacaccuccgugaucaccaucgagcugagcaacaucaaggagaacaagugcaacgggaccgacgccaaggugaagcucaucaagcaggagcuggacaaguacaagaacgcggucacggagcugcagcuccugaugcaguccacccccgccaccaacaaccgggcccgccgggagcugccgcgcuucaugaacuacacccucaacaacgccaagaagacgaacgugacccugagcaagaagcggaagcgccgguuccugggcuuccuccugggggugggcuccgcgaucgccagcggcgucgccguguccaaggugcugcaccucgagggggaggucaacaagaucaagagcgcccugcuguccaccaacaaggccguggugagccucuccaacggcgucagcgugcugaccuccaaggugcuggaccucaagaacuacaucgacaagcagcugcugcccaucgucaacaagcagagcugcuccaucagcaacaucgagacggugaucgaguuccagcagaagaacaaccgccuccuggagaucacccgggaguucagcgugaacgcgggggucaccacccccguguccacguacaugcugaccaacagcgagcuccugucccugaucaacgacaugcccaucaccaacgaccagaagaagcucaugagcaacaacgugcagaucguccgccagcaguccuacagcaucauguccaucaucaaggaggaggugcuggccuacgugguccagcugccgcucuacggcgugaucgacacccccugcuggaagcugcacacgagcccccugugcaccaccaacaccaaggagggguccaacaucugccucacgcggaccgaccgcggcugguacugcgacaacgccggcagcgucuccuucuucccccaggccgagaccugcaaggugcagagcaaccggguguucugcgacaccaugaacucccugacgcugccgagcgaggucaaccucugcaacguggacaucuucaaccccaaguacgacugcaagaucaugaccuccaagaccgacgugagcuccagcgucaucaccucccugggggccaucgugagcugcuacggcaagacgaagugcaccgcgagcaacaagaaccgcgggaucaucaagaccuucuccaacggcugcgacuacgugagcaacaagggcgucgacaccguguccguggggaacacccuguacuacgucaacaagcaggagggcaagagccucuacgugaagggggagcccaucaucaacuucuacgacccccugguguucccguccgacgaguucgacgccagcaucucccaggucaacgagaagaucaaccagagccuggccuucauccggaaguccgacgagcuccugcacaacgugaacgccggcaagagcacgaccaacaucaugaucaccaccaucaucaucgugaucaucgucauccugcugucccucaucgccguggggcugcugcucuacugcaaggcgcgcagcacgcccgugacccuguccaaggaccagcugagcggcaucaacaacaucgccuucuccaacugaggacuaguacuggcugcaucucccuuuccucuguccuccauccuucucccaggauggugaagggggaccugguacccagugauccccaccccaggauccuaaaucaugacuuaccugcuaauaaaaacucauuggaaaagugagaagaucuaaaaaaaaaaaaaaaaaaaaaaaaaaaaaaaaaaaaaaaaaaaaaaaaaaaaaaaaaaaaaaaaugcaucccccccccccccccccccccccccccccccaaaggcucuuuucagagccaccagaauu

SEQ ID NO: 405 - RNA, 2103 nt, Artificial Sequence
  mRNA product Design h-1 comprising derived and/or modified sequence from HRSV(A2)__F0 (opt2)
gggagacccgugacccggaaguuguacggcuacgcgacuuucccucccacaaacccucgcgcccuuccuuuccuacuugggcccggcagaaagcuuaccauggagcuccucauccucaaggccaacgccaucaccaccauccucaccgccgucaccuucugcuucgccuccggccagaacaucaccgaggaguucuaccaguccaccugcuccgccgucuccaagggcuaccucuccgcccuccgcaccggcugguacaccuccgucaucaccaucgagcucuccaacaucaaggagaacaagugcaacggcaccgacgccaaggucaagcucaucaagcaggagcucgacaaguacaagaacgccgucaccgagcuccagcuccucaugcaguccacccccgccaccaacaaccgcgcccgccgcgagcucccccgcuucaugaacuacacccucaacaacgccaagaagaccaacgucacccucuccaagaagcgcaagcgccgcuuccucggcuuccuccucggcgucggcuccgccaucgccuccggcgucgccgucuccaagguccuccaccucgagggcgaggucaacaagaucaaguccgcccuccucuccaccaacaaggccgucgucucccucuccaacggcgucuccguccucaccuccaagguccucgaccucaagaacuacaucgacaagcagcuccuccccaucgucaacaagcaguccugcuccaucuccaacaucgagaccgucaucgaguuccagcagaagaacaaccgccuccucgagaucacccgcgaguucuccgucaacgccggcgucaccacccccgucuccaccuacaugcucaccaacuccgagcuccucucccucaucaacgacaugcccaucaccaacgaccagaagaagcucauguccaacaacguccagaucguccgccagcaguccuacuccaucauguccaucaucaaggaggagguccucgccuacgucguccagcucccccucuacggcgucaucgacacccccugcuggaagcuccacaccuccccccucugcaccaccaacaccaaggagggcuccaacaucugccucacccgcaccgaccgcggcugguacugcgacaacgccggcuccgucuccuucuucccccaggccgagaccugcaagguccaguccaaccgcgucuucugcgacaccaugaacucccucacccuccccuccgaggucaaccucugcaacgucgacaucuucaaccccaaguacgacugcaagaucaugaccuccaagaccgacgucuccuccuccgucaucaccucccucggcgccaucgucuccugcuacggcaagaccaagugcaccgccuccaacaagaaccgcggcaucaucaagaccuucuccaacggcugcgacuacgucuccaacaagggcgucgacaccgucuccgucggcaacacccucuacuacgucaacaagcaggagggcaagucccucuacgucaagggcgagcccaucaucaacuucuacgacccccucgucuuccccuccgacgaguucgacgccuccaucucccaggucaacgagaagaucaaccagucccucgccuucauccgcaaguccgacgagcuccuccacaacgucaacgccggcaaguccaccaccaacaucaugaucaccaccaucaucaucgucaucaucgucauccuccucucccucaucgccgucggccuccuccucuacugcaaggcccgcuccacccccgucacccucuccaaggaccagcucuccggcaucaacaacaucgccuucuccaacugaggacuaguacuggcugcaucucccuuuccucuguccuccauccuucucccaggauggugaagggggaccugguacccagugauccccaccccaggauccuaaaucaugacuuaccugcuaauaaaaacucauuggaaaagugagaagaucuaaaaaaaaaaaaaaaaaaaaaaaaaaaaaaaaaaaaaaaaaaaaaaaaaaaaaaaaaaaaaaaaugcaucccccccccccccccccccccccccccccccaaaggcucuuuucagagccaccagaauu

SEQ ID NO: 406 - RNA, 2103 nt, Artificial Sequence
  mRNA product Design h-1 comprising derived and/or modified sequence from HRSV(A2)__F0 (opt3)
gggagacccgugacccggaaguuguacggcuacgcgacuuucccucccacaaacccucgcgcccuuccuuuccuacuugggcccggcagaaagcuuaccauggagcugcucauccuuaaggccaacgcuauuaccacaauacugacugcagugacguucugcuuugccagcggccagaauaucaccgaagaguucuaccaauccacauguucugcggucucaaaaggguauuugagugcuuuaagaacuggaugguacaccagcguuauuacaaucgaacuguccaacauuaaggagaauaaaugcaacgguaccgacgccaaggugaaacuaaucaagcaggaacucgauaaguauaaaaaugcaguaacugagcugcagcuucugaugcagucuacacccgccaccaacaauagggcucggcgcgaguugccucgauuuaugaacuacacgcucaauaacgcaaagaaaacuaaugugacccugucgaagaaacguaagagaagguuccugggcuuucucuuaggggucggaucagccauagcuagcggcguggccguuaguaaggugcugcaccuugaaggugaggucaacaaaaucaaguccgcguugcugucuacaaauaaagcagugguaagccuauccaacgggguuucagugcucacuucuaagguccuggaccuuaaaaauuauauugauaagcaacuguugccaaucgugaacaaacagagcuguucuauuuccaacaucgaaaccgugauagaguuccagcagaagaauaaccggcuccuggagauuacacgcgaauuuucagucaaugccggaguuaccacgccggugagcacuuacauguuaacaaacagugagcugcucucucuuaucaaugacaugcccauuaccaacgaucaaaagaaacugauguccaauaacguacagaucgugagacagcagagcuauucgaucaugucuauuauaaaggaagaggucuuggcuuacgugguucaacuaccucuguacggcgugaucgacacuccaugcuggaaacuccauacauccccacuguguaccacgaauaccaaggaaggcucaaacauuugccuuacaaggacugaucgggggugguauugugacaaugccggaagugucagcuucuuuccucaggcagagaccugcaaagugcaguccaaccgcguauucugugauacaaugaauagucugacuuugccaagcgagguuaaccucugcaauguggacaucuuuaaccccaaguacgauuguaagauaaugaccucaaaaacagacgucaguuccagcgugauuaccucucugggugcuaucgucucaugcuauggcaagacuaaaugcacggccaguaacaagaaucgagggaucauuaaaacauucagcaacggaugugauuacguguccaauaagggcguugacaccgugucuguagguaacacuuuauauuacgucaauaagcaagaagggaaaucgcuguaugugaagggagagccuaucauuaacuuuuacgacccccuaguuuucccgagcgaugaauuugacgcguccauaucacaggugaaugagaaaaucaaccagagucucgccuucauuagaaagucugaugaacugcuucacaaugucaacgcaggcaaaagcaccacaaauaucaugaucaccacuauuauaaucgugauuaucguaauuuugcugucccucaucgcugugggccugcuucuguacugcaaggccaggucaacacccguuacguugagcaaggaccagcucucugggauaaacaauaucgcuuucuccaacugaggacuaguacuggcugcaucucccuuuccucuguccuccauccuucucccaggauggugaagggggaccugguacccagugauccccaccccaggauccuaaaucaugacuuaccugcuaauaaaaacucauuggaaaagugagaagaucuaaaaaaaaaaaaaaaaaaaaaaaaaaaaaaaaaaaaaaaaaaaaaaaaaaaaaaaaaaaaaaaaugcaucccccccccccccccccccccccccccccccaaaggcucuuuucagagccaccagaauu

SEQ ID NO: 407 - RNA, 2103 nt, Artificial Sequence
  mRNA product Design h-1 comprising derived and/or modified sequence from HRSV(A2)__F0 (opt4)
gggagacccgugacccggaaguuguacggcuacgcgacuuucccucccacaaacccucgcgcccuuccuuuccuacuugggcccggcagaaagcuuaccauggagcugcugauccugaaggccaacgccaucaccaccauccugaccgccgugaccuucugcuucgccagcggccagaacaucaccgaggaguucuaccagagcaccugcagcgccgugagcaagggcuaccugagcgcccugagaaccggcugguacaccagcgugaucaccaucgagcugagcaacaucaaggagaacaagugcaacggcaccgacgccaaggugaagcugaucaagcaggagcuggacaaguacaagaacgccgugaccgagcugcagcugcugaugcagagcacccccgccaccaacaacagagccagaagagagcugcccagauucaugaacuacacccugaacaacgccaagaagaccaacgugacccugagcaagaagagaaagagaagauuccugggcuuccugcugggcgugggcagcgccaucgccagcggcguggccgugagcaaggugcugcaccuggagggcgaggugaacaagaucaagagcgcccugcugagcaccaacaaggccguggugagccugagcaacggcgugagcgugcugaccagcaaggugcuggaccugaagaacuacaucgacaagcagcugcugcccaucgugaacaagcagagcugcagcaucagcaacaucgagaccgugaucgaguuccagcagaagaacaacagacugcuggagaucaccagagaguucagcgugaacgccggcgugaccacccccgugagcaccuacaugcugaccaacagcgagcugcugagccugaucaacgacaugcccaucaccaacgaccagaagaagcugaugagcaacaacgugcagaucgugagacagcagagcuacagcaucaugagcaucaucaaggaggaggugcuggccuacguggugcagcugccccuguacggcgugaucgacacccccugcuggaagcugcacaccagcccccugugcaccaccaacaccaaggagggcagcaacaucugccugaccagaaccgacagaggcugguacugcgacaacgccggcagcgugagcuucuucccccaggccgagaccugcaaggugcagagcaacagaguguucugcgacaccaugaacagccugacccugcccagcgaggugaaccugugcaacguggacaucuucaaccccaaguacgacugcaagaucaugaccagcaagaccgacgugagcagcagcgugaucaccagccugggcgccaucgugagcugcuacggcaagaccaagugcaccgccagcaacaagaacagaggcaucaucaagaccuucagcaacggcugcgacuacgugagcaacaagggcguggacaccgugagcgugggcaacacccuguacuacgugaacaagcaggagggcaagagccuguacgugaagggcgagcccaucaucaacuucuacgacccccugguguuccccagcgacgaguucgacgccagcaucagccaggugaacgagaagaucaaccagagccuggccuucaucagaaagagcgacgagcugcugcacaacgugaacgccggcaagagcaccaccaacaucaugaucaccaccaucaucaucgugaucaucgugauccugcugagccugaucgccgugggccugcugcuguacugcaaggccagaagcacccccgugacccugagcaaggaccagcugagcggcaucaacaacaucgccuucagcaacugaggacuaguacuggcugcaucucccuuuccucuguccuccauccuucucccaggauggugaagggggaccugguacccagugauccccaccccaggauccuaaaucaugacuuaccugcuaauaaaaacucauuggaaaagugagaagaucuaaaaaaaaaaaaaaaaaaaaaaaaaaaaaaaaaaaaaaaaaaaaaaaaaaaaaaaaaaaaaaaaugcaucccccccccccccccccccccccccccccccaaaggcucuuuucagagccaccagaauu

SEQ ID NO: 408 - RNA, 2103 nt, Artificial Sequence
  mRNA product Design h-1 comprising derived and/or modified sequence from HRSV(A2)__F0 (opt5)
gggagacccgugacccggaaguuguacggcuacgcgacuuucccucccacaaacccucgcgcccuuccuuuccuacuugggcccggcagaaagcuuaccauggagcugcucauccugaaggccaacgcuauuaccacaauccuuacggccgugaccuucugcuuugcgagcggccagaauauuacagaagaguucuaccaauccaccuguucugcugucagcaaaggguaucuguccgcccucagaacaggaugguacaccucuguuaucacaauugaacugagcaacaucaaggagaauaaaugcaacggcaccgacgccaaggugaaacuuaucaagcaggaacuggauaaguauaaaaaugcugugacggagcuccagcugcugaugcaguccacccccgccacaaacaaucgggcucgcagagagcucccucgguuuaugaacuacacccugaauaacgccaagaaaacaaaugucacccuuucuaagaaacgcaagagacgguuccugggguuucuccugggagugggcagcgcgauugccuccgggguugcugugagcaagguccuucaccuggaaggagaggugaacaaaaucaagucugcccuccuguccacgaauaaagcuguugugagccugucuaacggcgucuccgugcucacaagcaaggugcuggaccuuaaaaauuauauugauaagcaacugcucccgaucgucaacaaacagucuuguuccauuagcaacaucgaaaccguuauugaguuccagcagaagaauaaccgccugcuugagaucacaagagaauuuuccgugaaugccggcgugaccacccccgucucuacauacaugcugacgaacagcgagcuccugucccugaucaaugacaugccuauuaccaacgaucaaaagaaacucaugagcaauaacgugcagaucguucggcagcagucuuauuccauuaugagcaucauuaaggaagaggugcuggcguacgucgugcaacuuccccuguacgggguuaucgacacaccuugcuggaaacuccauaccucuccccuguguacaaccaauacgaaggaaggaagcaacaucugccuuacacgcaccgauagaggcugguauugugacaaugccggguccgugucuuucuuuccucaggcugagaccugcaaaguccagagcaaccggguguucugugauacaaugaacucccugacccucccgagcgaggucaaucugugcaauguggacauuuuuaaccccaaguacgauuguaagaucaugacaucuaaaacggacguuuccagcucugugauuaccucccugggagccaucgucagcugcuauggcaagacaaaaugcaccgcuuccaacaagaaucgcgggauuaucaaaacauucucuaacggaugugauuacgugagcaauaagggcguugacaccguguccgucggcaacacgcucuauuacgugaauaagcaagaagggaaaucucuguaugugaagggagagccuaucauuaacuuuuacgacccccuuguuuucccuagcgaugaauuugacgccuccaucagccaggucaaugagaaaauuaaccagucucuggccuucaucagaaaguccgaugaacuccugcacaaugugaacgcuggcaaaagcaccacaaauauuaugaucaccacaauuaucaucgugauuaucgucauucugcuuucucucaucgcgguggggcugcugcucuacugcaaggcccgguccacccccguuacgcugagcaaggaccagcuuucuggaauuaacaauaucgcuuucagcaacugaggacuaguacuggcugcaucucccuuuccucuguccuccauccuucucccaggauggugaagggggaccugguacccagugauccccaccccaggauccuaaaucaugacuuaccugcuaauaaaaacucauuggaaaagugagaagaucuaaaaaaaaaaaaaaaaaaaaaaaaaaaaaaaaaaaaaaaaaaaaaaaaaaaaaaaaaaaaaaaaugcaucccccccccccccccccccccccccccccccaaaggcucuuuucagagccaccagaauu

SEQ ID NO: 409 - RNA, 2103 nt, Artificial Sequence
  mRNA product Design h-1 comprising derived and/or modified sequence from HRSV(A2)__F0 (opt6)
gggagacccgugacccggaaguuguacggcuacgcgacuuucccucccacaaacccucgcgcccuuccuuuccuacuugggcccggcagaaagcuuaccauggaacuucuaauauuaaaagcuaacgcaaucacuacuaucuuaaccgcaguaacauucuguuuugcauccggccaaaacauaacagaagaauuuuaccaaucaacuugcucugcagucucaaaagguuaucuaucugcauuaagaacaggcugguacaccucaguaauaacgaucgaacuaucaaacaucaaagaaaacaaauguaauggaacagacgcaaaaguaaaacuaaucaaacaagaacuagacaaauacaaaaacgcaguaaccgaacuccaacuccucaugcaaaguacaccagcaacaaauaacagagcaagacgugaacuaccacguuuuaugaauuacacgcucaauaacgcaaaaaaaacaaauguuacccuaucaaaaaaacgaaaaagaagauuccucggauuccuacuaggcguaggcucagcaauagcuucaggaguagcaguaucaaaaguacuccaccucgaaggagaaguaaacaaaaucaaaagcgcucuccucucaacaaacaaagcaguuguuucacucucaaacggaguaucaguacuaaccucaaaaguacuugaccuaaaaaauuauauagacaaacaacuauuaccaauaguaaacaaacaaagcugcuccaucuccaacaucgagacagucauagaauuucaacaaaaaaauaaccgccuauuagaaauaaccagagaauuuucaguaaacgcaggaguaacuaccccaguaucaacauauauguuaacaaacucagaacuccuaagucuaaucaacgacaugccaauaaccaacgaccaaaaaaaacuaaugagcaacaauguacaaauaguucgucaacaaucuuacuccauaaugucuauaauaaaagaagaaguacucgccuauguaguccaacuaccacuauacggagucaucgauacaccaugcuggaaacuccacacauccccacucuguacuacuaacaccaaagaagguucaaauauaugccuaaccagaacagauagagguugguacugcgauaaugcaggaucaguauccuuuuucccccaagccgaaacaugcaaaguucaauccaauagaguauuuugugauacaaugaacucuuuaacccucccauccgaagucaaucuauguaacgucgacauauuuaacccaaaauacgauugcaaaauaaugacaucaaaaacagacgucucauccucaguuauaacguccuuaggcgcuauaguaucaugcuacggcaaaacaaaauguacagcaucaaacaaaaacagaggaaucauaaaaacuuucucuaacgguugcgacuauguauccaacaaaggugucgacacaguauccguaggcaacacccuuuacuauguuaauaaacaagaaggaaaaucucuauauguaaaaggcgaaccaauuauaaauuuuuacgacccccuugucuuucccucugacgaauuugacgcuuccauaucacaagucaacgaaaaaaucaaccaaucccucgcauucauacgcaaaucagacgaacuacuacauaacgucaacgcaggcaaauccacaacaaacauaaugauaaccacaaucauaauuguaauaauaguaauacuacuuucucuaauagcagucggauuacucuuauacuguaaagcucgaucaacaccagucacccucucuaaagaucaacuauccggaaucaacaacauagcuuucucaaacuaaggacuaguacuggcugcaucucccuuuccucuguccuccauccuucucccaggauggugaagggggaccugguacccagugauccccaccccaggauccuaaaucaugacuuaccugcuaauaaaaacucauuggaaaagugagaagaucuaaaaaaaaaaaaaaaaaaaaaaaaaaaaaaaaaaaaaaaaaaaaaaaaaaaaaaaaaaaaaaaaugcaucccccccccccccccccccccccccccccccaaaggcucuuuucagagccaccagaauu

SEQ ID NO: 410 - RNA, 2103 nt, Artificial Sequence
  mRNA product Design h-1 comprising derived and/or modified sequence from HRSV(A2)__F0 (opt11)
gggagacccgugacccggaaguuguacggcuacgcgacuuucccucccacaaacccucgcgcccuuccuuuccuacuugggcccggcagaaagcuuaccauggaacuccucauacucaaagccaacgcaaucacaaccauacucaccgccgucaccuucugcuuugcaucuggccagaacaucacugaagaguucuaccaauccacaugcuccgccguaagcaaaggcuaccuauccgcccuacgcaccggcugguacaccagcguaaucaccauagaacucuccaauauaaaagaaaacaaaugcaacggcaccgacgcaaaagucaagcuaauaaaacaagaacucgacaaauacaaaaacgccguuaccgaacuccagcuacucaugcaaucgaccccagcaaccaacaaccgugcgagacgcgaacucccccgcuucaugaacuacacccuaaacaacgccaaaaagaccaacguaacucuauccaagaaacgcaaacgccgcuuccucggauuccuccucggcgucggcuccgcaaucgccagcggcgucgccguuagcaaaguccuucaccucgaaggagaaguaaacaaaauuaaaagcgcccucuuauccacaaacaaggccguaguaucccugucaaacggcgucuccguccuuacauccaaaguccucgaccucaagaacuacauagacaaacagcuacuacccauuguaaauaaacaaagcugcucaauuagcaacaucgaaaccguaaucgaguuccagcagaaaaacaacagacuucucgaaaucacccgcgaguucagcgucaacgccggcguaaccaccccugucucaacauacaugcuaaccaacagcgaacugcucucccucaucaacgacaugcccaucaccaacgaccaaaagaaacucaugagcaacaacguacaaaucgugcgccaacaguccuacucaauaaugucaaucaucaaagaagaagugcuagcauacgucguacaacuaccacucuacggcguaauagauacccccugcuggaagcuccauaccuccccacucuguaccaccaacaccaaagaaggcucaaacaucugccuaacgcgcacagaccguggaugguacugugacaacgccggcuccgucuccuucuucccucaagccgaaacaugcaaaguccaauccaacagagucuucugcgauaccaugaacucccugacacucccaagcgaagucaaccuuugcaacgucgauaucuuuaaccccaaauacgacugcaagaucaugacaucaaaaaccgacguauccuccucuguaauaaccucccuaggcgcaaucguaucaugcuacggcaaaaccaaauguaccgccuccaacaaaaaucgcggcaucaucaaaaccuucucgaacggcugcgacuacgucuccaacaaaggcguagacacaguuuccguaggcaacacccucuacuacgucaauaaacaggaaggcaagucccucuacgucaaaggcgaacccaucaucaauuucuacgacccccucguuuuccccuccgaugaguucgacgcaagcaucagccaggucaacgaaaagauaaaccagucccucgccuucauccgcaaaucagaugaacuccuucacaacguuaacgcaggcaagagcaccaccaacaucaugaucacaacuauaaucaucgucauaaucgucauccuacucucacuaaucgccgucggucuccuacuauauuguaaagcccgaucaacaccggucacacucuccaaagaccaacucuccggaaucaacaauaucgcuuucucgaacuaaggacuaguacuggcugcaucucccuuuccucuguccuccauccuucucccaggauggugaagggggaccugguacccagugauccccaccccaggauccuaaaucaugacuuaccugcuaauaaaaacucauuggaaaagugagaagaucuaaaaaaaaaaaaaaaaaaaaaaaaaaaaaaaaaaaaaaaaaaaaaaaaaaaaaaaaaaaaaaaaugcaucccccccccccccccccccccccccccccccaaaggcucuuuucagagccaccagaauu

SEQ ID NO: 411 - RNA, 2319 nt, Artificial Sequence
  mRNA product Design h-2 comprising derived and/or modified sequence from HRSV(A2)__F0 (artificial)
gggagacccgugacccggaaguuguacggcuacgcgacuuucccucccacaaacccucgcgcccuuccuuuccuacuugggcccggcagaaagcuuaccauggaguugcuaauccucaaagcaaaugcaauuaccacaauccucacugcagucacauuuuguuuugcuucuggucaaaacaucacugaagaauuuuaucaaucaacaugcagugcaguuagcaaaggcuaucuuagugcucugagaacugguugguauaccaguguuauaacuauagaauuaaguaauaucaaggaaaauaaguguaauggaacagaugcuaagguaaaauugauaaaacaagaauuagauaaauauaaaaaugcuguaacagaauugcaguugcucaugcaaagcacaccagcaacaaacaaucgagccagaagagaacuaccaagguuuaugaauuauacacucaacaaugccaaaaaaaccaauguaacauuaagcaagaaaaggaaaagaagauuucuugguuuuuuguuagguguuggaucugcaaucgccaguggcguugcuguaucuaagguccugcaccuagaaggggaagugaacaagaucaaaagugcucuacuauccacaaacaaggcuguagucagcuuaucaaauggaguuagugucuuaaccagcaaaguguuagaccucaaaaacuauauagauaaacaauuguuaccuauugugaacaagcaaagcugcagcauaucaaauauagaaacugugauagaguuccaacaaaagaacaacagacuacuagagauuaccagggaauuuaguguuaaugcagguguaacuacaccuguaagcacuuacauguuaacuaauagugaauuauugucauuaaucaaugauaugccuauaacaaaugaucagaaaaaguuaauguccaacaauguucaaauaguuagacagcaaaguuacucuaucauguccauaauaaaagaggaagucuuagcauauguaguacaauuaccacuauaugguguuauagauacacccuguuggaaacuacacacauccccucuauguacaaccaacacaaaagaaggguccaacaucuguuuaacaagaacugacagaggaugguacugugacaaugcaggaucaguaucuuucuucccacaagcugaaacauguaaaguucaaucaaaucgaguauuuugugacacaaugaacaguuuaacauuaccaagugaaguaaaucucugcaauguugacauauucaaccccaaauaugauuguaaaauuaugacuucaaaaacagauguaagcagcuccguuaucacaucucuaggagccauugugucaugcuauggcaaaacuaaauguacagcauccaauaaaaaucguggaaucauaaagacauuuucuaacgggugcgauuauguaucaaauaaagggguggacacugugucuguagguaacacauuauauuauguaaauaagcaagaagguaaaagucucuauguaaaaggugaaccaauaauaaauuucuaugacccauuaguauuccccucugaugaauuugaugcaucaauaucucaagucaacgagaagauuaaccagagccuagcauuuauucguaaauccgaugaauuauuacauaauguaaaugcugguaaauccaccacaaauaucaugauaacuacuauaauuauagugauuauaguaauauuguuaucauuaauugcuguuggacugcucuuauacuguaaggccagaagcacaccagucacacuaagcaaagaucaacugagugguauaaauaauauugcauuuaguaacuaaggacuagugaagggaacacccaaauuuaauucagccuuaagcacaauuaauuaagagugaaacguaauuguacaagcaguuggucacccaccauagggcaugaucaacaccgcaaccuuuccuuuuucccccagugauucugaaaaaccccucuucccuucagcuugcuuagauguuccaaauuuaguaagcuuaaggcggccuacagaagaaaaagaaaaaaaaggccacaaaaguucccucucacuuucaguaaauaaaauaaaagcagcaacagaaauaaagaaauaaaugaaauucaaaaugaaauaaauauuguguugugcagcauuaaaaaaucaauaaaaauuaaaaaugagcaagaucuaaaaaaaaaaaaaaaaaaaaaaaaaaaaaaaaaaaaaaaaaaaaaaaaaaaaaaaaaaaaaaaaugcaucccccccccccccccccccccccccccccccaaaggcucuuuucagagccaccagaauu

SEQ ID NO: 412 - RNA, 2319 nt, Artificial Sequence
  mRNA product Design h-2 comprising derived and/or modified sequence from HRSV(A2)__F0 (opt1)
gggagacccgugacccggaaguuguacggcuacgcgacuuucccucccacaaacccucgcgcccuuccuuuccuacuugggcccggcagaaagcuuaccauggagcugcucauccugaaggccaacgccaucaccaccauccugacggcggugaccuucugcuucgccagcggccagaacaucaccgaggaguucuaccaguccaccugcagcgccgucuccaagggguaccucagcgcccugcggacgggcugguacaccuccgugaucaccaucgagcugagcaacaucaaggagaacaagugcaacgggaccgacgccaaggugaagcucaucaagcaggagcuggacaaguacaagaacgcggucacggagcugcagcuccugaugcaguccaccccggcaaccaacaaccgcgcccggcgcgagcugccccgguucaugaacuacacccucaacaacgccaagaagacgaacgugacccugagcaagaagcgcaagcggcgcuuccugggcuuccuccugggggugggcuccgccaucgcgagcggcgucgccguguccaaggugcugcaccucgagggggaggucaacaagaucaagagcgcccugcuguccaccaacaaggccguggugagccucuccaacggcgucagcgugcugaccuccaaggugcuggaccucaagaacuacaucgacaagcagcugcugcccaucgucaacaagcagagcugcuccaucagcaacaucgagacggugaucgaguuccagcagaagaacaaccggcuccuggagaucacccgcgaguucagcgugaacgccggggucaccacccccguguccacguacaugcugaccaacagcgagcuccugucccugaucaacgacaugccgaucaccaacgaccagaagaagcucaugagcaacaacgugcagaucguccggcagcaguccuacagcaucauguccaucaucaaggaggaggugcuggcguacgugguccagcugccccucuacggcgugaucgacacccccugcuggaagcugcacacgagcccccugugcaccaccaacaccaaggagggguccaacaucugccucacgcgcaccgaccggggcugguacugcgacaacgccggcagcgucuccuucuucccgcaggccgagaccugcaaggugcagagcaaccgcguguucugcgacaccaugaacucccugacgcugcccagcgagguaaaccucugcaacgucgacaucuucaaccccaaguacgacugcaagaucaugaccuccaagaccgacgugagcuccagcgugaucaccucccugggggccaucgucagcugcuacggcaagacgaagugcaccgccagcaacaagaaccgggggaucaucaagaccuucuccaacggcugcgacuacgugagcaacaagggcguggacaccguguccgucgggaacacccuguacuacgugaacaagcaggagggcaagagccucuacgugaagggggagcccaucaucaacuucuacgacccgcuggucuuccccuccgacgaguucgacgcgagcaucucccaggugaacgagaagaucaaccagagccuggccuucauccgcaaguccgacgagcugcuccacaacgugaacgccggcaagagcacgaccaacaucaugaucaccaccaucaucaucgucaucaucgugauccugcugucccucaucgccguggggcugcugcucuacugcaaggcccggagcacgcccgucacccuguccaaggaccagcugagcggcaucaacaacaucgcguucuccaacugaggacuagugaagggaacacccaaauuuaauucagccuuaagcacaauuaauuaagagugaaacguaauuguacaagcaguuggucacccaccauagggcaugaucaacaccgcaaccuuuccuuuuucccccagugauucugaaaaaccccucuucccuucagcuugcuuagauguuccaaauuuaguaagcuuaaggcggccuacagaagaaaaagaaaaaaaaggccacaaaaguucccucucacuuucaguaaauaaaauaaaagcagcaacagaaauaaagaaauaaaugaaauucaaaaugaaauaaauauuguguugugcagcauuaaaaaaucaauaaaaauuaaaaaugagcaagaucuaaaaaaaaaaaaaaaaaaaaaaaaaaaaaaaaaaaaaaaaaaaaaaaaaaaaaaaaaaaaaaaaugcaucccccccccccccccccccccccccccccccaaaggcucuuuucagagccaccagaauu

SEQ ID NO: 413 - RNA, 2319 nt, Artificial Sequence
  mRNA product Design h-2 comprising derived and/or modified sequence from HRSV(A2)__F0 (opt1)
gggagacccgugacccggaaguuguacggcuacgcgacuuucccucccacaaacccucgcgcccuuccuuuccuacuugggcccggcagaaagcuuaccauggagcugcucauccugaaggccaacgccaucaccaccauccugacggcggugaccuucugcuucgccagcggccagaacaucaccgaggaguucuaccaguccacgugcagcgccgucuccaagggguaccucagcgcccugcgcaccggcugguacaccuccgugaucaccaucgagcugagcaacaucaaggagaacaagugcaacgggaccgacgccaaggugaagcucaucaagcaggagcuggacaaguacaagaacgcggucacggagcugcagcuccugaugcaguccacccccgccaccaacaaccgggcccgccgggagcugccgcgcuucaugaacuacacccucaacaacgccaagaagacgaacgugacccugagcaagaagcggaagcgccgguuccugggcuuccuccugggggugggcuccgcgaucgccagcggcgucgccguguccaaggugcugcaccucgagggggaggucaacaagaucaagagcgcccugcuguccaccaacaaggccguggugagccucuccaacggcgucagcgugcugaccuccaaggugcuggaccucaagaacuacaucgacaagcagcugcugcccaucgucaacaagcagagcugcuccaucagcaacaucgagacggugaucgaguuccagcagaagaacaaccgccuccuggagaucacccgggaguucagcgugaacgcgggggucaccacccccguguccacguacaugcugaccaacagcgagcuccugucccugaucaacgacaugcccaucaccaacgaccagaagaagcucaugagcaacaacgugcagaucguccgccagcaguccuacagcaucauguccaucaucaaggaggaggugcuggccuacgugguccagcugccgcucuacggcgugaucgacacccccugcuggaagcugcacacgagcccccugugcaccaccaacaccaaggagggguccaacaucugccucacgcggaccgaccgcggcugguacugcgacaacgccggcagcgucuccuucuucccccaggccgagaccugcaaggugcagagcaaccggguguucugcgacaccaugaacucccugacgcugccgagcgaggucaaccucugcaacguggacaucuucaaccccaaguacgacugcaagaucaugaccuccaagaccgacgugagcuccagcgucaucaccucccugggggccaucgugagcugcuacggcaagacgaagugcaccgcgagcaacaagaaccgcgggaucaucaagaccuucuccaacggcugcgacuacgugagcaacaagggcgucgacaccguguccguggggaacacccuguacuacgucaacaagcaggagggcaagagccucuacgugaagggggagcccaucaucaacuucuacgacccccugguguucccguccgacgaguucgacgccagcaucucccaggucaacgagaagaucaaccagagccuggccuucauccggaaguccgacgagcuccugcacaacgugaacgccggcaagagcacgaccaacaucaugaucaccaccaucaucaucgugaucaucgucauccugcugucccucaucgccguggggcugcugcucuacugcaaggcgcgcagcacgcccgugacccuguccaaggaccagcugagcggcaucaacaacaucgccuucuccaacugaggacuagugaagggaacacccaaauuuaauucagccuuaagcacaauuaauuaagagugaaacguaauuguacaagcaguuggucacccaccauagggcaugaucaacaccgcaaccuuuccuuuuucccccagugauucugaaaaaccccucuucccuucagcuugcuuagauguuccaaauuuaguaagcuuaaggcggccuacagaagaaaaagaaaaaaaaggccacaaaaguucccucucacuuucaguaaauaaaauaaaagcagcaacagaaauaaagaaauaaaugaaauucaaaaugaaauaaauauuguguugugcagcauuaaaaaaucaauaaaaauuaaaaaugagcaagaucuaaaaaaaaaaaaaaaaaaaaaaaaaaaaaaaaaaaaaaaaaaaaaaaaaaaaaaaaaaaaaaaaugcaucccccccccccccccccccccccccccccccaaaggcucuuuucagagccaccagaauu

SEQ ID NO: 414 - RNA, 2319 nt, Artificial Sequence
  mRNA product Design h-2 comprising derived and/or modified sequence from HRSV(A2)__F0 (opt2)
gggagacccgugacccggaaguuguacggcuacgcgacuuucccucccacaaacccucgcgcccuuccuuuccuacuugggcccggcagaaagcuuaccauggagcuccucauccucaaggccaacgccaucaccaccauccucaccgccgucaccuucugcuucgccuccggccagaacaucaccgaggaguucuaccaguccaccugcuccgccgucuccaagggcuaccucuccgcccuccgcaccggcugguacaccuccgucaucaccaucgagcucuccaacaucaaggagaacaagugcaacggcaccgacgccaaggucaagcucaucaagcaggagcucgacaaguacaagaacgccgucaccgagcuccagcuccucaugcaguccacccccgccaccaacaaccgcgcccgccgcgagcucccccgcuucaugaacuacacccucaacaacgccaagaagaccaacgucacccucuccaagaagcgcaagcgccgcuuccucggcuuccuccucggcgucggcuccgccaucgccuccggcgucgccgucuccaagguccuccaccucgagggcgaggucaacaagaucaaguccgcccuccucuccaccaacaaggccgucgucucccucuccaacggcgucuccguccucaccuccaagguccucgaccucaagaacuacaucgacaagcagcuccuccccaucgucaacaagcaguccugcuccaucuccaacaucgagaccgucaucgaguuccagcagaagaacaaccgccuccucgagaucacccgcgaguucuccgucaacgccggcgucaccacccccgucuccaccuacaugcucaccaacuccgagcuccucucccucaucaacgacaugcccaucaccaacgaccagaagaagcucauguccaacaacguccagaucguccgccagcaguccuacuccaucauguccaucaucaaggaggagguccucgccuacgucguccagcucccccucuacggcgucaucgacacccccugcuggaagcuccacaccuccccccucugcaccaccaacaccaaggagggcuccaacaucugccucacccgcaccgaccgcggcugguacugcgacaacgccggcuccgucuccuucuucccccaggccgagaccugcaagguccaguccaaccgcgucuucugcgacaccaugaacucccucacccuccccuccgaggucaaccucugcaacgucgacaucuucaaccccaaguacgacugcaagaucaugaccuccaagaccgacgucuccuccuccgucaucaccucccucggcgccaucgucuccugcuacggcaagaccaagugcaccgccuccaacaagaaccgcggcaucaucaagaccuucuccaacggcugcgacuacgucuccaacaagggcgucgacaccgucuccgucggcaacacccucuacuacgucaacaagcaggagggcaagucccucuacgucaagggcgagcccaucaucaacuucuacgacccccucgucuuccccuccgacgaguucgacgccuccaucucccaggucaacgagaagaucaaccagucccucgccuucauccgcaaguccgacgagcuccuccacaacgucaacgccggcaaguccaccaccaacaucaugaucaccaccaucaucaucgucaucaucgucauccuccucucccucaucgccgucggccuccuccucuacugcaaggcccgcuccacccccgucacccucuccaaggaccagcucuccggcaucaacaacaucgccuucuccaacugaggacuagugaagggaacacccaaauuuaauucagccuuaagcacaauuaauuaagagugaaacguaauuguacaagcaguuggucacccaccauagggcaugaucaacaccgcaaccuuuccuuuuucccccagugauucugaaaaaccccucuucccuucagcuugcuuagauguuccaaauuuaguaagcuuaaggcggccuacagaagaaaaagaaaaaaaaggccacaaaaguucccucucacuuucaguaaauaaaauaaaagcagcaacagaaauaaagaaauaaaugaaauucaaaaugaaauaaauauuguguugugcagcauuaaaaaaucaauaaaaauuaaaaaugagcaagaucuaaaaaaaaaaaaaaaaaaaaaaaaaaaaaaaaaaaaaaaaaaaaaaaaaaaaaaaaaaaaaaaaugcaucccccccccccccccccccccccccccccccaaaggcucuuuucagagccaccagaauu

SEQ ID NO: 415 - RNA, 2319 nt, Artificial Sequence
  mRNA product Design h-2 comprising derived and/or modified sequence from HRSV(A2)__F0 (opt3)
gggagacccgugacccggaaguuguacggcuacgcgacuuucccucccacaaacccucgcgcccuuccuuuccuacuugggcccggcagaaagcuuaccauggagcugcucauccuuaaggccaacgcuauuaccacaauacugacugcagugacguucugcuuugccagcggccagaauaucaccgaagaguucuaccaauccacauguucugcggucucaaaaggguauuugagugcuuuaagaacuggaugguacaccagcguuauuacaaucgaacuguccaacauuaaggagaauaaaugcaacgguaccgacgccaaggugaaacuaaucaagcaggaacucgauaaguauaaaaaugcaguaacugagcugcagcuucugaugcagucuacacccgccaccaacaauagggcucggcgcgaguugccucgauuuaugaacuacacgcucaauaacgcaaagaaaacuaaugugacccugucgaagaaacguaagagaagguuccugggcuuucucuuaggggucggaucagccauagcuagcggcguggccguuaguaaggugcugcaccuugaaggugaggucaacaaaaucaaguccgcguugcugucuacaaauaaagcagugguaagccuauccaacgggguuucagugcucacuucuaagguccuggaccuuaaaaauuauauugauaagcaacuguugccaaucgugaacaaacagagcuguucuauuuccaacaucgaaaccgugauagaguuccagcagaagaauaaccggcuccuggagauuacacgcgaauuuucagucaaugccggaguuaccacgccggugagcacuuacauguuaacaaacagugagcugcucucucuuaucaaugacaugcccauuaccaacgaucaaaagaaacugauguccaauaacguacagaucgugagacagcagagcuauucgaucaugucuauuauaaaggaagaggucuuggcuuacgugguucaacuaccucuguacggcgugaucgacacuccaugcuggaaacuccauacauccccacuguguaccacgaauaccaaggaaggcucaaacauuugccuuacaaggacugaucgggggugguauugugacaaugccggaagugucagcuucuuuccucaggcagagaccugcaaagugcaguccaaccgcguauucugugauacaaugaauagucugacuuugccaagcgagguuaaccucugcaauguggacaucuuuaaccccaaguacgauuguaagauaaugaccucaaaaacagacgucaguuccagcgugauuaccucucugggugcuaucgucucaugcuauggcaagacuaaaugcacggccaguaacaagaaucgagggaucauuaaaacauucagcaacggaugugauuacguguccaauaagggcguugacaccgugucuguagguaacacuuuauauuacgucaauaagcaagaagggaaaucgcuguaugugaagggagagccuaucauuaacuuuuacgacccccuaguuuucccgagcgaugaauuugacgcguccauaucacaggugaaugagaaaaucaaccagagucucgccuucauuagaaagucugaugaacugcuucacaaugucaacgcaggcaaaagcaccacaaauaucaugaucaccacuauuauaaucgugauuaucguaauuuugcugucccucaucgcugugggccugcuucuguacugcaaggccaggucaacacccguuacguugagcaaggaccagcucucugggauaaacaauaucgcuuucuccaacugaggacuagugaagggaacacccaaauuuaauucagccuuaagcacaauuaauuaagagugaaacguaauuguacaagcaguuggucacccaccauagggcaugaucaacaccgcaaccuuuccuuuuucccccagugauucugaaaaaccccucuucccuucagcuugcuuagauguuccaaauuuaguaagcuuaaggcggccuacagaagaaaaagaaaaaaaaggccacaaaaguucccucucacuuucaguaaauaaaauaaaagcagcaacagaaauaaagaaauaaaugaaauucaaaaugaaauaaauauuguguugugcagcauuaaaaaaucaauaaaaauuaaaaaugagcaagaucuaaaaaaaaaaaaaaaaaaaaaaaaaaaaaaaaaaaaaaaaaaaaaaaaaaaaaaaaaaaaaaaaugcaucccccccccccccccccccccccccccccccaaaggcucuuuucagagccaccagaauu

SEQ ID NO: 416 - RNA, 2319 nt, Artificial Sequence
  mRNA product Design h-2 comprising derived and/or modified sequence from HRSV(A2)__F0 (opt4)
gggagacccgugacccggaaguuguacggcuacgcgacuuucccucccacaaacccucgcgcccuuccuuuccuacuugggcccggcagaaagcuuaccauggagcugcugauccugaaggccaacgccaucaccaccauccugaccgccgugaccuucugcuucgccagcggccagaacaucaccgaggaguucuaccagagcaccugcagcgccgugagcaagggcuaccugagcgcccugagaaccggcugguacaccagcgugaucaccaucgagcugagcaacaucaaggagaacaagugcaacggcaccgacgccaaggugaagcugaucaagcaggagcuggacaaguacaagaacgccgugaccgagcugcagcugcugaugcagagcacccccgccaccaacaacagagccagaagagagcugcccagauucaugaacuacacccugaacaacgccaagaagaccaacgugacccugagcaagaagagaaagagaagauuccugggcuuccugcugggcgugggcagcgccaucgccagcggcguggccgugagcaaggugcugcaccuggagggcgaggugaacaagaucaagagcgcccugcugagcaccaacaaggccguggugagccugagcaacggcgugagcgugcugaccagcaaggugcuggaccugaagaacuacaucgacaagcagcugcugcccaucgugaacaagcagagcugcagcaucagcaacaucgagaccgugaucgaguuccagcagaagaacaacagacugcuggagaucaccagagaguucagcgugaacgccggcgugaccacccccgugagcaccuacaugcugaccaacagcgagcugcugagccugaucaacgacaugcccaucaccaacgaccagaagaagcugaugagcaacaacgugcagaucgugagacagcagagcuacagcaucaugagcaucaucaaggaggaggugcuggccuacguggugcagcugccccuguacggcgugaucgacacccccugcuggaagcugcacaccagcccccugugcaccaccaacaccaaggagggcagcaacaucugccugaccagaaccgacagaggcugguacugcgacaacgccggcagcgugagcuucuucccccaggccgagaccugcaaggugcagagcaacagaguguucugcgacaccaugaacagccugacccugcccagcgaggugaaccugugcaacguggacaucuucaaccccaaguacgacugcaagaucaugaccagcaagaccgacgugagcagcagcgugaucaccagccugggcgccaucgugagcugcuacggcaagaccaagugcaccgccagcaacaagaacagaggcaucaucaagaccuucagcaacggcugcgacuacgugagcaacaagggcguggacaccgugagcgugggcaacacccuguacuacgugaacaagcaggagggcaagagccuguacgugaagggcgagcccaucaucaacuucuacgacccccugguguuccccagcgacgaguucgacgccagcaucagccaggugaacgagaagaucaaccagagccuggccuucaucagaaagagcgacgagcugcugcacaacgugaacgccggcaagagcaccaccaacaucaugaucaccaccaucaucaucgugaucaucgugauccugcugagccugaucgccgugggccugcugcuguacugcaaggccagaagcacccccgugacccugagcaaggaccagcugagcggcaucaacaacaucgccuucagcaacugaggacuagugaagggaacacccaaauuuaauucagccuuaagcacaauuaauuaagagugaaacguaauuguacaagcaguuggucacccaccauagggcaugaucaacaccgcaaccuuuccuuuuucccccagugauucugaaaaaccccucuucccuucagcuugcuuagauguuccaaauuuaguaagcuuaaggcggccuacagaagaaaaagaaaaaaaaggccacaaaaguucccucucacuuucaguaaauaaaauaaaagcagcaacagaaauaaagaaauaaaugaaauucaaaaugaaauaaauauuguguugugcagcauuaaaaaaucaauaaaaauuaaaaaugagcaagaucuaaaaaaaaaaaaaaaaaaaaaaaaaaaaaaaaaaaaaaaaaaaaaaaaaaaaaaaaaaaaaaaaugcaucccccccccccccccccccccccccccccccaaaggcucuuuucagagccaccagaauu

SEQ ID NO: 417 - RNA, 2319 nt, Artificial Sequence
  mRNA product Design h-2 comprising derived and/or modified sequence from HRSV(A2)__F0 (opt5)
gggagacccgugacccggaaguuguacggcuacgcgacuuucccucccacaaacccucgcgcccuuccuuuccuacuugggcccggcagaaagcuuaccauggagcugcucauccugaaggccaacgcuauuaccacaauccuuacggccgugaccuucugcuuugcgagcggccagaauauuacagaagaguucuaccaauccaccuguucugcugucagcaaaggguaucuguccgcccucagaacaggaugguacaccucuguuaucacaauugaacugagcaacaucaaggagaauaaaugcaacggcaccgacgccaaggugaaacuuaucaagcaggaacuggauaaguauaaaaaugcugugacggagcuccagcugcugaugcaguccacccccgccacaaacaaucgggcucgcagagagcucccucgguuuaugaacuacacccugaauaacgccaagaaaacaaaugucacccuuucuaagaaacgcaagagacgguuccugggguuucuccugggagugggcagcgcgauugccuccgggguugcugugagcaagguccuucaccuggaaggagaggugaacaaaaucaagucugcccuccuguccacgaauaaagcuguugugagccugucuaacggcgucuccgugcucacaagcaaggugcuggaccuuaaaaauuauauugauaagcaacugcucccgaucgucaacaaacagucuuguuccauuagcaacaucgaaaccguuauugaguuccagcagaagaauaaccgccugcuugagaucacaagagaauuuuccgugaaugccggcgugaccacccccgucucuacauacaugcugacgaacagcgagcuccugucccugaucaaugacaugccuauuaccaacgaucaaaagaaacucaugagcaauaacgugcagaucguucggcagcagucuuauuccauuaugagcaucauuaaggaagaggugcuggcguacgucgugcaacuuccccuguacgggguuaucgacacaccuugcuggaaacuccauaccucuccccuguguacaaccaauacgaaggaaggaagcaacaucugccuuacacgcaccgauagaggcugguauugugacaaugccggguccgugucuuucuuuccucaggcugagaccugcaaaguccagagcaaccggguguucugugauacaaugaacucccugacccucccgagcgaggucaaucugugcaauguggacauuuuuaaccccaaguacgauuguaagaucaugacaucuaaaacggacguuuccagcucugugauuaccucccugggagccaucgucagcugcuauggcaagacaaaaugcaccgcuuccaacaagaaucgcgggauuaucaaaacauucucuaacggaugugauuacgugagcaauaagggcguugacaccguguccgucggcaacacgcucuauuacgugaauaagcaagaagggaaaucucuguaugugaagggagagccuaucauuaacuuuuacgacccccuuguuuucccuagcgaugaauuugacgccuccaucagccaggucaaugagaaaauuaaccagucucuggccuucaucagaaaguccgaugaacuccugcacaaugugaacgcuggcaaaagcaccacaaauauuaugaucaccacaauuaucaucgugauuaucgucauucugcuuucucucaucgcgguggggcugcugcucuacugcaaggcccgguccacccccguuacgcugagcaaggaccagcuuucuggaauuaacaauaucgcuuucagcaacugaggacuagugaagggaacacccaaauuuaauucagccuuaagcacaauuaauuaagagugaaacguaauuguacaagcaguuggucacccaccauagggcaugaucaacaccgcaaccuuuccuuuuucccccagugauucugaaaaaccccucuucccuucagcuugcuuagauguuccaaauuuaguaagcuuaaggcggccuacagaagaaaaagaaaaaaaaggccacaaaaguucccucucacuuucaguaaauaaaauaaaagcagcaacagaaauaaagaaauaaaugaaauucaaaaugaaauaaauauuguguugugcagcauuaaaaaaucaauaaaaauuaaaaaugagcaagaucuaaaaaaaaaaaaaaaaaaaaaaaaaaaaaaaaaaaaaaaaaaaaaaaaaaaaaaaaaaaaaaaaugcaucccccccccccccccccccccccccccccccaaaggcucuuuucagagccaccagaauu

SEQ ID NO: 418 - RNA, 2319 nt, Artificial Sequence
  mRNA product Design h-2 comprising derived and/or modified sequence from HRSV(A2)__F0 (opt6)
gggagacccgugacccggaaguuguacggcuacgcgacuuucccucccacaaacccucgcgcccuuccuuuccuacuugggcccggcagaaagcuuaccauggaacuucuaauauuaaaagcuaacgcaaucacuacuaucuuaaccgcaguaacauucuguuuugcauccggccaaaacauaacagaagaauuuuaccaaucaacuugcucugcagucucaaaagguuaucuaucugcauuaagaacaggcugguacaccucaguaauaacgaucgaacuaucaaacaucaaagaaaacaaauguaauggaacagacgcaaaaguaaaacuaaucaaacaagaacuagacaaauacaaaaacgcaguaaccgaacuccaacuccucaugcaaaguacaccagcaacaaauaacagagcaagacgugaacuaccacguuuuaugaauuacacgcucaauaacgcaaaaaaaacaaauguuacccuaucaaaaaaacgaaaaagaagauuccucggauuccuacuaggcguaggcucagcaauagcuucaggaguagcaguaucaaaaguacuccaccucgaaggagaaguaaacaaaaucaaaagcgcucuccucucaacaaacaaagcaguuguuucacucucaaacggaguaucaguacuaaccucaaaaguacuugaccuaaaaaauuauauagacaaacaacuauuaccaauaguaaacaaacaaagcugcuccaucuccaacaucgagacagucauagaauuucaacaaaaaaauaaccgccuauuagaaauaaccagagaauuuucaguaaacgcaggaguaacuaccccaguaucaacauauauguuaacaaacucagaacuccuaagucuaaucaacgacaugccaauaaccaacgaccaaaaaaaacuaaugagcaacaauguacaaauaguucgucaacaaucuuacuccauaaugucuauaauaaaagaagaaguacucgccuauguaguccaacuaccacuauacggagucaucgauacaccaugcuggaaacuccacacauccccacucuguacuacuaacaccaaagaagguucaaauauaugccuaaccagaacagauagagguugguacugcgauaaugcaggaucaguauccuuuuucccccaagccgaaacaugcaaaguucaauccaauagaguauuuugugauacaaugaacucuuuaacccucccauccgaagucaaucuauguaacgucgacauauuuaacccaaaauacgauugcaaaauaaugacaucaaaaacagacgucucauccucaguuauaacguccuuaggcgcuauaguaucaugcuacggcaaaacaaaauguacagcaucaaacaaaaacagaggaaucauaaaaacuuucucuaacgguugcgacuauguauccaacaaaggugucgacacaguauccguaggcaacacccuuuacuauguuaauaaacaagaaggaaaaucucuauauguaaaaggcgaaccaauuauaaauuuuuacgacccccuugucuuucccucugacgaauuugacgcuuccauaucacaagucaacgaaaaaaucaaccaaucccucgcauucauacgcaaaucagacgaacuacuacauaacgucaacgcaggcaaauccacaacaaacauaaugauaaccacaaucauaauuguaauaauaguaauacuacuuucucuaauagcagucggauuacucuuauacuguaaagcucgaucaacaccagucacccucucuaaagaucaacuauccggaaucaacaacauagcuuucucaaacuaaggacuagugaagggaacacccaaauuuaauucagccuuaagcacaauuaauuaagagugaaacguaauuguacaagcaguuggucacccaccauagggcaugaucaacaccgcaaccuuuccuuuuucccccagugauucugaaaaaccccucuucccuucagcuugcuuagauguuccaaauuuaguaagcuuaaggcggccuacagaagaaaaagaaaaaaaaggccacaaaaguucccucucacuuucaguaaauaaaauaaaagcagcaacagaaauaaagaaauaaaugaaauucaaaaugaaauaaauauuguguugugcagcauuaaaaaaucaauaaaaauuaaaaaugagcaagaucuaaaaaaaaaaaaaaaaaaaaaaaaaaaaaaaaaaaaaaaaaaaaaaaaaaaaaaaaaaaaaaaaugcaucccccccccccccccccccccccccccccccaaaggcucuuuucagagccaccagaauu

SEQ ID NO: 419 - RNA, 2319 nt, Artificial Sequence
  mRNA product Design h-2 comprising derived and/or modified sequence from HRSV(A2)__F0 (opt11)
gggagacccgugacccggaaguuguacggcuacgcgacuuucccucccacaaacccucgcgcccuuccuuuccuacuugggcccggcagaaagcuuaccauggaacuccucauacucaaagccaacgcaaucacaaccauacucaccgccgucaccuucugcuuugcaucuggccagaacaucacugaagaguucuaccaauccacaugcuccgccguaagcaaaggcuaccuauccgcccuacgcaccggcugguacaccagcguaaucaccauagaacucuccaauauaaaagaaaacaaaugcaacggcaccgacgcaaaagucaagcuaauaaaacaagaacucgacaaauacaaaaacgccguuaccgaacuccagcuacucaugcaaucgaccccagcaaccaacaaccgugcgagacgcgaacucccccgcuucaugaacuacacccuaaacaacgccaaaaagaccaacguaacucuauccaagaaacgcaaacgccgcuuccucggauuccuccucggcgucggcuccgcaaucgccagcggcgucgccguuagcaaaguccuucaccucgaaggagaaguaaacaaaauuaaaagcgcccucuuauccacaaacaaggccguaguaucccugucaaacggcgucuccguccuuacauccaaaguccucgaccucaagaacuacauagacaaacagcuacuacccauuguaaauaaacaaagcugcucaauuagcaacaucgaaaccguaaucgaguuccagcagaaaaacaacagacuucucgaaaucacccgcgaguucagcgucaacgccggcguaaccaccccugucucaacauacaugcuaaccaacagcgaacugcucucccucaucaacgacaugcccaucaccaacgaccaaaagaaacucaugagcaacaacguacaaaucgugcgccaacaguccuacucaauaaugucaaucaucaaagaagaagugcuagcauacgucguacaacuaccacucuacggcguaauagauacccccugcuggaagcuccauaccuccccacucuguaccaccaacaccaaagaaggcucaaacaucugccuaacgcgcacagaccguggaugguacugugacaacgccggcuccgucuccuucuucccucaagccgaaacaugcaaaguccaauccaacagagucuucugcgauaccaugaacucccugacacucccaagcgaagucaaccuuugcaacgucgauaucuuuaaccccaaauacgacugcaagaucaugacaucaaaaaccgacguauccuccucuguaauaaccucccuaggcgcaaucguaucaugcuacggcaaaaccaaauguaccgccuccaacaaaaaucgcggcaucaucaaaaccuucucgaacggcugcgacuacgucuccaacaaaggcguagacacaguuuccguaggcaacacccucuacuacgucaauaaacaggaaggcaagucccucuacgucaaaggcgaacccaucaucaauuucuacgacccccucguuuuccccuccgaugaguucgacgcaagcaucagccaggucaacgaaaagauaaaccagucccucgccuucauccgcaaaucagaugaacuccuucacaacguuaacgcaggcaagagcaccaccaacaucaugaucacaacuauaaucaucgucauaaucgucauccuacucucacuaaucgccgucggucuccuacuauauuguaaagcccgaucaacaccggucacacucuccaaagaccaacucuccggaaucaacaauaucgcuuucucgaacuaaggacuagugaagggaacacccaaauuuaauucagccuuaagcacaauuaauuaagagugaaacguaauuguacaagcaguuggucacccaccauagggcaugaucaacaccgcaaccuuuccuuuuucccccagugauucugaaaaaccccucuucccuucagcuugcuuagauguuccaaauuuaguaagcuuaaggcggccuacagaagaaaaagaaaaaaaaggccacaaaaguucccucucacuuucaguaaauaaaauaaaagcagcaacagaaauaaagaaauaaaugaaauucaaaaugaaauaaauauuguguugugcagcauuaaaaaaucaauaaaaauuaaaaaugagcaagaucuaaaaaaaaaaaaaaaaaaaaaaaaaaaaaaaaaaaaaaaaaaaaaaaaaaaaaaaaaaaaaaaaugcaucccccccccccccccccccccccccccccccaaaggcucuuuucagagccaccagaauu

SEQ ID NO: 420 - RNA, 2099 nt, Artificial Sequence
  mRNA product Design h-3 comprising derived and/or modified sequence from HRSV(A2)__F0 (artificial)
gggagacccgugacccggaaguuguacggcuacgcgacuuucccucccacaaacccucgcgcccuuccuuuccuacuugggcccggcagaaagcuuaccauggaguugcuaauccucaaagcaaaugcaauuaccacaauccucacugcagucacauuuuguuuugcuucuggucaaaacaucacugaagaauuuuaucaaucaacaugcagugcaguuagcaaaggcuaucuuagugcucugagaacugguugguauaccaguguuauaacuauagaauuaaguaauaucaaggaaaauaaguguaauggaacagaugcuaagguaaaauugauaaaacaagaauuagauaaauauaaaaaugcuguaacagaauugcaguugcucaugcaaagcacaccagcaacaaacaaucgagccagaagagaacuaccaagguuuaugaauuauacacucaacaaugccaaaaaaaccaauguaacauuaagcaagaaaaggaaaagaagauuucuugguuuuuuguuagguguuggaucugcaaucgccaguggcguugcuguaucuaagguccugcaccuagaaggggaagugaacaagaucaaaagugcucuacuauccacaaacaaggcuguagucagcuuaucaaauggaguuagugucuuaaccagcaaaguguuagaccucaaaaacuauauagauaaacaauuguuaccuauugugaacaagcaaagcugcagcauaucaaauauagaaacugugauagaguuccaacaaaagaacaacagacuacuagagauuaccagggaauuuaguguuaaugcagguguaacuacaccuguaagcacuuacauguuaacuaauagugaauuauugucauuaaucaaugauaugccuauaacaaaugaucagaaaaaguuaauguccaacaauguucaaauaguuagacagcaaaguuacucuaucauguccauaauaaaagaggaagucuuagcauauguaguacaauuaccacuauaugguguuauagauacacccuguuggaaacuacacacauccccucuauguacaaccaacacaaaagaaggguccaacaucuguuuaacaagaacugacagaggaugguacugugacaaugcaggaucaguaucuuucuucccacaagcugaaacauguaaaguucaaucaaaucgaguauuuugugacacaaugaacaguuuaacauuaccaagugaaguaaaucucugcaauguugacauauucaaccccaaauaugauuguaaaauuaugacuucaaaaacagauguaagcagcuccguuaucacaucucuaggagccauugugucaugcuauggcaaaacuaaauguacagcauccaauaaaaaucguggaaucauaaagacauuuucuaacgggugcgauuauguaucaaauaaagggguggacacugugucuguagguaacacauuauauuauguaaauaagcaagaagguaaaagucucuauguaaaaggugaaccaauaauaaauuucuaugacccauuaguauuccccucugaugaauuugaugcaucaauaucucaagucaacgagaagauuaaccagagccuagcauuuauucguaaauccgaugaauuauuacauaauguaaaugcugguaaauccaccacaaauaucaugauaacuacuauaauuauagugauuauaguaauauuguuaucauuaauugcuguuggacugcucuuauacuguaaggccagaagcacaccagucacacuaagcaaagaucaacugagugguauaaauaauauugcauuuaguaacuaaggacuaguggaagcauuuuccuggcugauuaaaagaaauuacucagcuauggucaucuguuccuguuagaaggcuaugcagcauauuauauacuaugcgcauguuaugaaaugcauaauaaaaaauuuuaaaaaaucuaaaagaucuaaaaaaaaaaaaaaaaaaaaaaaaaaaaaaaaaaaaaaaaaaaaaaaaaaaaaaaaaaaaaaaaugcaucccccccccccccccccccccccccccccccaaaggcucuuuucagagccaccagaauu

SEQ ID NO: 421 - RNA, 2099 nt, Artificial Sequence
  mRNA product Design h-3 comprising derived and/or modified sequence from HRSV(A2)__F0 (opt1)
gggagacccgugacccggaaguuguacggcuacgcgacuuucccucccacaaacccucgcgcccuuccuuuccuacuugggcccggcagaaagcuuaccauggagcugcucauccugaaggccaacgccaucaccaccauccugacggcggugaccuucugcuucgccagcggccagaacaucaccgaggaguucuaccaguccaccugcagcgccgucuccaagggguaccucagcgcccugcggacgggcugguacaccuccgugaucaccaucgagcugagcaacaucaaggagaacaagugcaacgggaccgacgccaaggugaagcucaucaagcaggagcuggacaaguacaagaacgcggucacggagcugcagcuccugaugcaguccaccccggcaaccaacaaccgcgcccggcgcgagcugccccgguucaugaacuacacccucaacaacgccaagaagacgaacgugacccugagcaagaagcgcaagcggcgcuuccugggcuuccuccugggggugggcuccgccaucgcgagcggcgucgccguguccaaggugcugcaccucgagggggaggucaacaagaucaagagcgcccugcuguccaccaacaaggccguggugagccucuccaacggcgucagcgugcugaccuccaaggugcuggaccucaagaacuacaucgacaagcagcugcugcccaucgucaacaagcagagcugcuccaucagcaacaucgagacggugaucgaguuccagcagaagaacaaccggcuccuggagaucacccgcgaguucagcgugaacgccggggucaccacccccguguccacguacaugcugaccaacagcgagcuccugucccugaucaacgacaugccgaucaccaacgaccagaagaagcucaugagcaacaacgugcagaucguccggcagcaguccuacagcaucauguccaucaucaaggaggaggugcuggcguacgugguccagcugccccucuacggcgugaucgacacccccugcuggaagcugcacacgagcccccugugcaccaccaacaccaaggagggguccaacaucugccucacgcgcaccgaccggggcugguacugcgacaacgccggcagcgucuccuucuucccgcaggccgagaccugcaaggugcagagcaaccgcguguucugcgacaccaugaacucccugacgcugcccagcgagguaaaccucugcaacgucgacaucuucaaccccaaguacgacugcaagaucaugaccuccaagaccgacgugagcuccagcgugaucaccucccugggggccaucgucagcugcuacggcaagacgaagugcaccgccagcaacaagaaccgggggaucaucaagaccuucuccaacggcugcgacuacgugagcaacaagggcguggacaccguguccgucgggaacacccuguacuacgugaacaagcaggagggcaagagccucuacgugaagggggagcccaucaucaacuucuacgacccgcuggucuuccccuccgacgaguucgacgcgagcaucucccaggugaacgagaagaucaaccagagccuggccuucauccgcaaguccgacgagcugcuccacaacgugaacgccggcaagagcacgaccaacaucaugaucaccaccaucaucaucgucaucaucgugauccugcugucccucaucgccguggggcugcugcucuacugcaaggcccggagcacgcccgucacccuguccaaggaccagcugagcggcaucaacaacaucgcguucuccaacugaggacuaguggaagcauuuuccuggcugauuaaaagaaauuacucagcuauggucaucuguuccuguuagaaggcuaugcagcauauuauauacuaugcgcauguuaugaaaugcauaauaaaaaauuuuaaaaaaucuaaaagaucuaaaaaaaaaaaaaaaaaaaaaaaaaaaaaaaaaaaaaaaaaaaaaaaaaaaaaaaaaaaaaaaaugcaucccccccccccccccccccccccccccccccaaaggcucuuuucagagccaccagaauu

SEQ ID NO: 422 - RNA, 2099 nt, Artificial Sequence
  mRNA product Design h-3 comprising derived and/or modified sequence from HRSV(A2)__F0 (opt1)
gggagacccgugacccggaaguuguacggcuacgcgacuuucccucccacaaacccucgcgcccuuccuuuccuacuugggcccggcagaaagcuuaccauggagcugcucauccugaaggccaacgccaucaccaccauccugacggcggugaccuucugcuucgccagcggccagaacaucaccgaggaguucuaccaguccacgugcagcgccgucuccaagggguaccucagcgcccugcgcaccggcugguacaccuccgugaucaccaucgagcugagcaacaucaaggagaacaagugcaacgggaccgacgccaaggugaagcucaucaagcaggagcuggacaaguacaagaacgcggucacggagcugcagcuccugaugcaguccacccccgccaccaacaaccgggcccgccgggagcugccgcgcuucaugaacuacacccucaacaacgccaagaagacgaacgugacccugagcaagaagcggaagcgccgguuccugggcuuccuccugggggugggcuccgcgaucgccagcggcgucgccguguccaaggugcugcaccucgagggggaggucaacaagaucaagagcgcccugcuguccaccaacaaggccguggugagccucuccaacggcgucagcgugcugaccuccaaggugcuggaccucaagaacuacaucgacaagcagcugcugcccaucgucaacaagcagagcugcuccaucagcaacaucgagacggugaucgaguuccagcagaagaacaaccgccuccuggagaucacccgggaguucagcgugaacgcgggggucaccacccccguguccacguacaugcugaccaacagcgagcuccugucccugaucaacgacaugcccaucaccaacgaccagaagaagcucaugagcaacaacgugcagaucguccgccagcaguccuacagcaucauguccaucaucaaggaggaggugcuggccuacgugguccagcugccgcucuacggcgugaucgacacccccugcuggaagcugcacacgagcccccugugcaccaccaacaccaaggagggguccaacaucugccucacgcggaccgaccgcggcugguacugcgacaacgccggcagcgucuccuucuucccccaggccgagaccugcaaggugcagagcaaccggguguucugcgacaccaugaacucccugacgcugccgagcgaggucaaccucugcaacguggacaucuucaaccccaaguacgacugcaagaucaugaccuccaagaccgacgugagcuccagcgucaucaccucccugggggccaucgugagcugcuacggcaagacgaagugcaccgcgagcaacaagaaccgcgggaucaucaagaccuucuccaacggcugcgacuacgugagcaacaagggcgucgacaccguguccguggggaacacccuguacuacgucaacaagcaggagggcaagagccucuacgugaagggggagcccaucaucaacuucuacgacccccugguguucccguccgacgaguucgacgccagcaucucccaggucaacgagaagaucaaccagagccuggccuucauccggaaguccgacgagcuccugcacaacgugaacgccggcaagagcacgaccaacaucaugaucaccaccaucaucaucgugaucaucgucauccugcugucccucaucgccguggggcugcugcucuacugcaaggcgcgcagcacgcccgugacccuguccaaggaccagcugagcggcaucaacaacaucgccuucuccaacugaggacuaguggaagcauuuuccuggcugauuaaaagaaauuacucagcuauggucaucuguuccuguuagaaggcuaugcagcauauuauauacuaugcgcauguuaugaaaugcauaauaaaaaauuuuaaaaaaucuaaaagaucuaaaaaaaaaaaaaaaaaaaaaaaaaaaaaaaaaaaaaaaaaaaaaaaaaaaaaaaaaaaaaaaaugcaucccccccccccccccccccccccccccccccaaaggcucuuuucagagccaccagaauu

SEQ ID NO: 423 - RNA, 2099 nt, Artificial Sequence
  mRNA product Design h-3 comprising derived and/or modified sequence from HRSV(A2)__F0 (opt2)
gggagacccgugacccggaaguuguacggcuacgcgacuuucccucccacaaacccucgcgcccuuccuuuccuacuugggcccggcagaaagcuuaccauggagcuccucauccucaaggccaacgccaucaccaccauccucaccgccgucaccuucugcuucgccuccggccagaacaucaccgaggaguucuaccaguccaccugcuccgccgucuccaagggcuaccucuccgcccuccgcaccggcugguacaccuccgucaucaccaucgagcucuccaacaucaaggagaacaagugcaacggcaccgacgccaaggucaagcucaucaagcaggagcucgacaaguacaagaacgccgucaccgagcuccagcuccucaugcaguccacccccgccaccaacaaccgcgcccgccgcgagcucccccgcuucaugaacuacacccucaacaacgccaagaagaccaacgucacccucuccaagaagcgcaagcgccgcuuccucggcuuccuccucggcgucggcuccgccaucgccuccggcgucgccgucuccaagguccuccaccucgagggcgaggucaacaagaucaaguccgcccuccucuccaccaacaaggccgucgucucccucuccaacggcgucuccguccucaccuccaagguccucgaccucaagaacuacaucgacaagcagcuccuccccaucgucaacaagcaguccugcuccaucuccaacaucgagaccgucaucgaguuccagcagaagaacaaccgccuccucgagaucacccgcgaguucuccgucaacgccggcgucaccacccccgucuccaccuacaugcucaccaacuccgagcuccucucccucaucaacgacaugcccaucaccaacgaccagaagaagcucauguccaacaacguccagaucguccgccagcaguccuacuccaucauguccaucaucaaggaggagguccucgccuacgucguccagcucccccucuacggcgucaucgacacccccugcuggaagcuccacaccuccccccucugcaccaccaacaccaaggagggcuccaacaucugccucacccgcaccgaccgcggcugguacugcgacaacgccggcuccgucuccuucuucccccaggccgagaccugcaagguccaguccaaccgcgucuucugcgacaccaugaacucccucacccuccccuccgaggucaaccucugcaacgucgacaucuucaaccccaaguacgacugcaagaucaugaccuccaagaccgacgucuccuccuccgucaucaccucccucggcgccaucgucuccugcuacggcaagaccaagugcaccgccuccaacaagaaccgcggcaucaucaagaccuucuccaacggcugcgacuacgucuccaacaagggcgucgacaccgucuccgucggcaacacccucuacuacgucaacaagcaggagggcaagucccucuacgucaagggcgagcccaucaucaacuucuacgacccccucgucuuccccuccgacgaguucgacgccuccaucucccaggucaacgagaagaucaaccagucccucgccuucauccgcaaguccgacgagcuccuccacaacgucaacgccggcaaguccaccaccaacaucaugaucaccaccaucaucaucgucaucaucgucauccuccucucccucaucgccgucggccuccuccucuacugcaaggcccgcuccacccccgucacccucuccaaggaccagcucuccggcaucaacaacaucgccuucuccaacugaggacuaguggaagcauuuuccuggcugauuaaaagaaauuacucagcuauggucaucuguuccuguuagaaggcuaugcagcauauuauauacuaugcgcauguuaugaaaugcauaauaaaaaauuuuaaaaaaucuaaaagaucuaaaaaaaaaaaaaaaaaaaaaaaaaaaaaaaaaaaaaaaaaaaaaaaaaaaaaaaaaaaaaaaaugcaucccccccccccccccccccccccccccccccaaaggcucuuuucagagccaccagaauu

SEQ ID NO: 424 - RNA, 2099 nt, Artificial Sequence
  mRNA product Design h-3 comprising derived and/or modified sequence from HRSV(A2)__F0 (opt3)
gggagacccgugacccggaaguuguacggcuacgcgacuuucccucccacaaacccucgcgcccuuccuuuccuacuugggcccggcagaaagcuuaccauggagcugcucauccuuaaggccaacgcuauuaccacaauacugacugcagugacguucugcuuugccagcggccagaauaucaccgaagaguucuaccaauccacauguucugcggucucaaaaggguauuugagugcuuuaagaacuggaugguacaccagcguuauuacaaucgaacuguccaacauuaaggagaauaaaugcaacgguaccgacgccaaggugaaacuaaucaagcaggaacucgauaaguauaaaaaugcaguaacugagcugcagcuucugaugcagucuacacccgccaccaacaauagggcucggcgcgaguugccucgauuuaugaacuacacgcucaauaacgcaaagaaaacuaaugugacccugucgaagaaacguaagagaagguuccugggcuuucucuuaggggucggaucagccauagcuagcggcguggccguuaguaaggugcugcaccuugaaggugaggucaacaaaaucaaguccgcguugcugucuacaaauaaagcagugguaagccuauccaacgggguuucagugcucacuucuaagguccuggaccuuaaaaauuauauugauaagcaacuguugccaaucgugaacaaacagagcuguucuauuuccaacaucgaaaccgugauagaguuccagcagaagaauaaccggcuccuggagauuacacgcgaauuuucagucaaugccggaguuaccacgccggugagcacuuacauguuaacaaacagugagcugcucucucuuaucaaugacaugcccauuaccaacgaucaaaagaaacugauguccaauaacguacagaucgugagacagcagagcuauucgaucaugucuauuauaaaggaagaggucuuggcuuacgugguucaacuaccucuguacggcgugaucgacacuccaugcuggaaacuccauacauccccacuguguaccacgaauaccaaggaaggcucaaacauuugccuuacaaggacugaucgggggugguauugugacaaugccggaagugucagcuucuuuccucaggcagagaccugcaaagugcaguccaaccgcguauucugugauacaaugaauagucugacuuugccaagcgagguuaaccucugcaauguggacaucuuuaaccccaaguacgauuguaagauaaugaccucaaaaacagacgucaguuccagcgugauuaccucucugggugcuaucgucucaugcuauggcaagacuaaaugcacggccaguaacaagaaucgagggaucauuaaaacauucagcaacggaugugauuacguguccaauaagggcguugacaccgugucuguagguaacacuuuauauuacgucaauaagcaagaagggaaaucgcuguaugugaagggagagccuaucauuaacuuuuacgacccccuaguuuucccgagcgaugaauuugacgcguccauaucacaggugaaugagaaaaucaaccagagucucgccuucauuagaaagucugaugaacugcuucacaaugucaacgcaggcaaaagcaccacaaauaucaugaucaccacuauuauaaucgugauuaucguaauuuugcugucccucaucgcugugggccugcuucuguacugcaaggccaggucaacacccguuacguugagcaaggaccagcucucugggauaaacaauaucgcuuucuccaacugaggacuaguggaagcauuuuccuggcugauuaaaagaaauuacucagcuauggucaucuguuccuguuagaaggcuaugcagcauauuauauacuaugcgcauguuaugaaaugcauaauaaaaaauuuuaaaaaaucuaaaagaucuaaaaaaaaaaaaaaaaaaaaaaaaaaaaaaaaaaaaaaaaaaaaaaaaaaaaaaaaaaaaaaaaugcaucccccccccccccccccccccccccccccccaaaggcucuuuucagagccaccagaauu

SEQ ID NO: 425 - RNA, 2099 nt, Artificial Sequence
  mRNA product Design h-3 comprising derived and/or modified sequence from HRSV(A2)__F0 (opt4)
gggagacccgugacccggaaguuguacggcuacgcgacuuucccucccacaaacccucgcgcccuuccuuuccuacuugggcccggcagaaagcuuaccauggagcugcugauccugaaggccaacgccaucaccaccauccugaccgccgugaccuucugcuucgccagcggccagaacaucaccgaggaguucuaccagagcaccugcagcgccgugagcaagggcuaccugagcgcccugagaaccggcugguacaccagcgugaucaccaucgagcugagcaacaucaaggagaacaagugcaacggcaccgacgccaaggugaagcugaucaagcaggagcuggacaaguacaagaacgccgugaccgagcugcagcugcugaugcagagcacccccgccaccaacaacagagccagaagagagcugcccagauucaugaacuacacccugaacaacgccaagaagaccaacgugacccugagcaagaagagaaagagaagauuccugggcuuccugcugggcgugggcagcgccaucgccagcggcguggccgugagcaaggugcugcaccuggagggcgaggugaacaagaucaagagcgcccugcugagcaccaacaaggccguggugagccugagcaacggcgugagcgugcugaccagcaaggugcuggaccugaagaacuacaucgacaagcagcugcugcccaucgugaacaagcagagcugcagcaucagcaacaucgagaccgugaucgaguuccagcagaagaacaacagacugcuggagaucaccagagaguucagcgugaacgccggcgugaccacccccgugagcaccuacaugcugaccaacagcgagcugcugagccugaucaacgacaugcccaucaccaacgaccagaagaagcugaugagcaacaacgugcagaucgugagacagcagagcuacagcaucaugagcaucaucaaggaggaggugcuggccuacguggugcagcugccccuguacggcgugaucgacacccccugcuggaagcugcacaccagcccccugugcaccaccaacaccaaggagggcagcaacaucugccugaccagaaccgacagaggcugguacugcgacaacgccggcagcgugagcuucuucccccaggccgagaccugcaaggugcagagcaacagaguguucugcgacaccaugaacagccugacccugcccagcgaggugaaccugugcaacguggacaucuucaaccccaaguacgacugcaagaucaugaccagcaagaccgacgugagcagcagcgugaucaccagccugggcgccaucgugagcugcuacggcaagaccaagugcaccgccagcaacaagaacagaggcaucaucaagaccuucagcaacggcugcgacuacgugagcaacaagggcguggacaccgugagcgugggcaacacccuguacuacgugaacaagcaggagggcaagagccuguacgugaagggcgagcccaucaucaacuucuacgacccccugguguuccccagcgacgaguucgacgccagcaucagccaggugaacgagaagaucaaccagagccuggccuucaucagaaagagcgacgagcugcugcacaacgugaacgccggcaagagcaccaccaacaucaugaucaccaccaucaucaucgugaucaucgugauccugcugagccugaucgccgugggccugcugcuguacugcaaggccagaagcacccccgugacccugagcaaggaccagcugagcggcaucaacaacaucgccuucagcaacugaggacuaguggaagcauuuuccuggcugauuaaaagaaauuacucagcuauggucaucuguuccuguuagaaggcuaugcagcauauuauauacuaugcgcauguuaugaaaugcauaauaaaaaauuuuaaaaaaucuaaaagaucuaaaaaaaaaaaaaaaaaaaaaaaaaaaaaaaaaaaaaaaaaaaaaaaaaaaaaaaaaaaaaaaaugcaucccccccccccccccccccccccccccccccaaaggcucuuuucagagccaccagaauu

SEQ ID NO: 426 - RNA, 2099 nt, Artificial Sequence
  mRNA product Design h-3 comprising derived and/or modified sequence from HRSV(A2)__F0 (opt5)
gggagacccgugacccggaaguuguacggcuacgcgacuuucccucccacaaacccucgcgcccuuccuuuccuacuugggcccggcagaaagcuuaccauggagcugcucauccugaaggccaacgcuauuaccacaauccuuacggccgugaccuucugcuuugcgagcggccagaauauuacagaagaguucuaccaauccaccuguucugcugucagcaaaggguaucuguccgcccucagaacaggaugguacaccucuguuaucacaauugaacugagcaacaucaaggagaauaaaugcaacggcaccgacgccaaggugaaacuuaucaagcaggaacuggauaaguauaaaaaugcugugacggagcuccagcugcugaugcaguccacccccgccacaaacaaucgggcucgcagagagcucccucgguuuaugaacuacacccugaauaacgccaagaaaacaaaugucacccuuucuaagaaacgcaagagacgguuccugggguuucuccugggagugggcagcgcgauugccuccgggguugcugugagcaagguccuucaccuggaaggagaggugaacaaaaucaagucugcccuccuguccacgaauaaagcuguugugagccugucuaacggcgucuccgugcucacaagcaaggugcuggaccuuaaaaauuauauugauaagcaacugcucccgaucgucaacaaacagucuuguuccauuagcaacaucgaaaccguuauugaguuccagcagaagaauaaccgccugcuugagaucacaagagaauuuuccgugaaugccggcgugaccacccccgucucuacauacaugcugacgaacagcgagcuccugucccugaucaaugacaugccuauuaccaacgaucaaaagaaacucaugagcaauaacgugcagaucguucggcagcagucuuauuccauuaugagcaucauuaaggaagaggugcuggcguacgucgugcaacuuccccuguacgggguuaucgacacaccuugcuggaaacuccauaccucuccccuguguacaaccaauacgaaggaaggaagcaacaucugccuuacacgcaccgauagaggcugguauugugacaaugccggguccgugucuuucuuuccucaggcugagaccugcaaaguccagagcaaccggguguucugugauacaaugaacucccugacccucccgagcgaggucaaucugugcaauguggacauuuuuaaccccaaguacgauuguaagaucaugacaucuaaaacggacguuuccagcucugugauuaccucccugggagccaucgucagcugcuauggcaagacaaaaugcaccgcuuccaacaagaaucgcgggauuaucaaaacauucucuaacggaugugauuacgugagcaauaagggcguugacaccguguccgucggcaacacgcucuauuacgugaauaagcaagaagggaaaucucuguaugugaagggagagccuaucauuaacuuuuacgacccccuuguuuucccuagcgaugaauuugacgccuccaucagccaggucaaugagaaaauuaaccagucucuggccuucaucagaaaguccgaugaacuccugcacaaugugaacgcuggcaaaagcaccacaaauauuaugaucaccacaauuaucaucgugauuaucgucauucugcuuucucucaucgcgguggggcugcugcucuacugcaaggcccgguccacccccguuacgcugagcaaggaccagcuuucuggaauuaacaauaucgcuuucagcaacugaggacuaguggaagcauuuuccuggcugauuaaaagaaauuacucagcuauggucaucuguuccuguuagaaggcuaugcagcauauuauauacuaugcgcauguuaugaaaugcauaauaaaaaauuuuaaaaaaucuaaaagaucuaaaaaaaaaaaaaaaaaaaaaaaaaaaaaaaaaaaaaaaaaaaaaaaaaaaaaaaaaaaaaaaaugcaucccccccccccccccccccccccccccccccaaaggcucuuuucagagccaccagaauu

SEQ ID NO: 427 - RNA, 2099 nt, Artificial Sequence
  mRNA product Design h-3 comprising derived and/or modified sequence from HRSV(A2)__F0 (opt6)
gggagacccgugacccggaaguuguacggcuacgcgacuuucccucccacaaacccucgcgcccuuccuuuccuacuugggcccggcagaaagcuuaccauggaacuucuaauauuaaaagcuaacgcaaucacuacuaucuuaaccgcaguaacauucuguuuugcauccggccaaaacauaacagaagaauuuuaccaaucaacuugcucugcagucucaaaagguuaucuaucugcauuaagaacaggcugguacaccucaguaauaacgaucgaacuaucaaacaucaaagaaaacaaauguaauggaacagacgcaaaaguaaaacuaaucaaacaagaacuagacaaauacaaaaacgcaguaaccgaacuccaacuccucaugcaaaguacaccagcaacaaauaacagagcaagacgugaacuaccacguuuuaugaauuacacgcucaauaacgcaaaaaaaacaaauguuacccuaucaaaaaaacgaaaaagaagauuccucggauuccuacuaggcguaggcucagcaauagcuucaggaguagcaguaucaaaaguacuccaccucgaaggagaaguaaacaaaaucaaaagcgcucuccucucaacaaacaaagcaguuguuucacucucaaacggaguaucaguacuaaccucaaaaguacuugaccuaaaaaauuauauagacaaacaacuauuaccaauaguaaacaaacaaagcugcuccaucuccaacaucgagacagucauagaauuucaacaaaaaaauaaccgccuauuagaaauaaccagagaauuuucaguaaacgcaggaguaacuaccccaguaucaacauauauguuaacaaacucagaacuccuaagucuaaucaacgacaugccaauaaccaacgaccaaaaaaaacuaaugagcaacaauguacaaauaguucgucaacaaucuuacuccauaaugucuauaauaaaagaagaaguacucgccuauguaguccaacuaccacuauacggagucaucgauacaccaugcuggaaacuccacacauccccacucuguacuacuaacaccaaagaagguucaaauauaugccuaaccagaacagauagagguugguacugcgauaaugcaggaucaguauccuuuuucccccaagccgaaacaugcaaaguucaauccaauagaguauuuugugauacaaugaacucuuuaacccucccauccgaagucaaucuauguaacgucgacauauuuaacccaaaauacgauugcaaaauaaugacaucaaaaacagacgucucauccucaguuauaacguccuuaggcgcuauaguaucaugcuacggcaaaacaaaauguacagcaucaaacaaaaacagaggaaucauaaaaacuuucucuaacgguugcgacuauguauccaacaaaggugucgacacaguauccguaggcaacacccuuuacuauguuaauaaacaagaaggaaaaucucuauauguaaaaggcgaaccaauuauaaauuuuuacgacccccuugucuuucccucugacgaauuugacgcuuccauaucacaagucaacgaaaaaaucaaccaaucccucgcauucauacgcaaaucagacgaacuacuacauaacgucaacgcaggcaaauccacaacaaacauaaugauaaccacaaucauaauuguaauaauaguaauacuacuuucucuaauagcagucggauuacucuuauacuguaaagcucgaucaacaccagucacccucucuaaagaucaacuauccggaaucaacaacauagcuuucucaaacuaaggacuaguggaagcauuuuccuggcugauuaaaagaaauuacucagcuauggucaucuguuccuguuagaaggcuaugcagcauauuauauacuaugcgcauguuaugaaaugcauaauaaaaaauuuuaaaaaaucuaaaagaucuaaaaaaaaaaaaaaaaaaaaaaaaaaaaaaaaaaaaaaaaaaaaaaaaaaaaaaaaaaaaaaaaugcaucccccccccccccccccccccccccccccccaaaggcucuuuucagagccaccagaauu

SEQ ID NO: 428 - RNA, 2099 nt, Artificial Sequence
  mRNA product Design h-3 comprising derived and/or modified sequence from HRSV(A2)__F0 (opt11)
gggagacccgugacccggaaguuguacggcuacgcgacuuucccucccacaaacccucgcgcccuuccuuuccuacuugggcccggcagaaagcuuaccauggaacuccucauacucaaagccaacgcaaucacaaccauacucaccgccgucaccuucugcuuugcaucuggccagaacaucacugaagaguucuaccaauccacaugcuccgccguaagcaaaggcuaccuauccgcccuacgcaccggcugguacaccagcguaaucaccauagaacucuccaauauaaaagaaaacaaaugcaacggcaccgacgcaaaagucaagcuaauaaaacaagaacucgacaaauacaaaaacgccguuaccgaacuccagcuacucaugcaaucgaccccagcaaccaacaaccgugcgagacgcgaacucccccgcuucaugaacuacacccuaaacaacgccaaaaagaccaacguaacucuauccaagaaacgcaaacgccgcuuccucggauuccuccucggcgucggcuccgcaaucgccagcggcgucgccguuagcaaaguccuucaccucgaaggagaaguaaacaaaauuaaaagcgcccucuuauccacaaacaaggccguaguaucccugucaaacggcgucuccguccuuacauccaaaguccucgaccucaagaacuacauagacaaacagcuacuacccauuguaaauaaacaaagcugcucaauuagcaacaucgaaaccguaaucgaguuccagcagaaaaacaacagacuucucgaaaucacccgcgaguucagcgucaacgccggcguaaccaccccugucucaacauacaugcuaaccaacagcgaacugcucucccucaucaacgacaugcccaucaccaacgaccaaaagaaacucaugagcaacaacguacaaaucgugcgccaacaguccuacucaauaaugucaaucaucaaagaagaagugcuagcauacgucguacaacuaccacucuacggcguaauagauacccccugcuggaagcuccauaccuccccacucuguaccaccaacaccaaagaaggcucaaacaucugccuaacgcgcacagaccguggaugguacugugacaacgccggcuccgucuccuucuucccucaagccgaaacaugcaaaguccaauccaacagagucuucugcgauaccaugaacucccugacacucccaagcgaagucaaccuuugcaacgucgauaucuuuaaccccaaauacgacugcaagaucaugacaucaaaaaccgacguauccuccucuguaauaaccucccuaggcgcaaucguaucaugcuacggcaaaaccaaauguaccgccuccaacaaaaaucgcggcaucaucaaaaccuucucgaacggcugcgacuacgucuccaacaaaggcguagacacaguuuccguaggcaacacccucuacuacgucaauaaacaggaaggcaagucccucuacgucaaaggcgaacccaucaucaauuucuacgacccccucguuuuccccuccgaugaguucgacgcaagcaucagccaggucaacgaaaagauaaaccagucccucgccuucauccgcaaaucagaugaacuccuucacaacguuaacgcaggcaagagcaccaccaacaucaugaucacaacuauaaucaucgucauaaucgucauccuacucucacuaaucgccgucggucuccuacuauauuguaaagcccgaucaacaccggucacacucuccaaagaccaacucuccggaaucaacaauaucgcuuucucgaacuaaggacuaguggaagcauuuuccuggcugauuaaaagaaauuacucagcuauggucaucuguuccuguuagaaggcuaugcagcauauuauauacuaugcgcauguuaugaaaugcauaauaaaaaauuuuaaaaaaucuaaaagaucuaaaaaaaaaaaaaaaaaaaaaaaaaaaaaaaaaaaaaaaaaaaaaaaaaaaaaaaaaaaaaaaaugcaucccccccccccccccccccccccccccccccaaaggcucuuuucagagccaccagaauu

SEQ ID NO: 429 - RNA, 2162 nt, Artificial Sequence
  mRNA product Design h-4 comprising derived and/or modified sequence from HRSV(A2)__F0 (artificial)
gggagagggcgcuuggcuugcaaggacccugagcugcggcauugaagcacacccaacccaacucgacugaagucagccucacugaaccggaucugagaaucuucucucucugggcuugccagggcucuccgaaccuagcuagcauccucuucaauuccaacuagaaagcuuaccauggaguugcuaauccucaaagcaaaugcaauuaccacaauccucacugcagucacauuuuguuuugcuucuggucaaaacaucacugaagaauuuuaucaaucaacaugcagugcaguuagcaaaggcuaucuuagugcucugagaacugguugguauaccaguguuauaacuauagaauuaaguaauaucaaggaaaauaaguguaauggaacagaugcuaagguaaaauugauaaaacaagaauuagauaaauauaaaaaugcuguaacagaauugcaguugcucaugcaaagcacaccagcaacaaacaaucgagccagaagagaacuaccaagguuuaugaauuauacacucaacaaugccaaaaaaaccaauguaacauuaagcaagaaaaggaaaagaagauuucuugguuuuuuguuagguguuggaucugcaaucgccaguggcguugcuguaucuaagguccugcaccuagaaggggaagugaacaagaucaaaagugcucuacuauccacaaacaaggcuguagucagcuuaucaaauggaguuagugucuuaaccagcaaaguguuagaccucaaaaacuauauagauaaacaauuguuaccuauugugaacaagcaaagcugcagcauaucaaauauagaaacugugauagaguuccaacaaaagaacaacagacuacuagagauuaccagggaauuuaguguuaaugcagguguaacuacaccuguaagcacuuacauguuaacuaauagugaauuauugucauuaaucaaugauaugccuauaacaaaugaucagaaaaaguuaauguccaacaauguucaaauaguuagacagcaaaguuacucuaucauguccauaauaaaagaggaagucuuagcauauguaguacaauuaccacuauaugguguuauagauacacccuguuggaaacuacacacauccccucuauguacaaccaacacaaaagaaggguccaacaucuguuuaacaagaacugacagaggaugguacugugacaaugcaggaucaguaucuuucuucccacaagcugaaacauguaaaguucaaucaaaucgaguauuuugugacacaaugaacaguuuaacauuaccaagugaaguaaaucucugcaauguugacauauucaaccccaaauaugauuguaaaauuaugacuucaaaaacagauguaagcagcuccguuaucacaucucuaggagccauugugucaugcuauggcaaaacuaaauguacagcauccaauaaaaaucguggaaucauaaagacauuuucuaacgggugcgauuauguaucaaauaaagggguggacacugugucuguagguaacacauuauauuauguaaauaagcaagaagguaaaagucucuauguaaaaggugaaccaauaauaaauuucuaugacccauuaguauuccccucugaugaauuugaugcaucaauaucucaagucaacgagaagauuaaccagagccuagcauuuauucguaaauccgaugaauuauuacauaauguaaaugcugguaaauccaccacaaauaucaugauaacuacuauaauuauagugauuauaguaauauuguuaucauuaauugcuguuggacugcucuuauacuguaaggccagaagcacaccagucacacuaagcaaagaucaacugagugguauaaauaauauugcauuuaguaacuaaggacuaguaauaaggaaacuguaugaaugucugugggcaggaagugaagagauccuucuguaaagguuuuuggaauuaugucugcugaauaauaaacuuuuuugaaauaauaaaucugguagaaaaaugagaucuaaaaaaaaaaaaaaaaaaaaaaaaaaaaaaaaaaaaaaaaaaaaaaaaaaaaaaaaaaaaaaaaugcaucccccccccccccccccccccccccccccccaaaggcucuuuucagagccaccagaauu

SEQ ID NO: 430 - RNA, 2162 nt, Artificial Sequence
  mRNA product Design h-4 comprising derived and/or modified sequence from HRSV(A2)__F0 (opt1)
gggagagggcgcuuggcuugcaaggacccugagcugcggcauugaagcacacccaacccaacucgacugaagucagccucacugaaccggaucugagaaucuucucucucugggcuugccagggcucuccgaaccuagcuagcauccucuucaauuccaacuagaaagcuuaccauggagcugcucauccugaaggccaacgccaucaccaccauccugacggcggugaccuucugcuucgccagcggccagaacaucaccgaggaguucuaccaguccaccugcagcgccgucuccaagggguaccucagcgcccugcggacgggcugguacaccuccgugaucaccaucgagcugagcaacaucaaggagaacaagugcaacgggaccgacgccaaggugaagcucaucaagcaggagcuggacaaguacaagaacgcggucacggagcugcagcuccugaugcaguccaccccggcaaccaacaaccgcgcccggcgcgagcugccccgguucaugaacuacacccucaacaacgccaagaagacgaacgugacccugagcaagaagcgcaagcggcgcuuccugggcuuccuccugggggugggcuccgccaucgcgagcggcgucgccguguccaaggugcugcaccucgagggggaggucaacaagaucaagagcgcccugcuguccaccaacaaggccguggugagccucuccaacggcgucagcgugcugaccuccaaggugcuggaccucaagaacuacaucgacaagcagcugcugcccaucgucaacaagcagagcugcuccaucagcaacaucgagacggugaucgaguuccagcagaagaacaaccggcuccuggagaucacccgcgaguucagcgugaacgccggggucaccacccccguguccacguacaugcugaccaacagcgagcuccugucccugaucaacgacaugccgaucaccaacgaccagaagaagcucaugagcaacaacgugcagaucguccggcagcaguccuacagcaucauguccaucaucaaggaggaggugcuggcguacgugguccagcugccccucuacggcgugaucgacacccccugcuggaagcugcacacgagcccccugugcaccaccaacaccaaggagggguccaacaucugccucacgcgcaccgaccggggcugguacugcgacaacgccggcagcgucuccuucuucccgcaggccgagaccugcaaggugcagagcaaccgcguguucugcgacaccaugaacucccugacgcugcccagcgagguaaaccucugcaacgucgacaucuucaaccccaaguacgacugcaagaucaugaccuccaagaccgacgugagcuccagcgugaucaccucccugggggccaucgucagcugcuacggcaagacgaagugcaccgccagcaacaagaaccgggggaucaucaagaccuucuccaacggcugcgacuacgugagcaacaagggcguggacaccguguccgucgggaacacccuguacuacgugaacaagcaggagggcaagagccucuacgugaagggggagcccaucaucaacuucuacgacccgcuggucuuccccuccgacgaguucgacgcgagcaucucccaggugaacgagaagaucaaccagagccuggccuucauccgcaaguccgacgagcugcuccacaacgugaacgccggcaagagcacgaccaacaucaugaucaccaccaucaucaucgucaucaucgugauccugcugucccucaucgccguggggcugcugcucuacugcaaggcccggagcacgcccgucacccuguccaaggaccagcugagcggcaucaacaacaucgcguucuccaacugaggacuaguaauaaggaaacuguaugaaugucugugggcaggaagugaagagauccuucuguaaagguuuuuggaauuaugucugcugaauaauaaacuuuuuugaaauaauaaaucugguagaaaaaugagaucuaaaaaaaaaaaaaaaaaaaaaaaaaaaaaaaaaaaaaaaaaaaaaaaaaaaaaaaaaaaaaaaaugcaucccccccccccccccccccccccccccccccaaaggcucuuuucagagccaccagaauu

SEQ ID NO: 431 - RNA, 2162 nt, Artificial Sequence
  mRNA product Design h-4 comprising derived and/or modified sequence from HRSV(A2)__F0 (opt1)
gggagagggcgcuuggcuugcaaggacccugagcugcggcauugaagcacacccaacccaacucgacugaagucagccucacugaaccggaucugagaaucuucucucucugggcuugccagggcucuccgaaccuagcuagcauccucuucaauuccaacuagaaagcuuaccauggagcugcucauccugaaggccaacgccaucaccaccauccugacggcggugaccuucugcuucgccagcggccagaacaucaccgaggaguucuaccaguccacgugcagcgccgucuccaagggguaccucagcgcccugcgcaccggcugguacaccuccgugaucaccaucgagcugagcaacaucaaggagaacaagugcaacgggaccgacgccaaggugaagcucaucaagcaggagcuggacaaguacaagaacgcggucacggagcugcagcuccugaugcaguccacccccgccaccaacaaccgggcccgccgggagcugccgcgcuucaugaacuacacccucaacaacgccaagaagacgaacgugacccugagcaagaagcggaagcgccgguuccugggcuuccuccugggggugggcuccgcgaucgccagcggcgucgccguguccaaggugcugcaccucgagggggaggucaacaagaucaagagcgcccugcuguccaccaacaaggccguggugagccucuccaacggcgucagcgugcugaccuccaaggugcuggaccucaagaacuacaucgacaagcagcugcugcccaucgucaacaagcagagcugcuccaucagcaacaucgagacggugaucgaguuccagcagaagaacaaccgccuccuggagaucacccgggaguucagcgugaacgcgggggucaccacccccguguccacguacaugcugaccaacagcgagcuccugucccugaucaacgacaugcccaucaccaacgaccagaagaagcucaugagcaacaacgugcagaucguccgccagcaguccuacagcaucauguccaucaucaaggaggaggugcuggccuacgugguccagcugccgcucuacggcgugaucgacacccccugcuggaagcugcacacgagcccccugugcaccaccaacaccaaggagggguccaacaucugccucacgcggaccgaccgcggcugguacugcgacaacgccggcagcgucuccuucuucccccaggccgagaccugcaaggugcagagcaaccggguguucugcgacaccaugaacucccugacgcugccgagcgaggucaaccucugcaacguggacaucuucaaccccaaguacgacugcaagaucaugaccuccaagaccgacgugagcuccagcgucaucaccucccugggggccaucgugagcugcuacggcaagacgaagugcaccgcgagcaacaagaaccgcgggaucaucaagaccuucuccaacggcugcgacuacgugagcaacaagggcgucgacaccguguccguggggaacacccuguacuacgucaacaagcaggagggcaagagccucuacgugaagggggagcccaucaucaacuucuacgacccccugguguucccguccgacgaguucgacgccagcaucucccaggucaacgagaagaucaaccagagccuggccuucauccggaaguccgacgagcuccugcacaacgugaacgccggcaagagcacgaccaacaucaugaucaccaccaucaucaucgugaucaucgucauccugcugucccucaucgccguggggcugcugcucuacugcaaggcgcgcagcacgcccgugacccuguccaaggaccagcugagcggcaucaacaacaucgccuucuccaacugaggacuaguaauaaggaaacuguaugaaugucugugggcaggaagugaagagauccuucuguaaagguuuuuggaauuaugucugcugaauaauaaacuuuuuugaaauaauaaaucugguagaaaaaugagaucuaaaaaaaaaaaaaaaaaaaaaaaaaaaaaaaaaaaaaaaaaaaaaaaaaaaaaaaaaaaaaaaaugcaucccccccccccccccccccccccccccccccaaaggcucuuuucagagccaccagaauu

SEQ ID NO: 432 - RNA, 2162 nt, Artificial Sequence
  mRNA product Design h-4 comprising derived and/or modified sequence from HRSV(A2)__F0 (opt2)
gggagagggcgcuuggcuugcaaggacccugagcugcggcauugaagcacacccaacccaacucgacugaagucagccucacugaaccggaucugagaaucuucucucucugggcuugccagggcucuccgaaccuagcuagcauccucuucaauuccaacuagaaagcuuaccauggagcuccucauccucaaggccaacgccaucaccaccauccucaccgccgucaccuucugcuucgccuccggccagaacaucaccgaggaguucuaccaguccaccugcuccgccgucuccaagggcuaccucuccgcccuccgcaccggcugguacaccuccgucaucaccaucgagcucuccaacaucaaggagaacaagugcaacggcaccgacgccaaggucaagcucaucaagcaggagcucgacaaguacaagaacgccgucaccgagcuccagcuccucaugcaguccacccccgccaccaacaaccgcgcccgccgcgagcucccccgcuucaugaacuacacccucaacaacgccaagaagaccaacgucacccucuccaagaagcgcaagcgccgcuuccucggcuuccuccucggcgucggcuccgccaucgccuccggcgucgccgucuccaagguccuccaccucgagggcgaggucaacaagaucaaguccgcccuccucuccaccaacaaggccgucgucucccucuccaacggcgucuccguccucaccuccaagguccucgaccucaagaacuacaucgacaagcagcuccuccccaucgucaacaagcaguccugcuccaucuccaacaucgagaccgucaucgaguuccagcagaagaacaaccgccuccucgagaucacccgcgaguucuccgucaacgccggcgucaccacccccgucuccaccuacaugcucaccaacuccgagcuccucucccucaucaacgacaugcccaucaccaacgaccagaagaagcucauguccaacaacguccagaucguccgccagcaguccuacuccaucauguccaucaucaaggaggagguccucgccuacgucguccagcucccccucuacggcgucaucgacacccccugcuggaagcuccacaccuccccccucugcaccaccaacaccaaggagggcuccaacaucugccucacccgcaccgaccgcggcugguacugcgacaacgccggcuccgucuccuucuucccccaggccgagaccugcaagguccaguccaaccgcgucuucugcgacaccaugaacucccucacccuccccuccgaggucaaccucugcaacgucgacaucuucaaccccaaguacgacugcaagaucaugaccuccaagaccgacgucuccuccuccgucaucaccucccucggcgccaucgucuccugcuacggcaagaccaagugcaccgccuccaacaagaaccgcggcaucaucaagaccuucuccaacggcugcgacuacgucuccaacaagggcgucgacaccgucuccgucggcaacacccucuacuacgucaacaagcaggagggcaagucccucuacgucaagggcgagcccaucaucaacuucuacgacccccucgucuuccccuccgacgaguucgacgccuccaucucccaggucaacgagaagaucaaccagucccucgccuucauccgcaaguccgacgagcuccuccacaacgucaacgccggcaaguccaccaccaacaucaugaucaccaccaucaucaucgucaucaucgucauccuccucucccucaucgccgucggccuccuccucuacugcaaggcccgcuccacccccgucacccucuccaaggaccagcucuccggcaucaacaacaucgccuucuccaacugaggacuaguaauaaggaaacuguaugaaugucugugggcaggaagugaagagauccuucuguaaagguuuuuggaauuaugucugcugaauaauaaacuuuuuugaaauaauaaaucugguagaaaaaugagaucuaaaaaaaaaaaaaaaaaaaaaaaaaaaaaaaaaaaaaaaaaaaaaaaaaaaaaaaaaaaaaaaaugcaucccccccccccccccccccccccccccccccaaaggcucuuuucagagccaccagaauu

SEQ ID NO: 433 - RNA, 2162 nt, Artificial Sequence
  mRNA product Design h-4 comprising derived and/or modified sequence from HRSV(A2)__F0 (opt3)
gggagagggcgcuuggcuugcaaggacccugagcugcggcauugaagcacacccaacccaacucgacugaagucagccucacugaaccggaucugagaaucuucucucucugggcuugccagggcucuccgaaccuagcuagcauccucuucaauuccaacuagaaagcuuaccauggagcugcucauccuuaaggccaacgcuauuaccacaauacugacugcagugacguucugcuuugccagcggccagaauaucaccgaagaguucuaccaauccacauguucugcggucucaaaaggguauuugagugcuuuaagaacuggaugguacaccagcguuauuacaaucgaacuguccaacauuaaggagaauaaaugcaacgguaccgacgccaaggugaaacuaaucaagcaggaacucgauaaguauaaaaaugcaguaacugagcugcagcuucugaugcagucuacacccgccaccaacaauagggcucggcgcgaguugccucgauuuaugaacuacacgcucaauaacgcaaagaaaacuaaugugacccugucgaagaaacguaagagaagguuccugggcuuucucuuaggggucggaucagccauagcuagcggcguggccguuaguaaggugcugcaccuugaaggugaggucaacaaaaucaaguccgcguugcugucuacaaauaaagcagugguaagccuauccaacgggguuucagugcucacuucuaagguccuggaccuuaaaaauuauauugauaagcaacuguugccaaucgugaacaaacagagcuguucuauuuccaacaucgaaaccgugauagaguuccagcagaagaauaaccggcuccuggagauuacacgcgaauuuucagucaaugccggaguuaccacgccggugagcacuuacauguuaacaaacagugagcugcucucucuuaucaaugacaugcccauuaccaacgaucaaaagaaacugauguccaauaacguacagaucgugagacagcagagcuauucgaucaugucuauuauaaaggaagaggucuuggcuuacgugguucaacuaccucuguacggcgugaucgacacuccaugcuggaaacuccauacauccccacuguguaccacgaauaccaaggaaggcucaaacauuugccuuacaaggacugaucgggggugguauugugacaaugccggaagugucagcuucuuuccucaggcagagaccugcaaagugcaguccaaccgcguauucugugauacaaugaauagucugacuuugccaagcgagguuaaccucugcaauguggacaucuuuaaccccaaguacgauuguaagauaaugaccucaaaaacagacgucaguuccagcgugauuaccucucugggugcuaucgucucaugcuauggcaagacuaaaugcacggccaguaacaagaaucgagggaucauuaaaacauucagcaacggaugugauuacguguccaauaagggcguugacaccgugucuguagguaacacuuuauauuacgucaauaagcaagaagggaaaucgcuguaugugaagggagagccuaucauuaacuuuuacgacccccuaguuuucccgagcgaugaauuugacgcguccauaucacaggugaaugagaaaaucaaccagagucucgccuucauuagaaagucugaugaacugcuucacaaugucaacgcaggcaaaagcaccacaaauaucaugaucaccacuauuauaaucgugauuaucguaauuuugcugucccucaucgcugugggccugcuucuguacugcaaggccaggucaacacccguuacguugagcaaggaccagcucucugggauaaacaauaucgcuuucuccaacugaggacuaguaauaaggaaacuguaugaaugucugugggcaggaagugaagagauccuucuguaaagguuuuuggaauuaugucugcugaauaauaaacuuuuuugaaauaauaaaucugguagaaaaaugagaucuaaaaaaaaaaaaaaaaaaaaaaaaaaaaaaaaaaaaaaaaaaaaaaaaaaaaaaaaaaaaaaaaugcaucccccccccccccccccccccccccccccccaaaggcucuuuucagagccaccagaauu

SEQ ID NO: 434 - RNA, 2162 nt, Artificial Sequence
  mRNA product Design h-4 comprising derived and/or modified sequence from HRSV(A2)__F0 (opt4)
gggagagggcgcuuggcuugcaaggacccugagcugcggcauugaagcacacccaacccaacucgacugaagucagccucacugaaccggaucugagaaucuucucucucugggcuugccagggcucuccgaaccuagcuagcauccucuucaauuccaacuagaaagcuuaccauggagcugcugauccugaaggccaacgccaucaccaccauccugaccgccgugaccuucugcuucgccagcggccagaacaucaccgaggaguucuaccagagcaccugcagcgccgugagcaagggcuaccugagcgcccugagaaccggcugguacaccagcgugaucaccaucgagcugagcaacaucaaggagaacaagugcaacggcaccgacgccaaggugaagcugaucaagcaggagcuggacaaguacaagaacgccgugaccgagcugcagcugcugaugcagagcacccccgccaccaacaacagagccagaagagagcugcccagauucaugaacuacacccugaacaacgccaagaagaccaacgugacccugagcaagaagagaaagagaagauuccugggcuuccugcugggcgugggcagcgccaucgccagcggcguggccgugagcaaggugcugcaccuggagggcgaggugaacaagaucaagagcgcccugcugagcaccaacaaggccguggugagccugagcaacggcgugagcgugcugaccagcaaggugcuggaccugaagaacuacaucgacaagcagcugcugcccaucgugaacaagcagagcugcagcaucagcaacaucgagaccgugaucgaguuccagcagaagaacaacagacugcuggagaucaccagagaguucagcgugaacgccggcgugaccacccccgugagcaccuacaugcugaccaacagcgagcugcugagccugaucaacgacaugcccaucaccaacgaccagaagaagcugaugagcaacaacgugcagaucgugagacagcagagcuacagcaucaugagcaucaucaaggaggaggugcuggccuacguggugcagcugccccuguacggcgugaucgacacccccugcuggaagcugcacaccagcccccugugcaccaccaacaccaaggagggcagcaacaucugccugaccagaaccgacagaggcugguacugcgacaacgccggcagcgugagcuucuucccccaggccgagaccugcaaggugcagagcaacagaguguucugcgacaccaugaacagccugacccugcccagcgaggugaaccugugcaacguggacaucuucaaccccaaguacgacugcaagaucaugaccagcaagaccgacgugagcagcagcgugaucaccagccugggcgccaucgugagcugcuacggcaagaccaagugcaccgccagcaacaagaacagaggcaucaucaagaccuucagcaacggcugcgacuacgugagcaacaagggcguggacaccgugagcgugggcaacacccuguacuacgugaacaagcaggagggcaagagccuguacgugaagggcgagcccaucaucaacuucuacgacccccugguguuccccagcgacgaguucgacgccagcaucagccaggugaacgagaagaucaaccagagccuggccuucaucagaaagagcgacgagcugcugcacaacgugaacgccggcaagagcaccaccaacaucaugaucaccaccaucaucaucgugaucaucgugauccugcugagccugaucgccgugggccugcugcuguacugcaaggccagaagcacccccgugacccugagcaaggaccagcugagcggcaucaacaacaucgccuucagcaacugaggacuaguaauaaggaaacuguaugaaugucugugggcaggaagugaagagauccuucuguaaagguuuuuggaauuaugucugcugaauaauaaacuuuuuugaaauaauaaaucugguagaaaaaugagaucuaaaaaaaaaaaaaaaaaaaaaaaaaaaaaaaaaaaaaaaaaaaaaaaaaaaaaaaaaaaaaaaaugcaucccccccccccccccccccccccccccccccaaaggcucuuuucagagccaccagaauu

SEQ ID NO: 435 - RNA, 2162 nt, Artificial Sequence
  mRNA product Design h-4 comprising derived and/or modified sequence from HRSV(A2)__F0 (opt5)
gggagagggcgcuuggcuugcaaggacccugagcugcggcauugaagcacacccaacccaacucgacugaagucagccucacugaaccggaucugagaaucuucucucucugggcuugccagggcucuccgaaccuagcuagcauccucuucaauuccaacuagaaagcuuaccauggagcugcucauccugaaggccaacgcuauuaccacaauccuuacggccgugaccuucugcuuugcgagcggccagaauauuacagaagaguucuaccaauccaccuguucugcugucagcaaaggguaucuguccgcccucagaacaggaugguacaccucuguuaucacaauugaacugagcaacaucaaggagaauaaaugcaacggcaccgacgccaaggugaaacuuaucaagcaggaacuggauaaguauaaaaaugcugugacggagcuccagcugcugaugcaguccacccccgccacaaacaaucgggcucgcagagagcucccucgguuuaugaacuacacccugaauaacgccaagaaaacaaaugucacccuuucuaagaaacgcaagagacgguuccugggguuucuccugggagugggcagcgcgauugccuccgggguugcugugagcaagguccuucaccuggaaggagaggugaacaaaaucaagucugcccuccuguccacgaauaaagcuguugugagccugucuaacggcgucuccgugcucacaagcaaggugcuggaccuuaaaaauuauauugauaagcaacugcucccgaucgucaacaaacagucuuguuccauuagcaacaucgaaaccguuauugaguuccagcagaagaauaaccgccugcuugagaucacaagagaauuuuccgugaaugccggcgugaccacccccgucucuacauacaugcugacgaacagcgagcuccugucccugaucaaugacaugccuauuaccaacgaucaaaagaaacucaugagcaauaacgugcagaucguucggcagcagucuuauuccauuaugagcaucauuaaggaagaggugcuggcguacgucgugcaacuuccccuguacgggguuaucgacacaccuugcuggaaacuccauaccucuccccuguguacaaccaauacgaaggaaggaagcaacaucugccuuacacgcaccgauagaggcugguauugugacaaugccggguccgugucuuucuuuccucaggcugagaccugcaaaguccagagcaaccggguguucugugauacaaugaacucccugacccucccgagcgaggucaaucugugcaauguggacauuuuuaaccccaaguacgauuguaagaucaugacaucuaaaacggacguuuccagcucugugauuaccucccugggagccaucgucagcugcuauggcaagacaaaaugcaccgcuuccaacaagaaucgcgggauuaucaaaacauucucuaacggaugugauuacgugagcaauaagggcguugacaccguguccgucggcaacacgcucuauuacgugaauaagcaagaagggaaaucucuguaugugaagggagagccuaucauuaacuuuuacgacccccuuguuuucccuagcgaugaauuugacgccuccaucagccaggucaaugagaaaauuaaccagucucuggccuucaucagaaaguccgaugaacuccugcacaaugugaacgcuggcaaaagcaccacaaauauuaugaucaccacaauuaucaucgugauuaucgucauucugcuuucucucaucgcgguggggcugcugcucuacugcaaggcccgguccacccccguuacgcugagcaaggaccagcuuucuggaauuaacaauaucgcuuucagcaacugaggacuaguaauaaggaaacuguaugaaugucugugggcaggaagugaagagauccuucuguaaagguuuuuggaauuaugucugcugaauaauaaacuuuuuugaaauaauaaaucugguagaaaaaugagaucuaaaaaaaaaaaaaaaaaaaaaaaaaaaaaaaaaaaaaaaaaaaaaaaaaaaaaaaaaaaaaaaaugcaucccccccccccccccccccccccccccccccaaaggcucuuuucagagccaccagaauu

SEQ ID NO: 436 - RNA, 2162 nt, Artificial Sequence
  mRNA product Design h-4 comprising derived and/or modified sequence from HRSV(A2)__F0 (opt6)
gggagagggcgcuuggcuugcaaggacccugagcugcggcauugaagcacacccaacccaacucgacugaagucagccucacugaaccggaucugagaaucuucucucucugggcuugccagggcucuccgaaccuagcuagcauccucuucaauuccaacuagaaagcuuaccauggaacuucuaauauuaaaagcuaacgcaaucacuacuaucuuaaccgcaguaacauucuguuuugcauccggccaaaacauaacagaagaauuuuaccaaucaacuugcucugcagucucaaaagguuaucuaucugcauuaagaacaggcugguacaccucaguaauaacgaucgaacuaucaaacaucaaagaaaacaaauguaauggaacagacgcaaaaguaaaacuaaucaaacaagaacuagacaaauacaaaaacgcaguaaccgaacuccaacuccucaugcaaaguacaccagcaacaaauaacagagcaagacgugaacuaccacguuuuaugaauuacacgcucaauaacgcaaaaaaaacaaauguuacccuaucaaaaaaacgaaaaagaagauuccucggauuccuacuaggcguaggcucagcaauagcuucaggaguagcaguaucaaaaguacuccaccucgaaggagaaguaaacaaaaucaaaagcgcucuccucucaacaaacaaagcaguuguuucacucucaaacggaguaucaguacuaaccucaaaaguacuugaccuaaaaaauuauauagacaaacaacuauuaccaauaguaaacaaacaaagcugcuccaucuccaacaucgagacagucauagaauuucaacaaaaaaauaaccgccuauuagaaauaaccagagaauuuucaguaaacgcaggaguaacuaccccaguaucaacauauauguuaacaaacucagaacuccuaagucuaaucaacgacaugccaauaaccaacgaccaaaaaaaacuaaugagcaacaauguacaaauaguucgucaacaaucuuacuccauaaugucuauaauaaaagaagaaguacucgccuauguaguccaacuaccacuauacggagucaucgauacaccaugcuggaaacuccacacauccccacucuguacuacuaacaccaaagaagguucaaauauaugccuaaccagaacagauagagguugguacugcgauaaugcaggaucaguauccuuuuucccccaagccgaaacaugcaaaguucaauccaauagaguauuuugugauacaaugaacucuuuaacccucccauccgaagucaaucuauguaacgucgacauauuuaacccaaaauacgauugcaaaauaaugacaucaaaaacagacgucucauccucaguuauaacguccuuaggcgcuauaguaucaugcuacggcaaaacaaaauguacagcaucaaacaaaaacagaggaaucauaaaaacuuucucuaacgguugcgacuauguauccaacaaaggugucgacacaguauccguaggcaacacccuuuacuauguuaauaaacaagaaggaaaaucucuauauguaaaaggcgaaccaauuauaaauuuuuacgacccccuugucuuucccucugacgaauuugacgcuuccauaucacaagucaacgaaaaaaucaaccaaucccucgcauucauacgcaaaucagacgaacuacuacauaacgucaacgcaggcaaauccacaacaaacauaaugauaaccacaaucauaauuguaauaauaguaauacuacuuucucuaauagcagucggauuacucuuauacuguaaagcucgaucaacaccagucacccucucuaaagaucaacuauccggaaucaacaacauagcuuucucaaacuaaggacuaguaauaaggaaacuguaugaaugucugugggcaggaagugaagagauccuucuguaaagguuuuuggaauuaugucugcugaauaauaaacuuuuuugaaauaauaaaucugguagaaaaaugagaucuaaaaaaaaaaaaaaaaaaaaaaaaaaaaaaaaaaaaaaaaaaaaaaaaaaaaaaaaaaaaaaaaugcaucccccccccccccccccccccccccccccccaaaggcucuuuucagagccaccagaauu

SEQ ID NO: 437 - RNA, 2162 nt, Artificial Sequence
  mRNA product Design h-4 comprising derived and/or modified sequence from HRSV(A2)__F0 (opt11)
gggagagggcgcuuggcuugcaaggacccugagcugcggcauugaagcacacccaacccaacucgacugaagucagccucacugaaccggaucugagaaucuucucucucugggcuugccagggcucuccgaaccuagcuagcauccucuucaauuccaacuagaaagcuuaccauggaacuccucauacucaaagccaacgcaaucacaaccauacucaccgccgucaccuucugcuuugcaucuggccagaacaucacugaagaguucuaccaauccacaugcuccgccguaagcaaaggcuaccuauccgcccuacgcaccggcugguacaccagcguaaucaccauagaacucuccaauauaaaagaaaacaaaugcaacggcaccgacgcaaaagucaagcuaauaaaacaagaacucgacaaauacaaaaacgccguuaccgaacuccagcuacucaugcaaucgaccccagcaaccaacaaccgugcgagacgcgaacucccccgcuucaugaacuacacccuaaacaacgccaaaaagaccaacguaacucuauccaagaaacgcaaacgccgcuuccucggauuccuccucggcgucggcuccgcaaucgccagcggcgucgccguuagcaaaguccuucaccucgaaggagaaguaaacaaaauuaaaagcgcccucuuauccacaaacaaggccguaguaucccugucaaacggcgucuccguccuuacauccaaaguccucgaccucaagaacuacauagacaaacagcuacuacccauuguaaauaaacaaagcugcucaauuagcaacaucgaaaccguaaucgaguuccagcagaaaaacaacagacuucucgaaaucacccgcgaguucagcgucaacgccggcguaaccaccccugucucaacauacaugcuaaccaacagcgaacugcucucccucaucaacgacaugcccaucaccaacgaccaaaagaaacucaugagcaacaacguacaaaucgugcgccaacaguccuacucaauaaugucaaucaucaaagaagaagugcuagcauacgucguacaacuaccacucuacggcguaauagauacccccugcuggaagcuccauaccuccccacucuguaccaccaacaccaaagaaggcucaaacaucugccuaacgcgcacagaccguggaugguacugugacaacgccggcuccgucuccuucuucccucaagccgaaacaugcaaaguccaauccaacagagucuucugcgauaccaugaacucccugacacucccaagcgaagucaaccuuugcaacgucgauaucuuuaaccccaaauacgacugcaagaucaugacaucaaaaaccgacguauccuccucuguaauaaccucccuaggcgcaaucguaucaugcuacggcaaaaccaaauguaccgccuccaacaaaaaucgcggcaucaucaaaaccuucucgaacggcugcgacuacgucuccaacaaaggcguagacacaguuuccguaggcaacacccucuacuacgucaauaaacaggaaggcaagucccucuacgucaaaggcgaacccaucaucaauuucuacgacccccucguuuuccccuccgaugaguucgacgcaagcaucagccaggucaacgaaaagauaaaccagucccucgccuucauccgcaaaucagaugaacuccuucacaacguuaacgcaggcaagagcaccaccaacaucaugaucacaacuauaaucaucgucauaaucgucauccuacucucacuaaucgccgucggucuccuacuauauuguaaagcccgaucaacaccggucacacucuccaaagaccaacucuccggaaucaacaauaucgcuuucucgaacuaaggacuaguaauaaggaaacuguaugaaugucugugggcaggaagugaagagauccuucuguaaagguuuuuggaauuaugucugcugaauaauaaacuuuuuugaaauaauaaaucugguagaaaaaugagaucuaaaaaaaaaaaaaaaaaaaaaaaaaaaaaaaaaaaaaaaaaaaaaaaaaaaaaaaaaaaaaaaaugcaucccccccccccccccccccccccccccccccaaaggcucuuuucagagccaccagaauu

SEQ ID NO: 438 - RNA, 2178 nt, Artificial Sequence
  mRNA product Design h-5 comprising derived and/or modified sequence from HRSV(A2)__F0 (artificial)
gggagagggcgcuuggcuugcaaggacccugagcugcggcauugaagcacacccaacccaacucgacugaagucagccucacugaaccggaucugagaaucuucucucucugggcuugccagggcucuccgaaccuagcuagcauccucuucaauuccaacuagaaagcuuaccauggaguugcuaauccucaaagcaaaugcaauuaccacaauccucacugcagucacauuuuguuuugcuucuggucaaaacaucacugaagaauuuuaucaaucaacaugcagugcaguuagcaaaggcuaucuuagugcucugagaacugguugguauaccaguguuauaacuauagaauuaaguaauaucaaggaaaauaaguguaauggaacagaugcuaagguaaaauugauaaaacaagaauuagauaaauauaaaaaugcuguaacagaauugcaguugcucaugcaaagcacaccagcaacaaacaaucgagccagaagagaacuaccaagguuuaugaauuauacacucaacaaugccaaaaaaaccaauguaacauuaagcaagaaaaggaaaagaagauuucuugguuuuuuguuagguguuggaucugcaaucgccaguggcguugcuguaucuaagguccugcaccuagaaggggaagugaacaagaucaaaagugcucuacuauccacaaacaaggcuguagucagcuuaucaaauggaguuagugucuuaaccagcaaaguguuagaccucaaaaacuauauagauaaacaauuguuaccuauugugaacaagcaaagcugcagcauaucaaauauagaaacugugauagaguuccaacaaaagaacaacagacuacuagagauuaccagggaauuuaguguuaaugcagguguaacuacaccuguaagcacuuacauguuaacuaauagugaauuauugucauuaaucaaugauaugccuauaacaaaugaucagaaaaaguuaauguccaacaauguucaaauaguuagacagcaaaguuacucuaucauguccauaauaaaagaggaagucuuagcauauguaguacaauuaccacuauaugguguuauagauacacccuguuggaaacuacacacauccccucuauguacaaccaacacaaaagaaggguccaacaucuguuuaacaagaacugacagaggaugguacugugacaaugcaggaucaguaucuuucuucccacaagcugaaacauguaaaguucaaucaaaucgaguauuuugugacacaaugaacaguuuaacauuaccaagugaaguaaaucucugcaauguugacauauucaaccccaaauaugauuguaaaauuaugacuucaaaaacagauguaagcagcuccguuaucacaucucuaggagccauugugucaugcuauggcaaaacuaaauguacagcauccaauaaaaaucguggaaucauaaagacauuuucuaacgggugcgauuauguaucaaauaaagggguggacacugugucuguagguaacacauuauauuauguaaauaagcaagaagguaaaagucucuauguaaaaggugaaccaauaauaaauuucuaugacccauuaguauuccccucugaugaauuugaugcaucaauaucucaagucaacgagaagauuaaccagagccuagcauuuauucguaaauccgaugaauuauuacauaauguaaaugcugguaaauccaccacaaauaucaugauaacuacuauaauuauagugauuauaguaauauuguuaucauuaauugcuguuggacugcucuuauacuguaaggccagaagcacaccagucacacuaagcaaagaucaacugagugguauaaauaauauugcauuuaguaacuaaggacuaguacuggcugcaucucccuuuccucuguccuccauccuucucccaggauggugaagggggaccugguacccagugauccccaccccaggauccuaaaucaugacuuaccugcuaauaaaaacucauuggaaaagugagaagaucuaaaaaaaaaaaaaaaaaaaaaaaaaaaaaaaaaaaaaaaaaaaaaaaaaaaaaaaaaaaaaaaaugcaucccccccccccccccccccccccccccccccaaaggcucuuuucagagccaccagaauu

SEQ ID NO: 439 - RNA, 2178 nt, Artificial Sequence
  mRNA product Design h-5 comprising derived and/or modified sequence from HRSV(A2)__F0 (opt1)
gggagagggcgcuuggcuugcaaggacccugagcugcggcauugaagcacacccaacccaacucgacugaagucagccucacugaaccggaucugagaaucuucucucucugggcuugccagggcucuccgaaccuagcuagcauccucuucaauuccaacuagaaagcuuaccauggagcugcucauccugaaggccaacgccaucaccaccauccugacggcggugaccuucugcuucgccagcggccagaacaucaccgaggaguucuaccaguccaccugcagcgccgucuccaagggguaccucagcgcccugcggacgggcugguacaccuccgugaucaccaucgagcugagcaacaucaaggagaacaagugcaacgggaccgacgccaaggugaagcucaucaagcaggagcuggacaaguacaagaacgcggucacggagcugcagcuccugaugcaguccaccccggcaaccaacaaccgcgcccggcgcgagcugccccgguucaugaacuacacccucaacaacgccaagaagacgaacgugacccugagcaagaagcgcaagcggcgcuuccugggcuuccuccugggggugggcuccgccaucgcgagcggcgucgccguguccaaggugcugcaccucgagggggaggucaacaagaucaagagcgcccugcuguccaccaacaaggccguggugagccucuccaacggcgucagcgugcugaccuccaaggugcuggaccucaagaacuacaucgacaagcagcugcugcccaucgucaacaagcagagcugcuccaucagcaacaucgagacggugaucgaguuccagcagaagaacaaccggcuccuggagaucacccgcgaguucagcgugaacgccggggucaccacccccguguccacguacaugcugaccaacagcgagcuccugucccugaucaacgacaugccgaucaccaacgaccagaagaagcucaugagcaacaacgugcagaucguccggcagcaguccuacagcaucauguccaucaucaaggaggaggugcuggcguacgugguccagcugccccucuacggcgugaucgacacccccugcuggaagcugcacacgagcccccugugcaccaccaacaccaaggagggguccaacaucugccucacgcgcaccgaccggggcugguacugcgacaacgccggcagcgucuccuucuucccgcaggccgagaccugcaaggugcagagcaaccgcguguucugcgacaccaugaacucccugacgcugcccagcgagguaaaccucugcaacgucgacaucuucaaccccaaguacgacugcaagaucaugaccuccaagaccgacgugagcuccagcgugaucaccucccugggggccaucgucagcugcuacggcaagacgaagugcaccgccagcaacaagaaccgggggaucaucaagaccuucuccaacggcugcgacuacgugagcaacaagggcguggacaccguguccgucgggaacacccuguacuacgugaacaagcaggagggcaagagccucuacgugaagggggagcccaucaucaacuucuacgacccgcuggucuuccccuccgacgaguucgacgcgagcaucucccaggugaacgagaagaucaaccagagccuggccuucauccgcaaguccgacgagcugcuccacaacgugaacgccggcaagagcacgaccaacaucaugaucaccaccaucaucaucgucaucaucgugauccugcugucccucaucgccguggggcugcugcucuacugcaaggcccggagcacgcccgucacccuguccaaggaccagcugagcggcaucaacaacaucgcguucuccaacugaggacuaguacuggcugcaucucccuuuccucuguccuccauccuucucccaggauggugaagggggaccugguacccagugauccccaccccaggauccuaaaucaugacuuaccugcuaauaaaaacucauuggaaaagugagaagaucuaaaaaaaaaaaaaaaaaaaaaaaaaaaaaaaaaaaaaaaaaaaaaaaaaaaaaaaaaaaaaaaaugcaucccccccccccccccccccccccccccccccaaaggcucuuuucagagccaccagaauu

SEQ ID NO: 440 - RNA, 2178 nt, Artificial Sequence
  mRNA product Design h-5 comprising derived and/or modified sequence from HRSV(A2)__F0 (opt1)
gggagagggcgcuuggcuugcaaggacccugagcugcggcauugaagcacacccaacccaacucgacugaagucagccucacugaaccggaucugagaaucuucucucucugggcuugccagggcucuccgaaccuagcuagcauccucuucaauuccaacuagaaagcuuaccauggagcugcucauccugaaggccaacgccaucaccaccauccugacggcggugaccuucugcuucgccagcggccagaacaucaccgaggaguucuaccaguccacgugcagcgccgucuccaagggguaccucagcgcccugcgcaccggcugguacaccuccgugaucaccaucgagcugagcaacaucaaggagaacaagugcaacgggaccgacgccaaggugaagcucaucaagcaggagcuggacaaguacaagaacgcggucacggagcugcagcuccugaugcaguccacccccgccaccaacaaccgggcccgccgggagcugccgcgcuucaugaacuacacccucaacaacgccaagaagacgaacgugacccugagcaagaagcggaagcgccgguuccugggcuuccuccugggggugggcuccgcgaucgccagcggcgucgccguguccaaggugcugcaccucgagggggaggucaacaagaucaagagcgcccugcuguccaccaacaaggccguggugagccucuccaacggcgucagcgugcugaccuccaaggugcuggaccucaagaacuacaucgacaagcagcugcugcccaucgucaacaagcagagcugcuccaucagcaacaucgagacggugaucgaguuccagcagaagaacaaccgccuccuggagaucacccgggaguucagcgugaacgcgggggucaccacccccguguccacguacaugcugaccaacagcgagcuccugucccugaucaacgacaugcccaucaccaacgaccagaagaagcucaugagcaacaacgugcagaucguccgccagcaguccuacagcaucauguccaucaucaaggaggaggugcuggccuacgugguccagcugccgcucuacggcgugaucgacacccccugcuggaagcugcacacgagcccccugugcaccaccaacaccaaggagggguccaacaucugccucacgcggaccgaccgcggcugguacugcgacaacgccggcagcgucuccuucuucccccaggccgagaccugcaaggugcagagcaaccggguguucugcgacaccaugaacucccugacgcugccgagcgaggucaaccucugcaacguggacaucuucaaccccaaguacgacugcaagaucaugaccuccaagaccgacgugagcuccagcgucaucaccucccugggggccaucgugagcugcuacggcaagacgaagugcaccgcgagcaacaagaaccgcgggaucaucaagaccuucuccaacggcugcgacuacgugagcaacaagggcgucgacaccguguccguggggaacacccuguacuacgucaacaagcaggagggcaagagccucuacgugaagggggagcccaucaucaacuucuacgacccccugguguucccguccgacgaguucgacgccagcaucucccaggucaacgagaagaucaaccagagccuggccuucauccggaaguccgacgagcuccugcacaacgugaacgccggcaagagcacgaccaacaucaugaucaccaccaucaucaucgugaucaucgucauccugcugucccucaucgccguggggcugcugcucuacugcaaggcgcgcagcacgcccgugacccuguccaaggaccagcugagcggcaucaacaacaucgccuucuccaacugaggacuaguacuggcugcaucucccuuuccucuguccuccauccuucucccaggauggugaagggggaccugguacccagugauccccaccccaggauccuaaaucaugacuuaccugcuaauaaaaacucauuggaaaagugagaagaucuaaaaaaaaaaaaaaaaaaaaaaaaaaaaaaaaaaaaaaaaaaaaaaaaaaaaaaaaaaaaaaaaugcaucccccccccccccccccccccccccccccccaaaggcucuuuucagagccaccagaauu

SEQ ID NO: 441 - RNA, 2178 nt, Artificial Sequence
  mRNA product Design h-5 comprising derived and/or modified sequence from HRSV(A2)__F0 (opt2)
gggagagggcgcuuggcuugcaaggacccugagcugcggcauugaagcacacccaacccaacucgacugaagucagccucacugaaccggaucugagaaucuucucucucugggcuugccagggcucuccgaaccuagcuagcauccucuucaauuccaacuagaaagcuuaccauggagcuccucauccucaaggccaacgccaucaccaccauccucaccgccgucaccuucugcuucgccuccggccagaacaucaccgaggaguucuaccaguccaccugcuccgccgucuccaagggcuaccucuccgcccuccgcaccggcugguacaccuccgucaucaccaucgagcucuccaacaucaaggagaacaagugcaacggcaccgacgccaaggucaagcucaucaagcaggagcucgacaaguacaagaacgccgucaccgagcuccagcuccucaugcaguccacccccgccaccaacaaccgcgcccgccgcgagcucccccgcuucaugaacuacacccucaacaacgccaagaagaccaacgucacccucuccaagaagcgcaagcgccgcuuccucggcuuccuccucggcgucggcuccgccaucgccuccggcgucgccgucuccaagguccuccaccucgagggcgaggucaacaagaucaaguccgcccuccucuccaccaacaaggccgucgucucccucuccaacggcgucuccguccucaccuccaagguccucgaccucaagaacuacaucgacaagcagcuccuccccaucgucaacaagcaguccugcuccaucuccaacaucgagaccgucaucgaguuccagcagaagaacaaccgccuccucgagaucacccgcgaguucuccgucaacgccggcgucaccacccccgucuccaccuacaugcucaccaacuccgagcuccucucccucaucaacgacaugcccaucaccaacgaccagaagaagcucauguccaacaacguccagaucguccgccagcaguccuacuccaucauguccaucaucaaggaggagguccucgccuacgucguccagcucccccucuacggcgucaucgacacccccugcuggaagcuccacaccuccccccucugcaccaccaacaccaaggagggcuccaacaucugccucacccgcaccgaccgcggcugguacugcgacaacgccggcuccgucuccuucuucccccaggccgagaccugcaagguccaguccaaccgcgucuucugcgacaccaugaacucccucacccuccccuccgaggucaaccucugcaacgucgacaucuucaaccccaaguacgacugcaagaucaugaccuccaagaccgacgucuccuccuccgucaucaccucccucggcgccaucgucuccugcuacggcaagaccaagugcaccgccuccaacaagaaccgcggcaucaucaagaccuucuccaacggcugcgacuacgucuccaacaagggcgucgacaccgucuccgucggcaacacccucuacuacgucaacaagcaggagggcaagucccucuacgucaagggcgagcccaucaucaacuucuacgacccccucgucuuccccuccgacgaguucgacgccuccaucucccaggucaacgagaagaucaaccagucccucgccuucauccgcaaguccgacgagcuccuccacaacgucaacgccggcaaguccaccaccaacaucaugaucaccaccaucaucaucgucaucaucgucauccuccucucccucaucgccgucggccuccuccucuacugcaaggcccgcuccacccccgucacccucuccaaggaccagcucuccggcaucaacaacaucgccuucuccaacugaggacuaguacuggcugcaucucccuuuccucuguccuccauccuucucccaggauggugaagggggaccugguacccagugauccccaccccaggauccuaaaucaugacuuaccugcuaauaaaaacucauuggaaaagugagaagaucuaaaaaaaaaaaaaaaaaaaaaaaaaaaaaaaaaaaaaaaaaaaaaaaaaaaaaaaaaaaaaaaaugcaucccccccccccccccccccccccccccccccaaaggcucuuuucagagccaccagaauu

SEQ ID NO: 442 - RNA, 2178 nt, Artificial Sequence
  mRNA product Design h-5 comprising derived and/or modified sequence from HRSV(A2)__F0 (opt3)
gggagagggcgcuuggcuugcaaggacccugagcugcggcauugaagcacacccaacccaacucgacugaagucagccucacugaaccggaucugagaaucuucucucucugggcuugccagggcucuccgaaccuagcuagcauccucuucaauuccaacuagaaagcuuaccauggagcugcucauccuuaaggccaacgcuauuaccacaauacugacugcagugacguucugcuuugccagcggccagaauaucaccgaagaguucuaccaauccacauguucugcggucucaaaaggguauuugagugcuuuaagaacuggaugguacaccagcguuauuacaaucgaacuguccaacauuaaggagaauaaaugcaacgguaccgacgccaaggugaaacuaaucaagcaggaacucgauaaguauaaaaaugcaguaacugagcugcagcuucugaugcagucuacacccgccaccaacaauagggcucggcgcgaguugccucgauuuaugaacuacacgcucaauaacgcaaagaaaacuaaugugacccugucgaagaaacguaagagaagguuccugggcuuucucuuaggggucggaucagccauagcuagcggcguggccguuaguaaggugcugcaccuugaaggugaggucaacaaaaucaaguccgcguugcugucuacaaauaaagcagugguaagccuauccaacgggguuucagugcucacuucuaagguccuggaccuuaaaaauuauauugauaagcaacuguugccaaucgugaacaaacagagcuguucuauuuccaacaucgaaaccgugauagaguuccagcagaagaauaaccggcuccuggagauuacacgcgaauuuucagucaaugccggaguuaccacgccggugagcacuuacauguuaacaaacagugagcugcucucucuuaucaaugacaugcccauuaccaacgaucaaaagaaacugauguccaauaacguacagaucgugagacagcagagcuauucgaucaugucuauuauaaaggaagaggucuuggcuuacgugguucaacuaccucuguacggcgugaucgacacuccaugcuggaaacuccauacauccccacuguguaccacgaauaccaaggaaggcucaaacauuugccuuacaaggacugaucgggggugguauugugacaaugccggaagugucagcuucuuuccucaggcagagaccugcaaagugcaguccaaccgcguauucugugauacaaugaauagucugacuuugccaagcgagguuaaccucugcaauguggacaucuuuaaccccaaguacgauuguaagauaaugaccucaaaaacagacgucaguuccagcgugauuaccucucugggugcuaucgucucaugcuauggcaagacuaaaugcacggccaguaacaagaaucgagggaucauuaaaacauucagcaacggaugugauuacguguccaauaagggcguugacaccgugucuguagguaacacuuuauauuacgucaauaagcaagaagggaaaucgcuguaugugaagggagagccuaucauuaacuuuuacgacccccuaguuuucccgagcgaugaauuugacgcguccauaucacaggugaaugagaaaaucaaccagagucucgccuucauuagaaagucugaugaacugcuucacaaugucaacgcaggcaaaagcaccacaaauaucaugaucaccacuauuauaaucgugauuaucguaauuuugcugucccucaucgcugugggccugcuucuguacugcaaggccaggucaacacccguuacguugagcaaggaccagcucucugggauaaacaauaucgcuuucuccaacugaggacuaguacuggcugcaucucccuuuccucuguccuccauccuucucccaggauggugaagggggaccugguacccagugauccccaccccaggauccuaaaucaugacuuaccugcuaauaaaaacucauuggaaaagugagaagaucuaaaaaaaaaaaaaaaaaaaaaaaaaaaaaaaaaaaaaaaaaaaaaaaaaaaaaaaaaaaaaaaaugcaucccccccccccccccccccccccccccccccaaaggcucuuuucagagccaccagaauu

SEQ ID NO: 443 - RNA, 2178 nt, Artificial Sequence
  mRNA product Design h-5 comprising derived and/or modified sequence from HRSV(A2)__F0 (opt4)
gggagagggcgcuuggcuugcaaggacccugagcugcggcauugaagcacacccaacccaacucgacugaagucagccucacugaaccggaucugagaaucuucucucucugggcuugccagggcucuccgaaccuagcuagcauccucuucaauuccaacuagaaagcuuaccauggagcugcugauccugaaggccaacgccaucaccaccauccugaccgccgugaccuucugcuucgccagcggccagaacaucaccgaggaguucuaccagagcaccugcagcgccgugagcaagggcuaccugagcgcccugagaaccggcugguacaccagcgugaucaccaucgagcugagcaacaucaaggagaacaagugcaacggcaccgacgccaaggugaagcugaucaagcaggagcuggacaaguacaagaacgccgugaccgagcugcagcugcugaugcagagcacccccgccaccaacaacagagccagaagagagcugcccagauucaugaacuacacccugaacaacgccaagaagaccaacgugacccugagcaagaagagaaagagaagauuccugggcuuccugcugggcgugggcagcgccaucgccagcggcguggccgugagcaaggugcugcaccuggagggcgaggugaacaagaucaagagcgcccugcugagcaccaacaaggccguggugagccugagcaacggcgugagcgugcugaccagcaaggugcuggaccugaagaacuacaucgacaagcagcugcugcccaucgugaacaagcagagcugcagcaucagcaacaucgagaccgugaucgaguuccagcagaagaacaacagacugcuggagaucaccagagaguucagcgugaacgccggcgugaccacccccgugagcaccuacaugcugaccaacagcgagcugcugagccugaucaacgacaugcccaucaccaacgaccagaagaagcugaugagcaacaacgugcagaucgugagacagcagagcuacagcaucaugagcaucaucaaggaggaggugcuggccuacguggugcagcugccccuguacggcgugaucgacacccccugcuggaagcugcacaccagcccccugugcaccaccaacaccaaggagggcagcaacaucugccugaccagaaccgacagaggcugguacugcgacaacgccggcagcgugagcuucuucccccaggccgagaccugcaaggugcagagcaacagaguguucugcgacaccaugaacagccugacccugcccagcgaggugaaccugugcaacguggacaucuucaaccccaaguacgacugcaagaucaugaccagcaagaccgacgugagcagcagcgugaucaccagccugggcgccaucgugagcugcuacggcaagaccaagugcaccgccagcaacaagaacagaggcaucaucaagaccuucagcaacggcugcgacuacgugagcaacaagggcguggacaccgugagcgugggcaacacccuguacuacgugaacaagcaggagggcaagagccuguacgugaagggcgagcccaucaucaacuucuacgacccccugguguuccccagcgacgaguucgacgccagcaucagccaggugaacgagaagaucaaccagagccuggccuucaucagaaagagcgacgagcugcugcacaacgugaacgccggcaagagcaccaccaacaucaugaucaccaccaucaucaucgugaucaucgugauccugcugagccugaucgccgugggccugcugcuguacugcaaggccagaagcacccccgugacccugagcaaggaccagcugagcggcaucaacaacaucgccuucagcaacugaggacuaguacuggcugcaucucccuuuccucuguccuccauccuucucccaggauggugaagggggaccugguacccagugauccccaccccaggauccuaaaucaugacuuaccugcuaauaaaaacucauuggaaaagugagaagaucuaaaaaaaaaaaaaaaaaaaaaaaaaaaaaaaaaaaaaaaaaaaaaaaaaaaaaaaaaaaaaaaaugcaucccccccccccccccccccccccccccccccaaaggcucuuuucagagccaccagaauu

SEQ ID NO: 444 - RNA, 2178 nt, Artificial Sequence
  mRNA product Design h-5 comprising derived and/or modified sequence from HRSV(A2)__F0 (opt5)
gggagagggcgcuuggcuugcaaggacccugagcugcggcauugaagcacacccaacccaacucgacugaagucagccucacugaaccggaucugagaaucuucucucucugggcuugccagggcucuccgaaccuagcuagcauccucuucaauuccaacuagaaagcuuaccauggagcugcucauccugaaggccaacgcuauuaccacaauccuuacggccgugaccuucugcuuugcgagcggccagaauauuacagaagaguucuaccaauccaccuguucugcugucagcaaaggguaucuguccgcccucagaacaggaugguacaccucuguuaucacaauugaacugagcaacaucaaggagaauaaaugcaacggcaccgacgccaaggugaaacuuaucaagcaggaacuggauaaguauaaaaaugcugugacggagcuccagcugcugaugcaguccacccccgccacaaacaaucgggcucgcagagagcucccucgguuuaugaacuacacccugaauaacgccaagaaaacaaaugucacccuuucuaagaaacgcaagagacgguuccugggguuucuccugggagugggcagcgcgauugccuccgggguugcugugagcaagguccuucaccuggaaggagaggugaacaaaaucaagucugcccuccuguccacgaauaaagcuguugugagccugucuaacggcgucuccgugcucacaagcaaggugcuggaccuuaaaaauuauauugauaagcaacugcucccgaucgucaacaaacagucuuguuccauuagcaacaucgaaaccguuauugaguuccagcagaagaauaaccgccugcuugagaucacaagagaauuuuccgugaaugccggcgugaccacccccgucucuacauacaugcugacgaacagcgagcuccugucccugaucaaugacaugccuauuaccaacgaucaaaagaaacucaugagcaauaacgugcagaucguucggcagcagucuuauuccauuaugagcaucauuaaggaagaggugcuggcguacgucgugcaacuuccccuguacgggguuaucgacacaccuugcuggaaacuccauaccucuccccuguguacaaccaauacgaaggaaggaagcaacaucugccuuacacgcaccgauagaggcugguauugugacaaugccggguccgugucuuucuuuccucaggcugagaccugcaaaguccagagcaaccggguguucugugauacaaugaacucccugacccucccgagcgaggucaaucugugcaauguggacauuuuuaaccccaaguacgauuguaagaucaugacaucuaaaacggacguuuccagcucugugauuaccucccugggagccaucgucagcugcuauggcaagacaaaaugcaccgcuuccaacaagaaucgcgggauuaucaaaacauucucuaacggaugugauuacgugagcaauaagggcguugacaccguguccgucggcaacacgcucuauuacgugaauaagcaagaagggaaaucucuguaugugaagggagagccuaucauuaacuuuuacgacccccuuguuuucccuagcgaugaauuugacgccuccaucagccaggucaaugagaaaauuaaccagucucuggccuucaucagaaaguccgaugaacuccugcacaaugugaacgcuggcaaaagcaccacaaauauuaugaucaccacaauuaucaucgugauuaucgucauucugcuuucucucaucgcgguggggcugcugcucuacugcaaggcccgguccacccccguuacgcugagcaaggaccagcuuucuggaauuaacaauaucgcuuucagcaacugaggacuaguacuggcugcaucucccuuuccucuguccuccauccuucucccaggauggugaagggggaccugguacccagugauccccaccccaggauccuaaaucaugacuuaccugcuaauaaaaacucauuggaaaagugagaagaucuaaaaaaaaaaaaaaaaaaaaaaaaaaaaaaaaaaaaaaaaaaaaaaaaaaaaaaaaaaaaaaaaugcaucccccccccccccccccccccccccccccccaaaggcucuuuucagagccaccagaauu

SEQ ID NO: 445 - RNA, 2178 nt, Artificial Sequence
  mRNA product Design h-5 comprising derived and/or modified sequence from HRSV(A2)__F0 (opt6)
gggagagggcgcuuggcuugcaaggacccugagcugcggcauugaagcacacccaacccaacucgacugaagucagccucacugaaccggaucugagaaucuucucucucugggcuugccagggcucuccgaaccuagcuagcauccucuucaauuccaacuagaaagcuuaccauggaacuucuaauauuaaaagcuaacgcaaucacuacuaucuuaaccgcaguaacauucuguuuugcauccggccaaaacauaacagaagaauuuuaccaaucaacuugcucugcagucucaaaagguuaucuaucugcauuaagaacaggcugguacaccucaguaauaacgaucgaacuaucaaacaucaaagaaaacaaauguaauggaacagacgcaaaaguaaaacuaaucaaacaagaacuagacaaauacaaaaacgcaguaaccgaacuccaacuccucaugcaaaguacaccagcaacaaauaacagagcaagacgugaacuaccacguuuuaugaauuacacgcucaauaacgcaaaaaaaacaaauguuacccuaucaaaaaaacgaaaaagaagauuccucggauuccuacuaggcguaggcucagcaauagcuucaggaguagcaguaucaaaaguacuccaccucgaaggagaaguaaacaaaaucaaaagcgcucuccucucaacaaacaaagcaguuguuucacucucaaacggaguaucaguacuaaccucaaaaguacuugaccuaaaaaauuauauagacaaacaacuauuaccaauaguaaacaaacaaagcugcuccaucuccaacaucgagacagucauagaauuucaacaaaaaaauaaccgccuauuagaaauaaccagagaauuuucaguaaacgcaggaguaacuaccccaguaucaacauauauguuaacaaacucagaacuccuaagucuaaucaacgacaugccaauaaccaacgaccaaaaaaaacuaaugagcaacaauguacaaauaguucgucaacaaucuuacuccauaaugucuauaauaaaagaagaaguacucgccuauguaguccaacuaccacuauacggagucaucgauacaccaugcuggaaacuccacacauccccacucuguacuacuaacaccaaagaagguucaaauauaugccuaaccagaacagauagagguugguacugcgauaaugcaggaucaguauccuuuuucccccaagccgaaacaugcaaaguucaauccaauagaguauuuugugauacaaugaacucuuuaacccucccauccgaagucaaucuauguaacgucgacauauuuaacccaaaauacgauugcaaaauaaugacaucaaaaacagacgucucauccucaguuauaacguccuuaggcgcuauaguaucaugcuacggcaaaacaaaauguacagcaucaaacaaaaacagaggaaucauaaaaacuuucucuaacgguugcgacuauguauccaacaaaggugucgacacaguauccguaggcaacacccuuuacuauguuaauaaacaagaaggaaaaucucuauauguaaaaggcgaaccaauuauaaauuuuuacgacccccuugucuuucccucugacgaauuugacgcuuccauaucacaagucaacgaaaaaaucaaccaaucccucgcauucauacgcaaaucagacgaacuacuacauaacgucaacgcaggcaaauccacaacaaacauaaugauaaccacaaucauaauuguaauaauaguaauacuacuuucucuaauagcagucggauuacucuuauacuguaaagcucgaucaacaccagucacccucucuaaagaucaacuauccggaaucaacaacauagcuuucucaaacuaaggacuaguacuggcugcaucucccuuuccucuguccuccauccuucucccaggauggugaagggggaccugguacccagugauccccaccccaggauccuaaaucaugacuuaccugcuaauaaaaacucauuggaaaagugagaagaucuaaaaaaaaaaaaaaaaaaaaaaaaaaaaaaaaaaaaaaaaaaaaaaaaaaaaaaaaaaaaaaaaugcaucccccccccccccccccccccccccccccccaaaggcucuuuucagagccaccagaauu

SEQ ID NO: 446 - RNA, 2178 nt, Artificial Sequence
  mRNA product Design h-5 comprising derived and/or modified sequence from HRSV(A2)__F0 (opt11)
gggagagggcgcuuggcuugcaaggacccugagcugcggcauugaagcacacccaacccaacucgacugaagucagccucacugaaccggaucugagaaucuucucucucugggcuugccagggcucuccgaaccuagcuagcauccucuucaauuccaacuagaaagcuuaccauggaacuccucauacucaaagccaacgcaaucacaaccauacucaccgccgucaccuucugcuuugcaucuggccagaacaucacugaagaguucuaccaauccacaugcuccgccguaagcaaaggcuaccuauccgcccuacgcaccggcugguacaccagcguaaucaccauagaacucuccaauauaaaagaaaacaaaugcaacggcaccgacgcaaaagucaagcuaauaaaacaagaacucgacaaauacaaaaacgccguuaccgaacuccagcuacucaugcaaucgaccccagcaaccaacaaccgugcgagacgcgaacucccccgcuucaugaacuacacccuaaacaacgccaaaaagaccaacguaacucuauccaagaaacgcaaacgccgcuuccucggauuccuccucggcgucggcuccgcaaucgccagcggcgucgccguuagcaaaguccuucaccucgaaggagaaguaaacaaaauuaaaagcgcccucuuauccacaaacaaggccguaguaucccugucaaacggcgucuccguccuuacauccaaaguccucgaccucaagaacuacauagacaaacagcuacuacccauuguaaauaaacaaagcugcucaauuagcaacaucgaaaccguaaucgaguuccagcagaaaaacaacagacuucucgaaaucacccgcgaguucagcgucaacgccggcguaaccaccccugucucaacauacaugcuaaccaacagcgaacugcucucccucaucaacgacaugcccaucaccaacgaccaaaagaaacucaugagcaacaacguacaaaucgugcgccaacaguccuacucaauaaugucaaucaucaaagaagaagugcuagcauacgucguacaacuaccacucuacggcguaauagauacccccugcuggaagcuccauaccuccccacucuguaccaccaacaccaaagaaggcucaaacaucugccuaacgcgcacagaccguggaugguacugugacaacgccggcuccgucuccuucuucccucaagccgaaacaugcaaaguccaauccaacagagucuucugcgauaccaugaacucccugacacucccaagcgaagucaaccuuugcaacgucgauaucuuuaaccccaaauacgacugcaagaucaugacaucaaaaaccgacguauccuccucuguaauaaccucccuaggcgcaaucguaucaugcuacggcaaaaccaaauguaccgccuccaacaaaaaucgcggcaucaucaaaaccuucucgaacggcugcgacuacgucuccaacaaaggcguagacacaguuuccguaggcaacacccucuacuacgucaauaaacaggaaggcaagucccucuacgucaaaggcgaacccaucaucaauuucuacgacccccucguuuuccccuccgaugaguucgacgcaagcaucagccaggucaacgaaaagauaaaccagucccucgccuucauccgcaaaucagaugaacuccuucacaacguuaacgcaggcaagagcaccaccaacaucaugaucacaacuauaaucaucgucauaaucgucauccuacucucacuaaucgccgucggucuccuacuauauuguaaagcccgaucaacaccggucacacucuccaaagaccaacucuccggaaucaacaauaucgcuuucucgaacuaaggacuaguacuggcugcaucucccuuuccucuguccuccauccuucucccaggauggugaagggggaccugguacccagugauccccaccccaggauccuaaaucaugacuuaccugcuaauaaaaacucauuggaaaagugagaagaucuaaaaaaaaaaaaaaaaaaaaaaaaaaaaaaaaaaaaaaaaaaaaaaaaaaaaaaaaaaaaaaaaugcaucccccccccccccccccccccccccccccccaaaggcucuuuucagagccaccagaauu

SEQ ID NO: 447 - RNA, 2111 nt, Artificial Sequence
  mRNA product Design i-1 comprising derived and/or modified sequence from HRSV(A2)__F0 (artificial)
gggagagggcgcuuggcuugcaaggacccugagcugcggcauugaagcacacccaacccaacucgacugaagucagccucacugaaccggaucugagaaucuucucucucugggcuugccagggcucuccgaaccuagcuagcauccucuucaauuccaacuagaaagcuuaccauggaguugcuaauccucaaagcaaaugcaauuaccacaauccucacugcagucacauuuuguuuugcuucuggucaaaacaucacugaagaauuuuaucaaucaacaugcagugcaguuagcaaaggcuaucuuagugcucugagaacugguugguauaccaguguuauaacuauagaauuaaguaauaucaaggaaaauaaguguaauggaacagaugcuaagguaaaauugauaaaacaagaauuagauaaauauaaaaaugcuguaacagaauugcaguugcucaugcaaagcacaccagcaacaaacaaucgagccagaagagaacuaccaagguuuaugaauuauacacucaacaaugccaaaaaaaccaauguaacauuaagcaagaaaaggaaaagaagauuucuugguuuuuuguuagguguuggaucugcaaucgccaguggcguugcuguaucuaagguccugcaccuagaaggggaagugaacaagaucaaaagugcucuacuauccacaaacaaggcuguagucagcuuaucaaauggaguuagugucuuaaccagcaaaguguuagaccucaaaaacuauauagauaaacaauuguuaccuauugugaacaagcaaagcugcagcauaucaaauauagaaacugugauagaguuccaacaaaagaacaacagacuacuagagauuaccagggaauuuaguguuaaugcagguguaacuacaccuguaagcacuuacauguuaacuaauagugaauuauugucauuaaucaaugauaugccuauaacaaaugaucagaaaaaguuaauguccaacaauguucaaauaguuagacagcaaaguuacucuaucauguccauaauaaaagaggaagucuuagcauauguaguacaauuaccacuauaugguguuauagauacacccuguuggaaacuacacacauccccucuauguacaaccaacacaaaagaaggguccaacaucuguuuaacaagaacugacagaggaugguacugugacaaugcaggaucaguaucuuucuucccacaagcugaaacauguaaaguucaaucaaaucgaguauuuugugacacaaugaacaguuuaacauuaccaagugaaguaaaucucugcaauguugacauauucaaccccaaauaugauuguaaaauuaugacuucaaaaacagauguaagcagcuccguuaucacaucucuaggagccauugugucaugcuauggcaaaacuaaauguacagcauccaauaaaaaucguggaaucauaaagacauuuucuaacgggugcgauuauguaucaaauaaagggguggacacugugucuguagguaacacauuauauuauguaaauaagcaagaagguaaaagucucuauguaaaaggugaaccaauaauaaauuucuaugacccauuaguauuccccucugaugaauuugaugcaucaauaucucaagucaacgagaagauuaaccagagccuagcauuuauucguaaauccgaugaauuauuacauaauguaaaugcugguaaauccaccacaaauaucaugauaacuacuauaauuauagugauuauaguaauauuguuaucauuaauugcuguuggacugcucuuauacuguaaggccagaagcacaccagucacacuaagcaaagaucaacugagugguauaaauaauauugcauuuaguaacuaaggacuaguguccaccugucccuccugggcugcuggauugucucguuuuccugccaaauaaacaggaucagcgcuuuacagaucuaaaaaaaaaaaaaaaaaaaaaaaaaaaaaaaaaaaaaaaaaaaaaaaaaaaaaaaaaaaaaaaaugcaucccccccccccccccccccccccccccccccaaaggcucuuuucagagccaccagaauu

SEQ ID NO: 448 - RNA, 2111 nt, Artificial Sequence
  mRNA product Design i-1 comprising derived and/or modified sequence from HRSV(A2)__F0 (opt1)
gggagagggcgcuuggcuugcaaggacccugagcugcggcauugaagcacacccaacccaacucgacugaagucagccucacugaaccggaucugagaaucuucucucucugggcuugccagggcucuccgaaccuagcuagcauccucuucaauuccaacuagaaagcuuaccauggagcugcucauccugaaggccaacgccaucaccaccauccugacggcggugaccuucugcuucgccagcggccagaacaucaccgaggaguucuaccaguccaccugcagcgccgucuccaagggguaccucagcgcccugcggacgggcugguacaccuccgugaucaccaucgagcugagcaacaucaaggagaacaagugcaacgggaccgacgccaaggugaagcucaucaagcaggagcuggacaaguacaagaacgcggucacggagcugcagcuccugaugcaguccaccccggcaaccaacaaccgcgcccggcgcgagcugccccgguucaugaacuacacccucaacaacgccaagaagacgaacgugacccugagcaagaagcgcaagcggcgcuuccugggcuuccuccugggggugggcuccgccaucgcgagcggcgucgccguguccaaggugcugcaccucgagggggaggucaacaagaucaagagcgcccugcuguccaccaacaaggccguggugagccucuccaacggcgucagcgugcugaccuccaaggugcuggaccucaagaacuacaucgacaagcagcugcugcccaucgucaacaagcagagcugcuccaucagcaacaucgagacggugaucgaguuccagcagaagaacaaccggcuccuggagaucacccgcgaguucagcgugaacgccggggucaccacccccguguccacguacaugcugaccaacagcgagcuccugucccugaucaacgacaugccgaucaccaacgaccagaagaagcucaugagcaacaacgugcagaucguccggcagcaguccuacagcaucauguccaucaucaaggaggaggugcuggcguacgugguccagcugccccucuacggcgugaucgacacccccugcuggaagcugcacacgagcccccugugcaccaccaacaccaaggagggguccaacaucugccucacgcgcaccgaccggggcugguacugcgacaacgccggcagcgucuccuucuucccgcaggccgagaccugcaaggugcagagcaaccgcguguucugcgacaccaugaacucccugacgcugcccagcgagguaaaccucugcaacgucgacaucuucaaccccaaguacgacugcaagaucaugaccuccaagaccgacgugagcuccagcgugaucaccucccugggggccaucgucagcugcuacggcaagacgaagugcaccgccagcaacaagaaccgggggaucaucaagaccuucuccaacggcugcgacuacgugagcaacaagggcguggacaccguguccgucgggaacacccuguacuacgugaacaagcaggagggcaagagccucuacgugaagggggagcccaucaucaacuucuacgacccgcuggucuuccccuccgacgaguucgacgcgagcaucucccaggugaacgagaagaucaaccagagccuggccuucauccgcaaguccgacgagcugcuccacaacgugaacgccggcaagagcacgaccaacaucaugaucaccaccaucaucaucgucaucaucgugauccugcugucccucaucgccguggggcugcugcucuacugcaaggcccggagcacgcccgucacccuguccaaggaccagcugagcggcaucaacaacaucgcguucuccaacugaggacuaguguccaccugucccuccugggcugcuggauugucucguuuuccugccaaauaaacaggaucagcgcuuuacagaucuaaaaaaaaaaaaaaaaaaaaaaaaaaaaaaaaaaaaaaaaaaaaaaaaaaaaaaaaaaaaaaaaugcaucccccccccccccccccccccccccccccccaaaggcucuuuucagagccaccagaauu

SEQ ID NO: 449 - RNA, 2111 nt, Artificial Sequence
  mRNA product Design i-1 comprising derived and/or modified sequence from HRSV(A2)__F0 (opt1)
gggagagggcgcuuggcuugcaaggacccugagcugcggcauugaagcacacccaacccaacucgacugaagucagccucacugaaccggaucugagaaucuucucucucugggcuugccagggcucuccgaaccuagcuagcauccucuucaauuccaacuagaaagcuuaccauggagcugcucauccugaaggccaacgccaucaccaccauccugacggcggugaccuucugcuucgccagcggccagaacaucaccgaggaguucuaccaguccacgugcagcgccgucuccaagggguaccucagcgcccugcgcaccggcugguacaccuccgugaucaccaucgagcugagcaacaucaaggagaacaagugcaacgggaccgacgccaaggugaagcucaucaagcaggagcuggacaaguacaagaacgcggucacggagcugcagcuccugaugcaguccacccccgccaccaacaaccgggcccgccgggagcugccgcgcuucaugaacuacacccucaacaacgccaagaagacgaacgugacccugagcaagaagcggaagcgccgguuccugggcuuccuccugggggugggcuccgcgaucgccagcggcgucgccguguccaaggugcugcaccucgagggggaggucaacaagaucaagagcgcccugcuguccaccaacaaggccguggugagccucuccaacggcgucagcgugcugaccuccaaggugcuggaccucaagaacuacaucgacaagcagcugcugcccaucgucaacaagcagagcugcuccaucagcaacaucgagacggugaucgaguuccagcagaagaacaaccgccuccuggagaucacccgggaguucagcgugaacgcgggggucaccacccccguguccacguacaugcugaccaacagcgagcuccugucccugaucaacgacaugcccaucaccaacgaccagaagaagcucaugagcaacaacgugcagaucguccgccagcaguccuacagcaucauguccaucaucaaggaggaggugcuggccuacgugguccagcugccgcucuacggcgugaucgacacccccugcuggaagcugcacacgagcccccugugcaccaccaacaccaaggagggguccaacaucugccucacgcggaccgaccgcggcugguacugcgacaacgccggcagcgucuccuucuucccccaggccgagaccugcaaggugcagagcaaccggguguucugcgacaccaugaacucccugacgcugccgagcgaggucaaccucugcaacguggacaucuucaaccccaaguacgacugcaagaucaugaccuccaagaccgacgugagcuccagcgucaucaccucccugggggccaucgugagcugcuacggcaagacgaagugcaccgcgagcaacaagaaccgcgggaucaucaagaccuucuccaacggcugcgacuacgugagcaacaagggcgucgacaccguguccguggggaacacccuguacuacgucaacaagcaggagggcaagagccucuacgugaagggggagcccaucaucaacuucuacgacccccugguguucccguccgacgaguucgacgccagcaucucccaggucaacgagaagaucaaccagagccuggccuucauccggaaguccgacgagcuccugcacaacgugaacgccggcaagagcacgaccaacaucaugaucaccaccaucaucaucgugaucaucgucauccugcugucccucaucgccguggggcugcugcucuacugcaaggcgcgcagcacgcccgugacccuguccaaggaccagcugagcggcaucaacaacaucgccuucuccaacugaggacuaguguccaccugucccuccugggcugcuggauugucucguuuuccugccaaauaaacaggaucagcgcuuuacagaucuaaaaaaaaaaaaaaaaaaaaaaaaaaaaaaaaaaaaaaaaaaaaaaaaaaaaaaaaaaaaaaaaugcaucccccccccccccccccccccccccccccccaaaggcucuuuucagagccaccagaauu

SEQ ID NO: 450 - RNA, 2111 nt, Artificial Sequence
  mRNA product Design i-1 comprising derived and/or modified sequence from HRSV(A2)__F0 (opt2)
gggagagggcgcuuggcuugcaaggacccugagcugcggcauugaagcacacccaacccaacucgacugaagucagccucacugaaccggaucugagaaucuucucucucugggcuugccagggcucuccgaaccuagcuagcauccucuucaauuccaacuagaaagcuuaccauggagcuccucauccucaaggccaacgccaucaccaccauccucaccgccgucaccuucugcuucgccuccggccagaacaucaccgaggaguucuaccaguccaccugcuccgccgucuccaagggcuaccucuccgcccuccgcaccggcugguacaccuccgucaucaccaucgagcucuccaacaucaaggagaacaagugcaacggcaccgacgccaaggucaagcucaucaagcaggagcucgacaaguacaagaacgccgucaccgagcuccagcuccucaugcaguccacccccgccaccaacaaccgcgcccgccgcgagcucccccgcuucaugaacuacacccucaacaacgccaagaagaccaacgucacccucuccaagaagcgcaagcgccgcuuccucggcuuccuccucggcgucggcuccgccaucgccuccggcgucgccgucuccaagguccuccaccucgagggcgaggucaacaagaucaaguccgcccuccucuccaccaacaaggccgucgucucccucuccaacggcgucuccguccucaccuccaagguccucgaccucaagaacuacaucgacaagcagcuccuccccaucgucaacaagcaguccugcuccaucuccaacaucgagaccgucaucgaguuccagcagaagaacaaccgccuccucgagaucacccgcgaguucuccgucaacgccggcgucaccacccccgucuccaccuacaugcucaccaacuccgagcuccucucccucaucaacgacaugcccaucaccaacgaccagaagaagcucauguccaacaacguccagaucguccgccagcaguccuacuccaucauguccaucaucaaggaggagguccucgccuacgucguccagcucccccucuacggcgucaucgacacccccugcuggaagcuccacaccuccccccucugcaccaccaacaccaaggagggcuccaacaucugccucacccgcaccgaccgcggcugguacugcgacaacgccggcuccgucuccuucuucccccaggccgagaccugcaagguccaguccaaccgcgucuucugcgacaccaugaacucccucacccuccccuccgaggucaaccucugcaacgucgacaucuucaaccccaaguacgacugcaagaucaugaccuccaagaccgacgucuccuccuccgucaucaccucccucggcgccaucgucuccugcuacggcaagaccaagugcaccgccuccaacaagaaccgcggcaucaucaagaccuucuccaacggcugcgacuacgucuccaacaagggcgucgacaccgucuccgucggcaacacccucuacuacgucaacaagcaggagggcaagucccucuacgucaagggcgagcccaucaucaacuucuacgacccccucgucuuccccuccgacgaguucgacgccuccaucucccaggucaacgagaagaucaaccagucccucgccuucauccgcaaguccgacgagcuccuccacaacgucaacgccggcaaguccaccaccaacaucaugaucaccaccaucaucaucgucaucaucgucauccuccucucccucaucgccgucggccuccuccucuacugcaaggcccgcuccacccccgucacccucuccaaggaccagcucuccggcaucaacaacaucgccuucuccaacugaggacuaguguccaccugucccuccugggcugcuggauugucucguuuuccugccaaauaaacaggaucagcgcuuuacagaucuaaaaaaaaaaaaaaaaaaaaaaaaaaaaaaaaaaaaaaaaaaaaaaaaaaaaaaaaaaaaaaaaugcaucccccccccccccccccccccccccccccccaaaggcucuuuucagagccaccagaauu

SEQ ID NO: 451 - RNA, 2111 nt, Artificial Sequence
  mRNA product Design i-1 comprising derived and/or modified sequence from HRSV(A2)__F0 (opt3)
gggagagggcgcuuggcuugcaaggacccugagcugcggcauugaagcacacccaacccaacucgacugaagucagccucacugaaccggaucugagaaucuucucucucugggcuugccagggcucuccgaaccuagcuagcauccucuucaauuccaacuagaaagcuuaccauggagcugcucauccuuaaggccaacgcuauuaccacaauacugacugcagugacguucugcuuugccagcggccagaauaucaccgaagaguucuaccaauccacauguucugcggucucaaaaggguauuugagugcuuuaagaacuggaugguacaccagcguuauuacaaucgaacuguccaacauuaaggagaauaaaugcaacgguaccgacgccaaggugaaacuaaucaagcaggaacucgauaaguauaaaaaugcaguaacugagcugcagcuucugaugcagucuacacccgccaccaacaauagggcucggcgcgaguugccucgauuuaugaacuacacgcucaauaacgcaaagaaaacuaaugugacccugucgaagaaacguaagagaagguuccugggcuuucucuuaggggucggaucagccauagcuagcggcguggccguuaguaaggugcugcaccuugaaggugaggucaacaaaaucaaguccgcguugcugucuacaaauaaagcagugguaagccuauccaacgggguuucagugcucacuucuaagguccuggaccuuaaaaauuauauugauaagcaacuguugccaaucgugaacaaacagagcuguucuauuuccaacaucgaaaccgugauagaguuccagcagaagaauaaccggcuccuggagauuacacgcgaauuuucagucaaugccggaguuaccacgccggugagcacuuacauguuaacaaacagugagcugcucucucuuaucaaugacaugcccauuaccaacgaucaaaagaaacugauguccaauaacguacagaucgugagacagcagagcuauucgaucaugucuauuauaaaggaagaggucuuggcuuacgugguucaacuaccucuguacggcgugaucgacacuccaugcuggaaacuccauacauccccacuguguaccacgaauaccaaggaaggcucaaacauuugccuuacaaggacugaucgggggugguauugugacaaugccggaagugucagcuucuuuccucaggcagagaccugcaaagugcaguccaaccgcguauucugugauacaaugaauagucugacuuugccaagcgagguuaaccucugcaauguggacaucuuuaaccccaaguacgauuguaagauaaugaccucaaaaacagacgucaguuccagcgugauuaccucucugggugcuaucgucucaugcuauggcaagacuaaaugcacggccaguaacaagaaucgagggaucauuaaaacauucagcaacggaugugauuacguguccaauaagggcguugacaccgugucuguagguaacacuuuauauuacgucaauaagcaagaagggaaaucgcuguaugugaagggagagccuaucauuaacuuuuacgacccccuaguuuucccgagcgaugaauuugacgcguccauaucacaggugaaugagaaaaucaaccagagucucgccuucauuagaaagucugaugaacugcuucacaaugucaacgcaggcaaaagcaccacaaauaucaugaucaccacuauuauaaucgugauuaucguaauuuugcugucccucaucgcugugggccugcuucuguacugcaaggccaggucaacacccguuacguugagcaaggaccagcucucugggauaaacaauaucgcuuucuccaacugaggacuaguguccaccugucccuccugggcugcuggauugucucguuuuccugccaaauaaacaggaucagcgcuuuacagaucuaaaaaaaaaaaaaaaaaaaaaaaaaaaaaaaaaaaaaaaaaaaaaaaaaaaaaaaaaaaaaaaaugcaucccccccccccccccccccccccccccccccaaaggcucuuuucagagccaccagaauu

SEQ ID NO: 452 - RNA, 2111 nt, Artificial Sequence
  mRNA product Design i-1 comprising derived and/or modified sequence from HRSV(A2)__F0 (opt4)
gggagagggcgcuuggcuugcaaggacccugagcugcggcauugaagcacacccaacccaacucgacugaagucagccucacugaaccggaucugagaaucuucucucucugggcuugccagggcucuccgaaccuagcuagcauccucuucaauuccaacuagaaagcuuaccauggagcugcugauccugaaggccaacgccaucaccaccauccugaccgccgugaccuucugcuucgccagcggccagaacaucaccgaggaguucuaccagagcaccugcagcgccgugagcaagggcuaccugagcgcccugagaaccggcugguacaccagcgugaucaccaucgagcugagcaacaucaaggagaacaagugcaacggcaccgacgccaaggugaagcugaucaagcaggagcuggacaaguacaagaacgccgugaccgagcugcagcugcugaugcagagcacccccgccaccaacaacagagccagaagagagcugcccagauucaugaacuacacccugaacaacgccaagaagaccaacgugacccugagcaagaagagaaagagaagauuccugggcuuccugcugggcgugggcagcgccaucgccagcggcguggccgugagcaaggugcugcaccuggagggcgaggugaacaagaucaagagcgcccugcugagcaccaacaaggccguggugagccugagcaacggcgugagcgugcugaccagcaaggugcuggaccugaagaacuacaucgacaagcagcugcugcccaucgugaacaagcagagcugcagcaucagcaacaucgagaccgugaucgaguuccagcagaagaacaacagacugcuggagaucaccagagaguucagcgugaacgccggcgugaccacccccgugagcaccuacaugcugaccaacagcgagcugcugagccugaucaacgacaugcccaucaccaacgaccagaagaagcugaugagcaacaacgugcagaucgugagacagcagagcuacagcaucaugagcaucaucaaggaggaggugcuggccuacguggugcagcugccccuguacggcgugaucgacacccccugcuggaagcugcacaccagcccccugugcaccaccaacaccaaggagggcagcaacaucugccugaccagaaccgacagaggcugguacugcgacaacgccggcagcgugagcuucuucccccaggccgagaccugcaaggugcagagcaacagaguguucugcgacaccaugaacagccugacccugcccagcgaggugaaccugugcaacguggacaucuucaaccccaaguacgacugcaagaucaugaccagcaagaccgacgugagcagcagcgugaucaccagccugggcgccaucgugagcugcuacggcaagaccaagugcaccgccagcaacaagaacagaggcaucaucaagaccuucagcaacggcugcgacuacgugagcaacaagggcguggacaccgugagcgugggcaacacccuguacuacgugaacaagcaggagggcaagagccuguacgugaagggcgagcccaucaucaacuucuacgacccccugguguuccccagcgacgaguucgacgccagcaucagccaggugaacgagaagaucaaccagagccuggccuucaucagaaagagcgacgagcugcugcacaacgugaacgccggcaagagcaccaccaacaucaugaucaccaccaucaucaucgugaucaucgugauccugcugagccugaucgccgugggccugcugcuguacugcaaggccagaagcacccccgugacccugagcaaggaccagcugagcggcaucaacaacaucgccuucagcaacugaggacuaguguccaccugucccuccugggcugcuggauugucucguuuuccugccaaauaaacaggaucagcgcuuuacagaucuaaaaaaaaaaaaaaaaaaaaaaaaaaaaaaaaaaaaaaaaaaaaaaaaaaaaaaaaaaaaaaaaugcaucccccccccccccccccccccccccccccccaaaggcucuuuucagagccaccagaauu

SEQ ID NO: 453 - RNA, 2111 nt, Artificial Sequence
  mRNA product Design i-1 comprising derived and/or modified sequence from HRSV(A2)__F0 (opt5)
gggagagggcgcuuggcuugcaaggacccugagcugcggcauugaagcacacccaacccaacucgacugaagucagccucacugaaccggaucugagaaucuucucucucugggcuugccagggcucuccgaaccuagcuagcauccucuucaauuccaacuagaaagcuuaccauggagcugcucauccugaaggccaacgcuauuaccacaauccuuacggccgugaccuucugcuuugcgagcggccagaauauuacagaagaguucuaccaauccaccuguucugcugucagcaaaggguaucuguccgcccucagaacaggaugguacaccucuguuaucacaauugaacugagcaacaucaaggagaauaaaugcaacggcaccgacgccaaggugaaacuuaucaagcaggaacuggauaaguauaaaaaugcugugacggagcuccagcugcugaugcaguccacccccgccacaaacaaucgggcucgcagagagcucccucgguuuaugaacuacacccugaauaacgccaagaaaacaaaugucacccuuucuaagaaacgcaagagacgguuccugggguuucuccugggagugggcagcgcgauugccuccgggguugcugugagcaagguccuucaccuggaaggagaggugaacaaaaucaagucugcccuccuguccacgaauaaagcuguugugagccugucuaacggcgucuccgugcucacaagcaaggugcuggaccuuaaaaauuauauugauaagcaacugcucccgaucgucaacaaacagucuuguuccauuagcaacaucgaaaccguuauugaguuccagcagaagaauaaccgccugcuugagaucacaagagaauuuuccgugaaugccggcgugaccacccccgucucuacauacaugcugacgaacagcgagcuccugucccugaucaaugacaugccuauuaccaacgaucaaaagaaacucaugagcaauaacgugcagaucguucggcagcagucuuauuccauuaugagcaucauuaaggaagaggugcuggcguacgucgugcaacuuccccuguacgggguuaucgacacaccuugcuggaaacuccauaccucuccccuguguacaaccaauacgaaggaaggaagcaacaucugccuuacacgcaccgauagaggcugguauugugacaaugccggguccgugucuuucuuuccucaggcugagaccugcaaaguccagagcaaccggguguucugugauacaaugaacucccugacccucccgagcgaggucaaucugugcaauguggacauuuuuaaccccaaguacgauuguaagaucaugacaucuaaaacggacguuuccagcucugugauuaccucccugggagccaucgucagcugcuauggcaagacaaaaugcaccgcuuccaacaagaaucgcgggauuaucaaaacauucucuaacggaugugauuacgugagcaauaagggcguugacaccguguccgucggcaacacgcucuauuacgugaauaagcaagaagggaaaucucuguaugugaagggagagccuaucauuaacuuuuacgacccccuuguuuucccuagcgaugaauuugacgccuccaucagccaggucaaugagaaaauuaaccagucucuggccuucaucagaaaguccgaugaacuccugcacaaugugaacgcuggcaaaagcaccacaaauauuaugaucaccacaauuaucaucgugauuaucgucauucugcuuucucucaucgcgguggggcugcugcucuacugcaaggcccgguccacccccguuacgcugagcaaggaccagcuuucuggaauuaacaauaucgcuuucagcaacugaggacuaguguccaccugucccuccugggcugcuggauugucucguuuuccugccaaauaaacaggaucagcgcuuuacagaucuaaaaaaaaaaaaaaaaaaaaaaaaaaaaaaaaaaaaaaaaaaaaaaaaaaaaaaaaaaaaaaaaugcaucccccccccccccccccccccccccccccccaaaggcucuuuucagagccaccagaauu

SEQ ID NO: 454 - RNA, 2111 nt, Artificial Sequence
  mRNA product Design i-1 comprising derived and/or modified sequence from HRSV(A2)__F0 (opt6)
gggagagggcgcuuggcuugcaaggacccugagcugcggcauugaagcacacccaacccaacucgacugaagucagccucacugaaccggaucugagaaucuucucucucugggcuugccagggcucuccgaaccuagcuagcauccucuucaauuccaacuagaaagcuuaccauggaacuucuaauauuaaaagcuaacgcaaucacuacuaucuuaaccgcaguaacauucuguuuugcauccggccaaaacauaacagaagaauuuuaccaaucaacuugcucugcagucucaaaagguuaucuaucugcauuaagaacaggcugguacaccucaguaauaacgaucgaacuaucaaacaucaaagaaaacaaauguaauggaacagacgcaaaaguaaaacuaaucaaacaagaacuagacaaauacaaaaacgcaguaaccgaacuccaacuccucaugcaaaguacaccagcaacaaauaacagagcaagacgugaacuaccacguuuuaugaauuacacgcucaauaacgcaaaaaaaacaaauguuacccuaucaaaaaaacgaaaaagaagauuccucggauuccuacuaggcguaggcucagcaauagcuucaggaguagcaguaucaaaaguacuccaccucgaaggagaaguaaacaaaaucaaaagcgcucuccucucaacaaacaaagcaguuguuucacucucaaacggaguaucaguacuaaccucaaaaguacuugaccuaaaaaauuauauagacaaacaacuauuaccaauaguaaacaaacaaagcugcuccaucuccaacaucgagacagucauagaauuucaacaaaaaaauaaccgccuauuagaaauaaccagagaauuuucaguaaacgcaggaguaacuaccccaguaucaacauauauguuaacaaacucagaacuccuaagucuaaucaacgacaugccaauaaccaacgaccaaaaaaaacuaaugagcaacaauguacaaauaguucgucaacaaucuuacuccauaaugucuauaauaaaagaagaaguacucgccuauguaguccaacuaccacuauacggagucaucgauacaccaugcuggaaacuccacacauccccacucuguacuacuaacaccaaagaagguucaaauauaugccuaaccagaacagauagagguugguacugcgauaaugcaggaucaguauccuuuuucccccaagccgaaacaugcaaaguucaauccaauagaguauuuugugauacaaugaacucuuuaacccucccauccgaagucaaucuauguaacgucgacauauuuaacccaaaauacgauugcaaaauaaugacaucaaaaacagacgucucauccucaguuauaacguccuuaggcgcuauaguaucaugcuacggcaaaacaaaauguacagcaucaaacaaaaacagaggaaucauaaaaacuuucucuaacgguugcgacuauguauccaacaaaggugucgacacaguauccguaggcaacacccuuuacuauguuaauaaacaagaaggaaaaucucuauauguaaaaggcgaaccaauuauaaauuuuuacgacccccuugucuuucccucugacgaauuugacgcuuccauaucacaagucaacgaaaaaaucaaccaaucccucgcauucauacgcaaaucagacgaacuacuacauaacgucaacgcaggcaaauccacaacaaacauaaugauaaccacaaucauaauuguaauaauaguaauacuacuuucucuaauagcagucggauuacucuuauacuguaaagcucgaucaacaccagucacccucucuaaagaucaacuauccggaaucaacaacauagcuuucucaaacuaaggacuaguguccaccugucccuccugggcugcuggauugucucguuuuccugccaaauaaacaggaucagcgcuuuacagaucuaaaaaaaaaaaaaaaaaaaaaaaaaaaaaaaaaaaaaaaaaaaaaaaaaaaaaaaaaaaaaaaaugcaucccccccccccccccccccccccccccccccaaaggcucuuuucagagccaccagaauu

SEQ ID NO: 455 - RNA, 2111 nt, Artificial Sequence
  mRNA product Design i-1 comprising derived and/or modified sequence from HRSV(A2)__F0 (opt11)
gggagagggcgcuuggcuugcaaggacccugagcugcggcauugaagcacacccaacccaacucgacugaagucagccucacugaaccggaucugagaaucuucucucucugggcuugccagggcucuccgaaccuagcuagcauccucuucaauuccaacuagaaagcuuaccauggaacuccucauacucaaagccaacgcaaucacaaccauacucaccgccgucaccuucugcuuugcaucuggccagaacaucacugaagaguucuaccaauccacaugcuccgccguaagcaaaggcuaccuauccgcccuacgcaccggcugguacaccagcguaaucaccauagaacucuccaauauaaaagaaaacaaaugcaacggcaccgacgcaaaagucaagcuaauaaaacaagaacucgacaaauacaaaaacgccguuaccgaacuccagcuacucaugcaaucgaccccagcaaccaacaaccgugcgagacgcgaacucccccgcuucaugaacuacacccuaaacaacgccaaaaagaccaacguaacucuauccaagaaacgcaaacgccgcuuccucggauuccuccucggcgucggcuccgcaaucgccagcggcgucgccguuagcaaaguccuucaccucgaaggagaaguaaacaaaauuaaaagcgcccucuuauccacaaacaaggccguaguaucccugucaaacggcgucuccguccuuacauccaaaguccucgaccucaagaacuacauagacaaacagcuacuacccauuguaaauaaacaaagcugcucaauuagcaacaucgaaaccguaaucgaguuccagcagaaaaacaacagacuucucgaaaucacccgcgaguucagcgucaacgccggcguaaccaccccugucucaacauacaugcuaaccaacagcgaacugcucucccucaucaacgacaugcccaucaccaacgaccaaaagaaacucaugagcaacaacguacaaaucgugcgccaacaguccuacucaauaaugucaaucaucaaagaagaagugcuagcauacgucguacaacuaccacucuacggcguaauagauacccccugcuggaagcuccauaccuccccacucuguaccaccaacaccaaagaaggcucaaacaucugccuaacgcgcacagaccguggaugguacugugacaacgccggcuccgucuccuucuucccucaagccgaaacaugcaaaguccaauccaacagagucuucugcgauaccaugaacucccugacacucccaagcgaagucaaccuuugcaacgucgauaucuuuaaccccaaauacgacugcaagaucaugacaucaaaaaccgacguauccuccucuguaauaaccucccuaggcgcaaucguaucaugcuacggcaaaaccaaauguaccgccuccaacaaaaaucgcggcaucaucaaaaccuucucgaacggcugcgacuacgucuccaacaaaggcguagacacaguuuccguaggcaacacccucuacuacgucaauaaacaggaaggcaagucccucuacgucaaaggcgaacccaucaucaauuucuacgacccccucguuuuccccuccgaugaguucgacgcaagcaucagccaggucaacgaaaagauaaaccagucccucgccuucauccgcaaaucagaugaacuccuucacaacguuaacgcaggcaagagcaccaccaacaucaugaucacaacuauaaucaucgucauaaucgucauccuacucucacuaaucgccgucggucuccuacuauauuguaaagcccgaucaacaccggucacacucuccaaagaccaacucuccggaaucaacaauaucgcuuucucgaacuaaggacuaguguccaccugucccuccugggcugcuggauugucucguuuuccugccaaauaaacaggaucagcgcuuuacagaucuaaaaaaaaaaaaaaaaaaaaaaaaaaaaaaaaaaaaaaaaaaaaaaaaaaaaaaaaaaaaaaaaugcaucccccccccccccccccccccccccccccccaaaggcucuuuucagagccaccagaauu

SEQ ID NO: 456 - RNA, 2111 nt, Artificial Sequence
  mRNA product Design i-2 comprising derived and/or modified sequence from HRSV(A2)__F0 (artificial)
gggagaggcgcugccuacggagguggcagccaucuccuucucggcaucaagcuuaccauggaguugcuaauccucaaagcaaaugcaauuaccacaauccucacugcagucacauuuuguuuugcuucuggucaaaacaucacugaagaauuuuaucaaucaacaugcagugcaguuagcaaaggcuaucuuagugcucugagaacugguugguauaccaguguuauaacuauagaauuaaguaauaucaaggaaaauaaguguaauggaacagaugcuaagguaaaauugauaaaacaagaauuagauaaauauaaaaaugcuguaacagaauugcaguugcucaugcaaagcacaccagcaacaaacaaucgagccagaagagaacuaccaagguuuaugaauuauacacucaacaaugccaaaaaaaccaauguaacauuaagcaagaaaaggaaaagaagauuucuugguuuuuuguuagguguuggaucugcaaucgccaguggcguugcuguaucuaagguccugcaccuagaaggggaagugaacaagaucaaaagugcucuacuauccacaaacaaggcuguagucagcuuaucaaauggaguuagugucuuaaccagcaaaguguuagaccucaaaaacuauauagauaaacaauuguuaccuauugugaacaagcaaagcugcagcauaucaaauauagaaacugugauagaguuccaacaaaagaacaacagacuacuagagauuaccagggaauuuaguguuaaugcagguguaacuacaccuguaagcacuuacauguuaacuaauagugaauuauugucauuaaucaaugauaugccuauaacaaaugaucagaaaaaguuaauguccaacaauguucaaauaguuagacagcaaaguuacucuaucauguccauaauaaaagaggaagucuuagcauauguaguacaauuaccacuauaugguguuauagauacacccuguuggaaacuacacacauccccucuauguacaaccaacacaaaagaaggguccaacaucuguuuaacaagaacugacagaggaugguacugugacaaugcaggaucaguaucuuucuucccacaagcugaaacauguaaaguucaaucaaaucgaguauuuugugacacaaugaacaguuuaacauuaccaagugaaguaaaucucugcaauguugacauauucaaccccaaauaugauuguaaaauuaugacuucaaaaacagauguaagcagcuccguuaucacaucucuaggagccauugugucaugcuauggcaaaacuaaauguacagcauccaauaaaaaucguggaaucauaaagacauuuucuaacgggugcgauuauguaucaaauaaagggguggacacugugucuguagguaacacauuauauuauguaaauaagcaagaagguaaaagucucuauguaaaaggugaaccaauaauaaauuucuaugacccauuaguauuccccucugaugaauuugaugcaucaauaucucaagucaacgagaagauuaaccagagccuagcauuuauucguaaauccgaugaauuauuacauaauguaaaugcugguaaauccaccacaaauaucaugauaacuacuauaauuauagugauuauaguaauauuguuaucauuaauugcuguuggacugcucuuauacuguaaggccagaagcacaccagucacacuaagcaaagaucaacugagugguauaaauaauauugcauuuaguaacuaaggacuagugcaucacauuuaaaagcaucucagccuaccaugagaauaagagaaagaaaaugaagaucaauagcuuauucaucucuuuuucuuuuucguugguguaaagccaacacccugucuaaaaaacauaaauuucuuuaaucauuuugccucuuuucucugugcuucaauuaauaaaaaauggaaagaaccuagaucuaaaaaaaaaaaaaaaaaaaaaaaaaaaaaaaaaaaaaaaaaaaaaaaaaaaaaaaaaaaaaaaaugcaucccccccccccccccccccccccccccccccaaaggcucuuuucagagccaccagaauu

SEQ ID NO: 457 - RNA, 2111 nt, Artificial Sequence
  mRNA product Design i-2 comprising derived and/or modified sequence from HRSV(A2)__F0 (opt1)
gggagaggcgcugccuacggagguggcagccaucuccuucucggcaucaagcuuaccauggagcugcucauccugaaggccaacgccaucaccaccauccugacggcggugaccuucugcuucgccagcggccagaacaucaccgaggaguucuaccaguccaccugcagcgccgucuccaagggguaccucagcgcccugcggacgggcugguacaccuccgugaucaccaucgagcugagcaacaucaaggagaacaagugcaacgggaccgacgccaaggugaagcucaucaagcaggagcuggacaaguacaagaacgcggucacggagcugcagcuccugaugcaguccaccccggcaaccaacaaccgcgcccggcgcgagcugccccgguucaugaacuacacccucaacaacgccaagaagacgaacgugacccugagcaagaagcgcaagcggcgcuuccugggcuuccuccugggggugggcuccgccaucgcgagcggcgucgccguguccaaggugcugcaccucgagggggaggucaacaagaucaagagcgcccugcuguccaccaacaaggccguggugagccucuccaacggcgucagcgugcugaccuccaaggugcuggaccucaagaacuacaucgacaagcagcugcugcccaucgucaacaagcagagcugcuccaucagcaacaucgagacggugaucgaguuccagcagaagaacaaccggcuccuggagaucacccgcgaguucagcgugaacgccggggucaccacccccguguccacguacaugcugaccaacagcgagcuccugucccugaucaacgacaugccgaucaccaacgaccagaagaagcucaugagcaacaacgugcagaucguccggcagcaguccuacagcaucauguccaucaucaaggaggaggugcuggcguacgugguccagcugccccucuacggcgugaucgacacccccugcuggaagcugcacacgagcccccugugcaccaccaacaccaaggagggguccaacaucugccucacgcgcaccgaccggggcugguacugcgacaacgccggcagcgucuccuucuucccgcaggccgagaccugcaaggugcagagcaaccgcguguucugcgacaccaugaacucccugacgcugcccagcgagguaaaccucugcaacgucgacaucuucaaccccaaguacgacugcaagaucaugaccuccaagaccgacgugagcuccagcgugaucaccucccugggggccaucgucagcugcuacggcaagacgaagugcaccgccagcaacaagaaccgggggaucaucaagaccuucuccaacggcugcgacuacgugagcaacaagggcguggacaccguguccgucgggaacacccuguacuacgugaacaagcaggagggcaagagccucuacgugaagggggagcccaucaucaacuucuacgacccgcuggucuuccccuccgacgaguucgacgcgagcaucucccaggugaacgagaagaucaaccagagccuggccuucauccgcaaguccgacgagcugcuccacaacgugaacgccggcaagagcacgaccaacaucaugaucaccaccaucaucaucgucaucaucgugauccugcugucccucaucgccguggggcugcugcucuacugcaaggcccggagcacgcccgucacccuguccaaggaccagcugagcggcaucaacaacaucgcguucuccaacugaggacuagugcaucacauuuaaaagcaucucagccuaccaugagaauaagagaaagaaaaugaagaucaauagcuuauucaucucuuuuucuuuuucguugguguaaagccaacacccugucuaaaaaacauaaauuucuuuaaucauuuugccucuuuucucugugcuucaauuaauaaaaaauggaaagaaccuagaucuaaaaaaaaaaaaaaaaaaaaaaaaaaaaaaaaaaaaaaaaaaaaaaaaaaaaaaaaaaaaaaaaugcaucccccccccccccccccccccccccccccccaaaggcucuuuucagagccaccagaauu

SEQ ID NO: 458 - RNA, 2111 nt, Artificial Sequence
  mRNA product Design i-2 comprising derived and/or modified sequence from HRSV(A2)__F0 (opt1)
gggagaggcgcugccuacggagguggcagccaucuccuucucggcaucaagcuuaccauggagcugcucauccugaaggccaacgccaucaccaccauccugacggcggugaccuucugcuucgccagcggccagaacaucaccgaggaguucuaccaguccacgugcagcgccgucuccaagggguaccucagcgcccugcgcaccggcugguacaccuccgugaucaccaucgagcugagcaacaucaaggagaacaagugcaacgggaccgacgccaaggugaagcucaucaagcaggagcuggacaaguacaagaacgcggucacggagcugcagcuccugaugcaguccacccccgccaccaacaaccgggcccgccgggagcugccgcgcuucaugaacuacacccucaacaacgccaagaagacgaacgugacccugagcaagaagcggaagcgccgguuccugggcuuccuccugggggugggcuccgcgaucgccagcggcgucgccguguccaaggugcugcaccucgagggggaggucaacaagaucaagagcgcccugcuguccaccaacaaggccguggugagccucuccaacggcgucagcgugcugaccuccaaggugcuggaccucaagaacuacaucgacaagcagcugcugcccaucgucaacaagcagagcugcuccaucagcaacaucgagacggugaucgaguuccagcagaagaacaaccgccuccuggagaucacccgggaguucagcgugaacgcgggggucaccacccccguguccacguacaugcugaccaacagcgagcuccugucccugaucaacgacaugcccaucaccaacgaccagaagaagcucaugagcaacaacgugcagaucguccgccagcaguccuacagcaucauguccaucaucaaggaggaggugcuggccuacgugguccagcugccgcucuacggcgugaucgacacccccugcuggaagcugcacacgagcccccugugcaccaccaacaccaaggagggguccaacaucugccucacgcggaccgaccgcggcugguacugcgacaacgccggcagcgucuccuucuucccccaggccgagaccugcaaggugcagagcaaccggguguucugcgacaccaugaacucccugacgcugccgagcgaggucaaccucugcaacguggacaucuucaaccccaaguacgacugcaagaucaugaccuccaagaccgacgugagcuccagcgucaucaccucccugggggccaucgugagcugcuacggcaagacgaagugcaccgcgagcaacaagaaccgcgggaucaucaagaccuucuccaacggcugcgacuacgugagcaacaagggcgucgacaccguguccguggggaacacccuguacuacgucaacaagcaggagggcaagagccucuacgugaagggggagcccaucaucaacuucuacgacccccugguguucccguccgacgaguucgacgccagcaucucccaggucaacgagaagaucaaccagagccuggccuucauccggaaguccgacgagcuccugcacaacgugaacgccggcaagagcacgaccaacaucaugaucaccaccaucaucaucgugaucaucgucauccugcugucccucaucgccguggggcugcugcucuacugcaaggcgcgcagcacgcccgugacccuguccaaggaccagcugagcggcaucaacaacaucgccuucuccaacugaggacuagugcaucacauuuaaaagcaucucagccuaccaugagaauaagagaaagaaaaugaagaucaauagcuuauucaucucuuuuucuuuuucguugguguaaagccaacacccugucuaaaaaacauaaauuucuuuaaucauuuugccucuuuucucugugcuucaauuaauaaaaaauggaaagaaccuagaucuaaaaaaaaaaaaaaaaaaaaaaaaaaaaaaaaaaaaaaaaaaaaaaaaaaaaaaaaaaaaaaaaugcaucccccccccccccccccccccccccccccccaaaggcucuuuucagagccaccagaauu

SEQ ID NO: 459 - RNA, 2111 nt, Artificial Sequence
  mRNA product Design i-2 comprising derived and/or modified sequence from HRSV(A2)__F0 (opt2)
gggagaggcgcugccuacggagguggcagccaucuccuucucggcaucaagcuuaccauggagcuccucauccucaaggccaacgccaucaccaccauccucaccgccgucaccuucugcuucgccuccggccagaacaucaccgaggaguucuaccaguccaccugcuccgccgucuccaagggcuaccucuccgcccuccgcaccggcugguacaccuccgucaucaccaucgagcucuccaacaucaaggagaacaagugcaacggcaccgacgccaaggucaagcucaucaagcaggagcucgacaaguacaagaacgccgucaccgagcuccagcuccucaugcaguccacccccgccaccaacaaccgcgcccgccgcgagcucccccgcuucaugaacuacacccucaacaacgccaagaagaccaacgucacccucuccaagaagcgcaagcgccgcuuccucggcuuccuccucggcgucggcuccgccaucgccuccggcgucgccgucuccaagguccuccaccucgagggcgaggucaacaagaucaaguccgcccuccucuccaccaacaaggccgucgucucccucuccaacggcgucuccguccucaccuccaagguccucgaccucaagaacuacaucgacaagcagcuccuccccaucgucaacaagcaguccugcuccaucuccaacaucgagaccgucaucgaguuccagcagaagaacaaccgccuccucgagaucacccgcgaguucuccgucaacgccggcgucaccacccccgucuccaccuacaugcucaccaacuccgagcuccucucccucaucaacgacaugcccaucaccaacgaccagaagaagcucauguccaacaacguccagaucguccgccagcaguccuacuccaucauguccaucaucaaggaggagguccucgccuacgucguccagcucccccucuacggcgucaucgacacccccugcuggaagcuccacaccuccccccucugcaccaccaacaccaaggagggcuccaacaucugccucacccgcaccgaccgcggcugguacugcgacaacgccggcuccgucuccuucuucccccaggccgagaccugcaagguccaguccaaccgcgucuucugcgacaccaugaacucccucacccuccccuccgaggucaaccucugcaacgucgacaucuucaaccccaaguacgacugcaagaucaugaccuccaagaccgacgucuccuccuccgucaucaccucccucggcgccaucgucuccugcuacggcaagaccaagugcaccgccuccaacaagaaccgcggcaucaucaagaccuucuccaacggcugcgacuacgucuccaacaagggcgucgacaccgucuccgucggcaacacccucuacuacgucaacaagcaggagggcaagucccucuacgucaagggcgagcccaucaucaacuucuacgacccccucgucuuccccuccgacgaguucgacgccuccaucucccaggucaacgagaagaucaaccagucccucgccuucauccgcaaguccgacgagcuccuccacaacgucaacgccggcaaguccaccaccaacaucaugaucaccaccaucaucaucgucaucaucgucauccuccucucccucaucgccgucggccuccuccucuacugcaaggcccgcuccacccccgucacccucuccaaggaccagcucuccggcaucaacaacaucgccuucuccaacugaggacuagugcaucacauuuaaaagcaucucagccuaccaugagaauaagagaaagaaaaugaagaucaauagcuuauucaucucuuuuucuuuuucguugguguaaagccaacacccugucuaaaaaacauaaauuucuuuaaucauuuugccucuuuucucugugcuucaauuaauaaaaaauggaaagaaccuagaucuaaaaaaaaaaaaaaaaaaaaaaaaaaaaaaaaaaaaaaaaaaaaaaaaaaaaaaaaaaaaaaaaugcaucccccccccccccccccccccccccccccccaaaggcucuuuucagagccaccagaauu

SEQ ID NO: 460 - RNA, 2111 nt, Artificial Sequence
  mRNA product Design i-2 comprising derived and/or modified sequence from HRSV(A2)__F0 (opt3)
gggagaggcgcugccuacggagguggcagccaucuccuucucggcaucaagcuuaccauggagcugcucauccuuaaggccaacgcuauuaccacaauacugacugcagugacguucugcuuugccagcggccagaauaucaccgaagaguucuaccaauccacauguucugcggucucaaaaggguauuugagugcuuuaagaacuggaugguacaccagcguuauuacaaucgaacuguccaacauuaaggagaauaaaugcaacgguaccgacgccaaggugaaacuaaucaagcaggaacucgauaaguauaaaaaugcaguaacugagcugcagcuucugaugcagucuacacccgccaccaacaauagggcucggcgcgaguugccucgauuuaugaacuacacgcucaauaacgcaaagaaaacuaaugugacccugucgaagaaacguaagagaagguuccugggcuuucucuuaggggucggaucagccauagcuagcggcguggccguuaguaaggugcugcaccuugaaggugaggucaacaaaaucaaguccgcguugcugucuacaaauaaagcagugguaagccuauccaacgggguuucagugcucacuucuaagguccuggaccuuaaaaauuauauugauaagcaacuguugccaaucgugaacaaacagagcuguucuauuuccaacaucgaaaccgugauagaguuccagcagaagaauaaccggcuccuggagauuacacgcgaauuuucagucaaugccggaguuaccacgccggugagcacuuacauguuaacaaacagugagcugcucucucuuaucaaugacaugcccauuaccaacgaucaaaagaaacugauguccaauaacguacagaucgugagacagcagagcuauucgaucaugucuauuauaaaggaagaggucuuggcuuacgugguucaacuaccucuguacggcgugaucgacacuccaugcuggaaacuccauacauccccacuguguaccacgaauaccaaggaaggcucaaacauuugccuuacaaggacugaucgggggugguauugugacaaugccggaagugucagcuucuuuccucaggcagagaccugcaaagugcaguccaaccgcguauucugugauacaaugaauagucugacuuugccaagcgagguuaaccucugcaauguggacaucuuuaaccccaaguacgauuguaagauaaugaccucaaaaacagacgucaguuccagcgugauuaccucucugggugcuaucgucucaugcuauggcaagacuaaaugcacggccaguaacaagaaucgagggaucauuaaaacauucagcaacggaugugauuacguguccaauaagggcguugacaccgugucuguagguaacacuuuauauuacgucaauaagcaagaagggaaaucgcuguaugugaagggagagccuaucauuaacuuuuacgacccccuaguuuucccgagcgaugaauuugacgcguccauaucacaggugaaugagaaaaucaaccagagucucgccuucauuagaaagucugaugaacugcuucacaaugucaacgcaggcaaaagcaccacaaauaucaugaucaccacuauuauaaucgugauuaucguaauuuugcugucccucaucgcugugggccugcuucuguacugcaaggccaggucaacacccguuacguugagcaaggaccagcucucugggauaaacaauaucgcuuucuccaacugaggacuagugcaucacauuuaaaagcaucucagccuaccaugagaauaagagaaagaaaaugaagaucaauagcuuauucaucucuuuuucuuuuucguugguguaaagccaacacccugucuaaaaaacauaaauuucuuuaaucauuuugccucuuuucucugugcuucaauuaauaaaaaauggaaagaaccuagaucuaaaaaaaaaaaaaaaaaaaaaaaaaaaaaaaaaaaaaaaaaaaaaaaaaaaaaaaaaaaaaaaaugcaucccccccccccccccccccccccccccccccaaaggcucuuuucagagccaccagaauu

SEQ ID NO: 461 - RNA, 2111 nt, Artificial Sequence
  mRNA product Design i-2 comprising derived and/or modified sequence from HRSV(A2)__F0 (opt4)
gggagaggcgcugccuacggagguggcagccaucuccuucucggcaucaagcuuaccauggagcugcugauccugaaggccaacgccaucaccaccauccugaccgccgugaccuucugcuucgccagcggccagaacaucaccgaggaguucuaccagagcaccugcagcgccgugagcaagggcuaccugagcgcccugagaaccggcugguacaccagcgugaucaccaucgagcugagcaacaucaaggagaacaagugcaacggcaccgacgccaaggugaagcugaucaagcaggagcuggacaaguacaagaacgccgugaccgagcugcagcugcugaugcagagcacccccgccaccaacaacagagccagaagagagcugcccagauucaugaacuacacccugaacaacgccaagaagaccaacgugacccugagcaagaagagaaagagaagauuccugggcuuccugcugggcgugggcagcgccaucgccagcggcguggccgugagcaaggugcugcaccuggagggcgaggugaacaagaucaagagcgcccugcugagcaccaacaaggccguggugagccugagcaacggcgugagcgugcugaccagcaaggugcuggaccugaagaacuacaucgacaagcagcugcugcccaucgugaacaagcagagcugcagcaucagcaacaucgagaccgugaucgaguuccagcagaagaacaacagacugcuggagaucaccagagaguucagcgugaacgccggcgugaccacccccgugagcaccuacaugcugaccaacagcgagcugcugagccugaucaacgacaugcccaucaccaacgaccagaagaagcugaugagcaacaacgugcagaucgugagacagcagagcuacagcaucaugagcaucaucaaggaggaggugcuggccuacguggugcagcugccccuguacggcgugaucgacacccccugcuggaagcugcacaccagcccccugugcaccaccaacaccaaggagggcagcaacaucugccugaccagaaccgacagaggcugguacugcgacaacgccggcagcgugagcuucuucccccaggccgagaccugcaaggugcagagcaacagaguguucugcgacaccaugaacagccugacccugcccagcgaggugaaccugugcaacguggacaucuucaaccccaaguacgacugcaagaucaugaccagcaagaccgacgugagcagcagcgugaucaccagccugggcgccaucgugagcugcuacggcaagaccaagugcaccgccagcaacaagaacagaggcaucaucaagaccuucagcaacggcugcgacuacgugagcaacaagggcguggacaccgugagcgugggcaacacccuguacuacgugaacaagcaggagggcaagagccuguacgugaagggcgagcccaucaucaacuucuacgacccccugguguuccccagcgacgaguucgacgccagcaucagccaggugaacgagaagaucaaccagagccuggccuucaucagaaagagcgacgagcugcugcacaacgugaacgccggcaagagcaccaccaacaucaugaucaccaccaucaucaucgugaucaucgugauccugcugagccugaucgccgugggccugcugcuguacugcaaggccagaagcacccccgugacccugagcaaggaccagcugagcggcaucaacaacaucgccuucagcaacugaggacuagugcaucacauuuaaaagcaucucagccuaccaugagaauaagagaaagaaaaugaagaucaauagcuuauucaucucuuuuucuuuuucguugguguaaagccaacacccugucuaaaaaacauaaauuucuuuaaucauuuugccucuuuucucugugcuucaauuaauaaaaaauggaaagaaccuagaucuaaaaaaaaaaaaaaaaaaaaaaaaaaaaaaaaaaaaaaaaaaaaaaaaaaaaaaaaaaaaaaaaugcaucccccccccccccccccccccccccccccccaaaggcucuuuucagagccaccagaauu

SEQ ID NO: 462 - RNA, 2111 nt, Artificial Sequence
  mRNA product Design i-2 comprising derived and/or modified sequence from HRSV(A2)__F0 (opt5)
gggagaggcgcugccuacggagguggcagccaucuccuucucggcaucaagcuuaccauggagcugcucauccugaaggccaacgcuauuaccacaauccuuacggccgugaccuucugcuuugcgagcggccagaauauuacagaagaguucuaccaauccaccuguucugcugucagcaaaggguaucuguccgcccucagaacaggaugguacaccucuguuaucacaauugaacugagcaacaucaaggagaauaaaugcaacggcaccgacgccaaggugaaacuuaucaagcaggaacuggauaaguauaaaaaugcugugacggagcuccagcugcugaugcaguccacccccgccacaaacaaucgggcucgcagagagcucccucgguuuaugaacuacacccugaauaacgccaagaaaacaaaugucacccuuucuaagaaacgcaagagacgguuccugggguuucuccugggagugggcagcgcgauugccuccgggguugcugugagcaagguccuucaccuggaaggagaggugaacaaaaucaagucugcccuccuguccacgaauaaagcuguugugagccugucuaacggcgucuccgugcucacaagcaaggugcuggaccuuaaaaauuauauugauaagcaacugcucccgaucgucaacaaacagucuuguuccauuagcaacaucgaaaccguuauugaguuccagcagaagaauaaccgccugcuugagaucacaagagaauuuuccgugaaugccggcgugaccacccccgucucuacauacaugcugacgaacagcgagcuccugucccugaucaaugacaugccuauuaccaacgaucaaaagaaacucaugagcaauaacgugcagaucguucggcagcagucuuauuccauuaugagcaucauuaaggaagaggugcuggcguacgucgugcaacuuccccuguacgggguuaucgacacaccuugcuggaaacuccauaccucuccccuguguacaaccaauacgaaggaaggaagcaacaucugccuuacacgcaccgauagaggcugguauugugacaaugccggguccgugucuuucuuuccucaggcugagaccugcaaaguccagagcaaccggguguucugugauacaaugaacucccugacccucccgagcgaggucaaucugugcaauguggacauuuuuaaccccaaguacgauuguaagaucaugacaucuaaaacggacguuuccagcucugugauuaccucccugggagccaucgucagcugcuauggcaagacaaaaugcaccgcuuccaacaagaaucgcgggauuaucaaaacauucucuaacggaugugauuacgugagcaauaagggcguugacaccguguccgucggcaacacgcucuauuacgugaauaagcaagaagggaaaucucuguaugugaagggagagccuaucauuaacuuuuacgacccccuuguuuucccuagcgaugaauuugacgccuccaucagccaggucaaugagaaaauuaaccagucucuggccuucaucagaaaguccgaugaacuccugcacaaugugaacgcuggcaaaagcaccacaaauauuaugaucaccacaauuaucaucgugauuaucgucauucugcuuucucucaucgcgguggggcugcugcucuacugcaaggcccgguccacccccguuacgcugagcaaggaccagcuuucuggaauuaacaauaucgcuuucagcaacugaggacuagugcaucacauuuaaaagcaucucagccuaccaugagaauaagagaaagaaaaugaagaucaauagcuuauucaucucuuuuucuuuuucguugguguaaagccaacacccugucuaaaaaacauaaauuucuuuaaucauuuugccucuuuucucugugcuucaauuaauaaaaaauggaaagaaccuagaucuaaaaaaaaaaaaaaaaaaaaaaaaaaaaaaaaaaaaaaaaaaaaaaaaaaaaaaaaaaaaaaaaugcaucccccccccccccccccccccccccccccccaaaggcucuuuucagagccaccagaauu

SEQ ID NO: 463 - RNA, 2111 nt, Artificial Sequence
  mRNA product Design i-2 comprising derived and/or modified sequence from HRSV(A2)__F0 (opt6)
gggagaggcgcugccuacggagguggcagccaucuccuucucggcaucaagcuuaccauggaacuucuaauauuaaaagcuaacgcaaucacuacuaucuuaaccgcaguaacauucuguuuugcauccggccaaaacauaacagaagaauuuuaccaaucaacuugcucugcagucucaaaagguuaucuaucugcauuaagaacaggcugguacaccucaguaauaacgaucgaacuaucaaacaucaaagaaaacaaauguaauggaacagacgcaaaaguaaaacuaaucaaacaagaacuagacaaauacaaaaacgcaguaaccgaacuccaacuccucaugcaaaguacaccagcaacaaauaacagagcaagacgugaacuaccacguuuuaugaauuacacgcucaauaacgcaaaaaaaacaaauguuacccuaucaaaaaaacgaaaaagaagauuccucggauuccuacuaggcguaggcucagcaauagcuucaggaguagcaguaucaaaaguacuccaccucgaaggagaaguaaacaaaaucaaaagcgcucuccucucaacaaacaaagcaguuguuucacucucaaacggaguaucaguacuaaccucaaaaguacuugaccuaaaaaauuauauagacaaacaacuauuaccaauaguaaacaaacaaagcugcuccaucuccaacaucgagacagucauagaauuucaacaaaaaaauaaccgccuauuagaaauaaccagagaauuuucaguaaacgcaggaguaacuaccccaguaucaacauauauguuaacaaacucagaacuccuaagucuaaucaacgacaugccaauaaccaacgaccaaaaaaaacuaaugagcaacaauguacaaauaguucgucaacaaucuuacuccauaaugucuauaauaaaagaagaaguacucgccuauguaguccaacuaccacuauacggagucaucgauacaccaugcuggaaacuccacacauccccacucuguacuacuaacaccaaagaagguucaaauauaugccuaaccagaacagauagagguugguacugcgauaaugcaggaucaguauccuuuuucccccaagccgaaacaugcaaaguucaauccaauagaguauuuugugauacaaugaacucuuuaacccucccauccgaagucaaucuauguaacgucgacauauuuaacccaaaauacgauugcaaaauaaugacaucaaaaacagacgucucauccucaguuauaacguccuuaggcgcuauaguaucaugcuacggcaaaacaaaauguacagcaucaaacaaaaacagaggaaucauaaaaacuuucucuaacgguugcgacuauguauccaacaaaggugucgacacaguauccguaggcaacacccuuuacuauguuaauaaacaagaaggaaaaucucuauauguaaaaggcgaaccaauuauaaauuuuuacgacccccuugucuuucccucugacgaauuugacgcuuccauaucacaagucaacgaaaaaaucaaccaaucccucgcauucauacgcaaaucagacgaacuacuacauaacgucaacgcaggcaaauccacaacaaacauaaugauaaccacaaucauaauuguaauaauaguaauacuacuuucucuaauagcagucggauuacucuuauacuguaaagcucgaucaacaccagucacccucucuaaagaucaacuauccggaaucaacaacauagcuuucucaaacuaaggacuagugcaucacauuuaaaagcaucucagccuaccaugagaauaagagaaagaaaaugaagaucaauagcuuauucaucucuuuuucuuuuucguugguguaaagccaacacccugucuaaaaaacauaaauuucuuuaaucauuuugccucuuuucucugugcuucaauuaauaaaaaauggaaagaaccuagaucuaaaaaaaaaaaaaaaaaaaaaaaaaaaaaaaaaaaaaaaaaaaaaaaaaaaaaaaaaaaaaaaaugcaucccccccccccccccccccccccccccccccaaaggcucuuuucagagccaccagaauu

SEQ ID NO: 464 - RNA, 2111 nt, Artificial Sequence
  mRNA product Design i-2 comprising derived and/or modified sequence from HRSV(A2)__F0 (opt11)
gggagaggcgcugccuacggagguggcagccaucuccuucucggcaucaagcuuaccauggaacuccucauacucaaagccaacgcaaucacaaccauacucaccgccgucaccuucugcuuugcaucuggccagaacaucacugaagaguucuaccaauccacaugcuccgccguaagcaaaggcuaccuauccgcccuacgcaccggcugguacaccagcguaaucaccauagaacucuccaauauaaaagaaaacaaaugcaacggcaccgacgcaaaagucaagcuaauaaaacaagaacucgacaaauacaaaaacgccguuaccgaacuccagcuacucaugcaaucgaccccagcaaccaacaaccgugcgagacgcgaacucccccgcuucaugaacuacacccuaaacaacgccaaaaagaccaacguaacucuauccaagaaacgcaaacgccgcuuccucggauuccuccucggcgucggcuccgcaaucgccagcggcgucgccguuagcaaaguccuucaccucgaaggagaaguaaacaaaauuaaaagcgcccucuuauccacaaacaaggccguaguaucccugucaaacggcgucuccguccuuacauccaaaguccucgaccucaagaacuacauagacaaacagcuacuacccauuguaaauaaacaaagcugcucaauuagcaacaucgaaaccguaaucgaguuccagcagaaaaacaacagacuucucgaaaucacccgcgaguucagcgucaacgccggcguaaccaccccugucucaacauacaugcuaaccaacagcgaacugcucucccucaucaacgacaugcccaucaccaacgaccaaaagaaacucaugagcaacaacguacaaaucgugcgccaacaguccuacucaauaaugucaaucaucaaagaagaagugcuagcauacgucguacaacuaccacucuacggcguaauagauacccccugcuggaagcuccauaccuccccacucuguaccaccaacaccaaagaaggcucaaacaucugccuaacgcgcacagaccguggaugguacugugacaacgccggcuccgucuccuucuucccucaagccgaaacaugcaaaguccaauccaacagagucuucugcgauaccaugaacucccugacacucccaagcgaagucaaccuuugcaacgucgauaucuuuaaccccaaauacgacugcaagaucaugacaucaaaaaccgacguauccuccucuguaauaaccucccuaggcgcaaucguaucaugcuacggcaaaaccaaauguaccgccuccaacaaaaaucgcggcaucaucaaaaccuucucgaacggcugcgacuacgucuccaacaaaggcguagacacaguuuccguaggcaacacccucuacuacgucaauaaacaggaaggcaagucccucuacgucaaaggcgaacccaucaucaauuucuacgacccccucguuuuccccuccgaugaguucgacgcaagcaucagccaggucaacgaaaagauaaaccagucccucgccuucauccgcaaaucagaugaacuccuucacaacguuaacgcaggcaagagcaccaccaacaucaugaucacaacuauaaucaucgucauaaucgucauccuacucucacuaaucgccgucggucuccuacuauauuguaaagcccgaucaacaccggucacacucuccaaagaccaacucuccggaaucaacaauaucgcuuucucgaacuaaggacuagugcaucacauuuaaaagcaucucagccuaccaugagaauaagagaaagaaaaugaagaucaauagcuuauucaucucuuuuucuuuuucguugguguaaagccaacacccugucuaaaaaacauaaauuucuuuaaucauuuugccucuuuucucugugcuucaauuaauaaaaaauggaaagaaccuagaucuaaaaaaaaaaaaaaaaaaaaaaaaaaaaaaaaaaaaaaaaaaaaaaaaaaaaaaaaaaaaaaaaugcaucccccccccccccccccccccccccccccccaaaggcucuuuucagagccaccagaauu

SEQ ID NO: 465 - RNA, 2107 nt, Artificial Sequence
  mRNA product Design i-2 comprising derived and/or modified sequence from HRSV(A2)__F0 (artificial)
ggggcgcugccuacggagguggcagccaucuccuucucggcaucaagcuuaccauggaguugcuaauccucaaagcaaaugcaauuaccacaauccucacugcagucacauuuuguuuugcuucuggucaaaacaucacugaagaauuuuaucaaucaacaugcagugcaguuagcaaaggcuaucuuagugcucugagaacugguugguauaccaguguuauaacuauagaauuaaguaauaucaaggaaaauaaguguaauggaacagaugcuaagguaaaauugauaaaacaagaauuagauaaauauaaaaaugcuguaacagaauugcaguugcucaugcaaagcacaccagcaacaaacaaucgagccagaagagaacuaccaagguuuaugaauuauacacucaacaaugccaaaaaaaccaauguaacauuaagcaagaaaaggaaaagaagauuucuugguuuuuuguuagguguuggaucugcaaucgccaguggcguugcuguaucuaagguccugcaccuagaaggggaagugaacaagaucaaaagugcucuacuauccacaaacaaggcuguagucagcuuaucaaauggaguuagugucuuaaccagcaaaguguuagaccucaaaaacuauauagauaaacaauuguuaccuauugugaacaagcaaagcugcagcauaucaaauauagaaacugugauagaguuccaacaaaagaacaacagacuacuagagauuaccagggaauuuaguguuaaugcagguguaacuacaccuguaagcacuuacauguuaacuaauagugaauuauugucauuaaucaaugauaugccuauaacaaaugaucagaaaaaguuaauguccaacaauguucaaauaguuagacagcaaaguuacucuaucauguccauaauaaaagaggaagucuuagcauauguaguacaauuaccacuauaugguguuauagauacacccuguuggaaacuacacacauccccucuauguacaaccaacacaaaagaaggguccaacaucuguuuaacaagaacugacagaggaugguacugugacaaugcaggaucaguaucuuucuucccacaagcugaaacauguaaaguucaaucaaaucgaguauuuugugacacaaugaacaguuuaacauuaccaagugaaguaaaucucugcaauguugacauauucaaccccaaauaugauuguaaaauuaugacuucaaaaacagauguaagcagcuccguuaucacaucucuaggagccauugugucaugcuauggcaaaacuaaauguacagcauccaauaaaaaucguggaaucauaaagacauuuucuaacgggugcgauuauguaucaaauaaagggguggacacugugucuguagguaacacauuauauuauguaaauaagcaagaagguaaaagucucuauguaaaaggugaaccaauaauaaauuucuaugacccauuaguauuccccucugaugaauuugaugcaucaauaucucaagucaacgagaagauuaaccagagccuagcauuuauucguaaauccgaugaauuauuacauaauguaaaugcugguaaauccaccacaaauaucaugauaacuacuauaauuauagugauuauaguaauauuguuaucauuaauugcuguuggacugcucuuauacuguaaggccagaagcacaccagucacacuaagcaaagaucaacugagugguauaaauaauauugcauuuaguaacuaaggacuagugcaucacauuuaaaagcaucucagccuaccaugagaauaagagaaagaaaaugaagaucaauagcuuauucaucucuuuuucuuuuucguugguguaaagccaacacccugucuaaaaaacauaaauuucuuuaaucauuuugccucuuuucucugugcuucaauuaauaaaaaauggaaagaaccuagaucuaaaaaaaaaaaaaaaaaaaaaaaaaaaaaaaaaaaaaaaaaaaaaaaaaaaaaaaaaaaaaaaaugcaucccccccccccccccccccccccccccccccaaaggcucuuuucagagccaccagaauu

SEQ ID NO: 466 - RNA, 2107 nt, Artificial Sequence
  mRNA product Design i-2 comprising derived and/or modified sequence from HRSV(A2)__F0 (opt1) R3737/R3938
ggggcgcugccuacggagguggcagccaucuccuucucggcaucaagcuuaccauggagcugcucauccugaaggccaacgccaucaccaccauccugacggcggugaccuucugcuucgccagcggccagaacaucaccgaggaguucuaccaguccaccugcagcgccgucuccaagggguaccucagcgcccugcggacgggcugguacaccuccgugaucaccaucgagcugagcaacaucaaggagaacaagugcaacgggaccgacgccaaggugaagcucaucaagcaggagcuggacaaguacaagaacgcggucacggagcugcagcuccugaugcaguccaccccggcaaccaacaaccgcgcccggcgcgagcugccccgguucaugaacuacacccucaacaacgccaagaagacgaacgugacccugagcaagaagcgcaagcggcgcuuccugggcuuccuccugggggugggcuccgccaucgcgagcggcgucgccguguccaaggugcugcaccucgagggggaggucaacaagaucaagagcgcccugcuguccaccaacaaggccguggugagccucuccaacggcgucagcgugcugaccuccaaggugcuggaccucaagaacuacaucgacaagcagcugcugcccaucgucaacaagcagagcugcuccaucagcaacaucgagacggugaucgaguuccagcagaagaacaaccggcuccuggagaucacccgcgaguucagcgugaacgccggggucaccacccccguguccacguacaugcugaccaacagcgagcuccugucccugaucaacgacaugccgaucaccaacgaccagaagaagcucaugagcaacaacgugcagaucguccggcagcaguccuacagcaucauguccaucaucaaggaggaggugcuggcguacgugguccagcugccccucuacggcgugaucgacacccccugcuggaagcugcacacgagcccccugugcaccaccaacaccaaggagggguccaacaucugccucacgcgcaccgaccggggcugguacugcgacaacgccggcagcgucuccuucuucccgcaggccgagaccugcaaggugcagagcaaccgcguguucugcgacaccaugaacucccugacgcugcccagcgagguaaaccucugcaacgucgacaucuucaaccccaaguacgacugcaagaucaugaccuccaagaccgacgugagcuccagcgugaucaccucccugggggccaucgucagcugcuacggcaagacgaagugcaccgccagcaacaagaaccgggggaucaucaagaccuucuccaacggcugcgacuacgugagcaacaagggcguggacaccguguccgucgggaacacccuguacuacgugaacaagcaggagggcaagagccucuacgugaagggggagcccaucaucaacuucuacgacccgcuggucuuccccuccgacgaguucgacgcgagcaucucccaggugaacgagaagaucaaccagagccuggccuucauccgcaaguccgacgagcugcuccacaacgugaacgccggcaagagcacgaccaacaucaugaucaccaccaucaucaucgucaucaucgugauccugcugucccucaucgccguggggcugcugcucuacugcaaggcccggagcacgcccgucacccuguccaaggaccagcugagcggcaucaacaacaucgcguucuccaacugaggacuagugcaucacauuuaaaagcaucucagccuaccaugagaauaagagaaagaaaaugaagaucaauagcuuauucaucucuuuuucuuuuucguugguguaaagccaacacccugucuaaaaaacauaaauuucuuuaaucauuuugccucuuuucucugugcuucaauuaauaaaaaauggaaagaaccuagaucuaaaaaaaaaaaaaaaaaaaaaaaaaaaaaaaaaaaaaaaaaaaaaaaaaaaaaaaaaaaaaaaaugcaucccccccccccccccccccccccccccccccaaaggcucuuuucagagccaccagaauu

SEQ ID NO: 467 - RNA, 2107 nt, Artificial Sequence
  mRNA product Design i-2 comprising derived and/or modified sequence from HRSV(A2)__F0 (opt1)
ggggcgcugccuacggagguggcagccaucuccuucucggcaucaagcuuaccauggagcugcucauccugaaggccaacgccaucaccaccauccugacggcggugaccuucugcuucgccagcggccagaacaucaccgaggaguucuaccaguccacgugcagcgccgucuccaagggguaccucagcgcccugcgcaccggcugguacaccuccgugaucaccaucgagcugagcaacaucaaggagaacaagugcaacgggaccgacgccaaggugaagcucaucaagcaggagcuggacaaguacaagaacgcggucacggagcugcagcuccugaugcaguccacccccgccaccaacaaccgggcccgccgggagcugccgcgcuucaugaacuacacccucaacaacgccaagaagacgaacgugacccugagcaagaagcggaagcgccgguuccugggcuuccuccugggggugggcuccgcgaucgccagcggcgucgccguguccaaggugcugcaccucgagggggaggucaacaagaucaagagcgcccugcuguccaccaacaaggccguggugagccucuccaacggcgucagcgugcugaccuccaaggugcuggaccucaagaacuacaucgacaagcagcugcugcccaucgucaacaagcagagcugcuccaucagcaacaucgagacggugaucgaguuccagcagaagaacaaccgccuccuggagaucacccgggaguucagcgugaacgcgggggucaccacccccguguccacguacaugcugaccaacagcgagcuccugucccugaucaacgacaugcccaucaccaacgaccagaagaagcucaugagcaacaacgugcagaucguccgccagcaguccuacagcaucauguccaucaucaaggaggaggugcuggccuacgugguccagcugccgcucuacggcgugaucgacacccccugcuggaagcugcacacgagcccccugugcaccaccaacaccaaggagggguccaacaucugccucacgcggaccgaccgcggcugguacugcgacaacgccggcagcgucuccuucuucccccaggccgagaccugcaaggugcagagcaaccggguguucugcgacaccaugaacucccugacgcugccgagcgaggucaaccucugcaacguggacaucuucaaccccaaguacgacugcaagaucaugaccuccaagaccgacgugagcuccagcgucaucaccucccugggggccaucgugagcugcuacggcaagacgaagugcaccgcgagcaacaagaaccgcgggaucaucaagaccuucuccaacggcugcgacuacgugagcaacaagggcgucgacaccguguccguggggaacacccuguacuacgucaacaagcaggagggcaagagccucuacgugaagggggagcccaucaucaacuucuacgacccccugguguucccguccgacgaguucgacgccagcaucucccaggucaacgagaagaucaaccagagccuggccuucauccggaaguccgacgagcuccugcacaacgugaacgccggcaagagcacgaccaacaucaugaucaccaccaucaucaucgugaucaucgucauccugcugucccucaucgccguggggcugcugcucuacugcaaggcgcgcagcacgcccgugacccuguccaaggaccagcugagcggcaucaacaacaucgccuucuccaacugaggacuagugcaucacauuuaaaagcaucucagccuaccaugagaauaagagaaagaaaaugaagaucaauagcuuauucaucucuuuuucuuuuucguugguguaaagccaacacccugucuaaaaaacauaaauuucuuuaaucauuuugccucuuuucucugugcuucaauuaauaaaaaauggaaagaaccuagaucuaaaaaaaaaaaaaaaaaaaaaaaaaaaaaaaaaaaaaaaaaaaaaaaaaaaaaaaaaaaaaaaaugcaucccccccccccccccccccccccccccccccaaaggcucuuuucagagccaccagaauu

SEQ ID NO: 468 - RNA, 2107 nt, Artificial Sequence
  mRNA product Design i-2 comprising derived and/or modified sequence from HRSV(A2)__F0 (opt2)
ggggcgcugccuacggagguggcagccaucuccuucucggcaucaagcuuaccauggagcuccucauccucaaggccaacgccaucaccaccauccucaccgccgucaccuucugcuucgccuccggccagaacaucaccgaggaguucuaccaguccaccugcuccgccgucuccaagggcuaccucuccgcccuccgcaccggcugguacaccuccgucaucaccaucgagcucuccaacaucaaggagaacaagugcaacggcaccgacgccaaggucaagcucaucaagcaggagcucgacaaguacaagaacgccgucaccgagcuccagcuccucaugcaguccacccccgccaccaacaaccgcgcccgccgcgagcucccccgcuucaugaacuacacccucaacaacgccaagaagaccaacgucacccucuccaagaagcgcaagcgccgcuuccucggcuuccuccucggcgucggcuccgccaucgccuccggcgucgccgucuccaagguccuccaccucgagggcgaggucaacaagaucaaguccgcccuccucuccaccaacaaggccgucgucucccucuccaacggcgucuccguccucaccuccaagguccucgaccucaagaacuacaucgacaagcagcuccuccccaucgucaacaagcaguccugcuccaucuccaacaucgagaccgucaucgaguuccagcagaagaacaaccgccuccucgagaucacccgcgaguucuccgucaacgccggcgucaccacccccgucuccaccuacaugcucaccaacuccgagcuccucucccucaucaacgacaugcccaucaccaacgaccagaagaagcucauguccaacaacguccagaucguccgccagcaguccuacuccaucauguccaucaucaaggaggagguccucgccuacgucguccagcucccccucuacggcgucaucgacacccccugcuggaagcuccacaccuccccccucugcaccaccaacaccaaggagggcuccaacaucugccucacccgcaccgaccgcggcugguacugcgacaacgccggcuccgucuccuucuucccccaggccgagaccugcaagguccaguccaaccgcgucuucugcgacaccaugaacucccucacccuccccuccgaggucaaccucugcaacgucgacaucuucaaccccaaguacgacugcaagaucaugaccuccaagaccgacgucuccuccuccgucaucaccucccucggcgccaucgucuccugcuacggcaagaccaagugcaccgccuccaacaagaaccgcggcaucaucaagaccuucuccaacggcugcgacuacgucuccaacaagggcgucgacaccgucuccgucggcaacacccucuacuacgucaacaagcaggagggcaagucccucuacgucaagggcgagcccaucaucaacuucuacgacccccucgucuuccccuccgacgaguucgacgccuccaucucccaggucaacgagaagaucaaccagucccucgccuucauccgcaaguccgacgagcuccuccacaacgucaacgccggcaaguccaccaccaacaucaugaucaccaccaucaucaucgucaucaucgucauccuccucucccucaucgccgucggccuccuccucuacugcaaggcccgcuccacccccgucacccucuccaaggaccagcucuccggcaucaacaacaucgccuucuccaacugaggacuagugcaucacauuuaaaagcaucucagccuaccaugagaauaagagaaagaaaaugaagaucaauagcuuauucaucucuuuuucuuuuucguugguguaaagccaacacccugucuaaaaaacauaaauuucuuuaaucauuuugccucuuuucucugugcuucaauuaauaaaaaauggaaagaaccuagaucuaaaaaaaaaaaaaaaaaaaaaaaaaaaaaaaaaaaaaaaaaaaaaaaaaaaaaaaaaaaaaaaaugcaucccccccccccccccccccccccccccccccaaaggcucuuuucagagccaccagaauu

SEQ ID NO: 469 - RNA, 2107 nt, Artificial Sequence
  mRNA product Design i-2 comprising derived and/or modified sequence from HRSV(A2)__F0 (opt3)
ggggcgcugccuacggagguggcagccaucuccuucucggcaucaagcuuaccauggagcugcucauccuuaaggccaacgcuauuaccacaauacugacugcagugacguucugcuuugccagcggccagaauaucaccgaagaguucuaccaauccacauguucugcggucucaaaaggguauuugagugcuuuaagaacuggaugguacaccagcguuauuacaaucgaacuguccaacauuaaggagaauaaaugcaacgguaccgacgccaaggugaaacuaaucaagcaggaacucgauaaguauaaaaaugcaguaacugagcugcagcuucugaugcagucuacacccgccaccaacaauagggcucggcgcgaguugccucgauuuaugaacuacacgcucaauaacgcaaagaaaacuaaugugacccugucgaagaaacguaagagaagguuccugggcuuucucuuaggggucggaucagccauagcuagcggcguggccguuaguaaggugcugcaccuugaaggugaggucaacaaaaucaaguccgcguugcugucuacaaauaaagcagugguaagccuauccaacgggguuucagugcucacuucuaagguccuggaccuuaaaaauuauauugauaagcaacuguugccaaucgugaacaaacagagcuguucuauuuccaacaucgaaaccgugauagaguuccagcagaagaauaaccggcuccuggagauuacacgcgaauuuucagucaaugccggaguuaccacgccggugagcacuuacauguuaacaaacagugagcugcucucucuuaucaaugacaugcccauuaccaacgaucaaaagaaacugauguccaauaacguacagaucgugagacagcagagcuauucgaucaugucuauuauaaaggaagaggucuuggcuuacgugguucaacuaccucuguacggcgugaucgacacuccaugcuggaaacuccauacauccccacuguguaccacgaauaccaaggaaggcucaaacauuugccuuacaaggacugaucgggggugguauugugacaaugccggaagugucagcuucuuuccucaggcagagaccugcaaagugcaguccaaccgcguauucugugauacaaugaauagucugacuuugccaagcgagguuaaccucugcaauguggacaucuuuaaccccaaguacgauuguaagauaaugaccucaaaaacagacgucaguuccagcgugauuaccucucugggugcuaucgucucaugcuauggcaagacuaaaugcacggccaguaacaagaaucgagggaucauuaaaacauucagcaacggaugugauuacguguccaauaagggcguugacaccgugucuguagguaacacuuuauauuacgucaauaagcaagaagggaaaucgcuguaugugaagggagagccuaucauuaacuuuuacgacccccuaguuuucccgagcgaugaauuugacgcguccauaucacaggugaaugagaaaaucaaccagagucucgccuucauuagaaagucugaugaacugcuucacaaugucaacgcaggcaaaagcaccacaaauaucaugaucaccacuauuauaaucgugauuaucguaauuuugcugucccucaucgcugugggccugcuucuguacugcaaggccaggucaacacccguuacguugagcaaggaccagcucucugggauaaacaauaucgcuuucuccaacugaggacuagugcaucacauuuaaaagcaucucagccuaccaugagaauaagagaaagaaaaugaagaucaauagcuuauucaucucuuuuucuuuuucguugguguaaagccaacacccugucuaaaaaacauaaauuucuuuaaucauuuugccucuuuucucugugcuucaauuaauaaaaaauggaaagaaccuagaucuaaaaaaaaaaaaaaaaaaaaaaaaaaaaaaaaaaaaaaaaaaaaaaaaaaaaaaaaaaaaaaaaugcaucccccccccccccccccccccccccccccccaaaggcucuuuucagagccaccagaauu

SEQ ID NO: 470 - RNA, 2107 nt, Artificial Sequence
  mRNA product Design i-2 comprising derived and/or modified sequence from HRSV(A2)__F0 (opt4)
ggggcgcugccuacggagguggcagccaucuccuucucggcaucaagcuuaccauggagcugcugauccugaaggccaacgccaucaccaccauccugaccgccgugaccuucugcuucgccagcggccagaacaucaccgaggaguucuaccagagcaccugcagcgccgugagcaagggcuaccugagcgcccugagaaccggcugguacaccagcgugaucaccaucgagcugagcaacaucaaggagaacaagugcaacggcaccgacgccaaggugaagcugaucaagcaggagcuggacaaguacaagaacgccgugaccgagcugcagcugcugaugcagagcacccccgccaccaacaacagagccagaagagagcugcccagauucaugaacuacacccugaacaacgccaagaagaccaacgugacccugagcaagaagagaaagagaagauuccugggcuuccugcugggcgugggcagcgccaucgccagcggcguggccgugagcaaggugcugcaccuggagggcgaggugaacaagaucaagagcgcccugcugagcaccaacaaggccguggugagccugagcaacggcgugagcgugcugaccagcaaggugcuggaccugaagaacuacaucgacaagcagcugcugcccaucgugaacaagcagagcugcagcaucagcaacaucgagaccgugaucgaguuccagcagaagaacaacagacugcuggagaucaccagagaguucagcgugaacgccggcgugaccacccccgugagcaccuacaugcugaccaacagcgagcugcugagccugaucaacgacaugcccaucaccaacgaccagaagaagcugaugagcaacaacgugcagaucgugagacagcagagcuacagcaucaugagcaucaucaaggaggaggugcuggccuacguggugcagcugccccuguacggcgugaucgacacccccugcuggaagcugcacaccagcccccugugcaccaccaacaccaaggagggcagcaacaucugccugaccagaaccgacagaggcugguacugcgacaacgccggcagcgugagcuucuucccccaggccgagaccugcaaggugcagagcaacagaguguucugcgacaccaugaacagccugacccugcccagcgaggugaaccugugcaacguggacaucuucaaccccaaguacgacugcaagaucaugaccagcaagaccgacgugagcagcagcgugaucaccagccugggcgccaucgugagcugcuacggcaagaccaagugcaccgccagcaacaagaacagaggcaucaucaagaccuucagcaacggcugcgacuacgugagcaacaagggcguggacaccgugagcgugggcaacacccuguacuacgugaacaagcaggagggcaagagccuguacgugaagggcgagcccaucaucaacuucuacgacccccugguguuccccagcgacgaguucgacgccagcaucagccaggugaacgagaagaucaaccagagccuggccuucaucagaaagagcgacgagcugcugcacaacgugaacgccggcaagagcaccaccaacaucaugaucaccaccaucaucaucgugaucaucgugauccugcugagccugaucgccgugggccugcugcuguacugcaaggccagaagcacccccgugacccugagcaaggaccagcugagcggcaucaacaacaucgccuucagcaacugaggacuagugcaucacauuuaaaagcaucucagccuaccaugagaauaagagaaagaaaaugaagaucaauagcuuauucaucucuuuuucuuuuucguugguguaaagccaacacccugucuaaaaaacauaaauuucuuuaaucauuuugccucuuuucucugugcuucaauuaauaaaaaauggaaagaaccuagaucuaaaaaaaaaaaaaaaaaaaaaaaaaaaaaaaaaaaaaaaaaaaaaaaaaaaaaaaaaaaaaaaaugcaucccccccccccccccccccccccccccccccaaaggcucuuuucagagccaccagaauu

SEQ ID NO: 471 - RNA, 2107 nt, Artificial Sequence
  mRNA product Design i-2 comprising derived and/or modified sequence from HRSV(A2)__F0 (opt5)
ggggcgcugccuacggagguggcagccaucuccuucucggcaucaagcuuaccauggagcugcucauccugaaggccaacgcuauuaccacaauccuuacggccgugaccuucugcuuugcgagcggccagaauauuacagaagaguucuaccaauccaccuguucugcugucagcaaaggguaucuguccgcccucagaacaggaugguacaccucuguuaucacaauugaacugagcaacaucaaggagaauaaaugcaacggcaccgacgccaaggugaaacuuaucaagcaggaacuggauaaguauaaaaaugcugugacggagcuccagcugcugaugcaguccacccccgccacaaacaaucgggcucgcagagagcucccucgguuuaugaacuacacccugaauaacgccaagaaaacaaaugucacccuuucuaagaaacgcaagagacgguuccugggguuucuccugggagugggcagcgcgauugccuccgggguugcugugagcaagguccuucaccuggaaggagaggugaacaaaaucaagucugcccuccuguccacgaauaaagcuguugugagccugucuaacggcgucuccgugcucacaagcaaggugcuggaccuuaaaaauuauauugauaagcaacugcucccgaucgucaacaaacagucuuguuccauuagcaacaucgaaaccguuauugaguuccagcagaagaauaaccgccugcuugagaucacaagagaauuuuccgugaaugccggcgugaccacccccgucucuacauacaugcugacgaacagcgagcuccugucccugaucaaugacaugccuauuaccaacgaucaaaagaaacucaugagcaauaacgugcagaucguucggcagcagucuuauuccauuaugagcaucauuaaggaagaggugcuggcguacgucgugcaacuuccccuguacgggguuaucgacacaccuugcuggaaacuccauaccucuccccuguguacaaccaauacgaaggaaggaagcaacaucugccuuacacgcaccgauagaggcugguauugugacaaugccggguccgugucuuucuuuccucaggcugagaccugcaaaguccagagcaaccggguguucugugauacaaugaacucccugacccucccgagcgaggucaaucugugcaauguggacauuuuuaaccccaaguacgauuguaagaucaugacaucuaaaacggacguuuccagcucugugauuaccucccugggagccaucgucagcugcuauggcaagacaaaaugcaccgcuuccaacaagaaucgcgggauuaucaaaacauucucuaacggaugugauuacgugagcaauaagggcguugacaccguguccgucggcaacacgcucuauuacgugaauaagcaagaagggaaaucucuguaugugaagggagagccuaucauuaacuuuuacgacccccuuguuuucccuagcgaugaauuugacgccuccaucagccaggucaaugagaaaauuaaccagucucuggccuucaucagaaaguccgaugaacuccugcacaaugugaacgcuggcaaaagcaccacaaauauuaugaucaccacaauuaucaucgugauuaucgucauucugcuuucucucaucgcgguggggcugcugcucuacugcaaggcccgguccacccccguuacgcugagcaaggaccagcuuucuggaauuaacaauaucgcuuucagcaacugaggacuagugcaucacauuuaaaagcaucucagccuaccaugagaauaagagaaagaaaaugaagaucaauagcuuauucaucucuuuuucuuuuucguugguguaaagccaacacccugucuaaaaaacauaaauuucuuuaaucauuuugccucuuuucucugugcuucaauuaauaaaaaauggaaagaaccuagaucuaaaaaaaaaaaaaaaaaaaaaaaaaaaaaaaaaaaaaaaaaaaaaaaaaaaaaaaaaaaaaaaaugcaucccccccccccccccccccccccccccccccaaaggcucuuuucagagccaccagaauu

SEQ ID NO: 472 - RNA, 2107 nt, Artificial Sequence
  mRNA product Design i-2 comprising derived and/or modified sequence from HRSV(A2)__F0 (opt6)
ggggcgcugccuacggagguggcagccaucuccuucucggcaucaagcuuaccauggaacuucuaauauuaaaagcuaacgcaaucacuacuaucuuaaccgcaguaacauucuguuuugcauccggccaaaacauaacagaagaauuuuaccaaucaacuugcucugcagucucaaaagguuaucuaucugcauuaagaacaggcugguacaccucaguaauaacgaucgaacuaucaaacaucaaagaaaacaaauguaauggaacagacgcaaaaguaaaacuaaucaaacaagaacuagacaaauacaaaaacgcaguaaccgaacuccaacuccucaugcaaaguacaccagcaacaaauaacagagcaagacgugaacuaccacguuuuaugaauuacacgcucaauaacgcaaaaaaaacaaauguuacccuaucaaaaaaacgaaaaagaagauuccucggauuccuacuaggcguaggcucagcaauagcuucaggaguagcaguaucaaaaguacuccaccucgaaggagaaguaaacaaaaucaaaagcgcucuccucucaacaaacaaagcaguuguuucacucucaaacggaguaucaguacuaaccucaaaaguacuugaccuaaaaaauuauauagacaaacaacuauuaccaauaguaaacaaacaaagcugcuccaucuccaacaucgagacagucauagaauuucaacaaaaaaauaaccgccuauuagaaauaaccagagaauuuucaguaaacgcaggaguaacuaccccaguaucaacauauauguuaacaaacucagaacuccuaagucuaaucaacgacaugccaauaaccaacgaccaaaaaaaacuaaugagcaacaauguacaaauaguucgucaacaaucuuacuccauaaugucuauaauaaaagaagaaguacucgccuauguaguccaacuaccacuauacggagucaucgauacaccaugcuggaaacuccacacauccccacucuguacuacuaacaccaaagaagguucaaauauaugccuaaccagaacagauagagguugguacugcgauaaugcaggaucaguauccuuuuucccccaagccgaaacaugcaaaguucaauccaauagaguauuuugugauacaaugaacucuuuaacccucccauccgaagucaaucuauguaacgucgacauauuuaacccaaaauacgauugcaaaauaaugacaucaaaaacagacgucucauccucaguuauaacguccuuaggcgcuauaguaucaugcuacggcaaaacaaaauguacagcaucaaacaaaaacagaggaaucauaaaaacuuucucuaacgguugcgacuauguauccaacaaaggugucgacacaguauccguaggcaacacccuuuacuauguuaauaaacaagaaggaaaaucucuauauguaaaaggcgaaccaauuauaaauuuuuacgacccccuugucuuucccucugacgaauuugacgcuuccauaucacaagucaacgaaaaaaucaaccaaucccucgcauucauacgcaaaucagacgaacuacuacauaacgucaacgcaggcaaauccacaacaaacauaaugauaaccacaaucauaauuguaauaauaguaauacuacuuucucuaauagcagucggauuacucuuauacuguaaagcucgaucaacaccagucacccucucuaaagaucaacuauccggaaucaacaacauagcuuucucaaacuaaggacuagugcaucacauuuaaaagcaucucagccuaccaugagaauaagagaaagaaaaugaagaucaauagcuuauucaucucuuuuucuuuuucguugguguaaagccaacacccugucuaaaaaacauaaauuucuuuaaucauuuugccucuuuucucugugcuucaauuaauaaaaaauggaaagaaccuagaucuaaaaaaaaaaaaaaaaaaaaaaaaaaaaaaaaaaaaaaaaaaaaaaaaaaaaaaaaaaaaaaaaugcaucccccccccccccccccccccccccccccccaaaggcucuuuucagagccaccagaauu

SEQ ID NO: 473 - RNA, 2107 nt, Artificial Sequence
  mRNA product Design i-2 comprising derived and/or modified sequence from HRSV(A2)__F0 (opt11)
ggggcgcugccuacggagguggcagccaucuccuucucggcaucaagcuuaccauggaacuccucauacucaaagccaacgcaaucacaaccauacucaccgccgucaccuucugcuuugcaucuggccagaacaucacugaagaguucuaccaauccacaugcuccgccguaagcaaaggcuaccuauccgcccuacgcaccggcugguacaccagcguaaucaccauagaacucuccaauauaaaagaaaacaaaugcaacggcaccgacgcaaaagucaagcuaauaaaacaagaacucgacaaauacaaaaacgccguuaccgaacuccagcuacucaugcaaucgaccccagcaaccaacaaccgugcgagacgcgaacucccccgcuucaugaacuacacccuaaacaacgccaaaaagaccaacguaacucuauccaagaaacgcaaacgccgcuuccucggauuccuccucggcgucggcuccgcaaucgccagcggcgucgccguuagcaaaguccuucaccucgaaggagaaguaaacaaaauuaaaagcgcccucuuauccacaaacaaggccguaguaucccugucaaacggcgucuccguccuuacauccaaaguccucgaccucaagaacuacauagacaaacagcuacuacccauuguaaauaaacaaagcugcucaauuagcaacaucgaaaccguaaucgaguuccagcagaaaaacaacagacuucucgaaaucacccgcgaguucagcgucaacgccggcguaaccaccccugucucaacauacaugcuaaccaacagcgaacugcucucccucaucaacgacaugcccaucaccaacgaccaaaagaaacucaugagcaacaacguacaaaucgugcgccaacaguccuacucaauaaugucaaucaucaaagaagaagugcuagcauacgucguacaacuaccacucuacggcguaauagauacccccugcuggaagcuccauaccuccccacucuguaccaccaacaccaaagaaggcucaaacaucugccuaacgcgcacagaccguggaugguacugugacaacgccggcuccgucuccuucuucccucaagccgaaacaugcaaaguccaauccaacagagucuucugcgauaccaugaacucccugacacucccaagcgaagucaaccuuugcaacgucgauaucuuuaaccccaaauacgacugcaagaucaugacaucaaaaaccgacguauccuccucuguaauaaccucccuaggcgcaaucguaucaugcuacggcaaaaccaaauguaccgccuccaacaaaaaucgcggcaucaucaaaaccuucucgaacggcugcgacuacgucuccaacaaaggcguagacacaguuuccguaggcaacacccucuacuacgucaauaaacaggaaggcaagucccucuacgucaaaggcgaacccaucaucaauuucuacgacccccucguuuuccccuccgaugaguucgacgcaagcaucagccaggucaacgaaaagauaaaccagucccucgccuucauccgcaaaucagaugaacuccuucacaacguuaacgcaggcaagagcaccaccaacaucaugaucacaacuauaaucaucgucauaaucgucauccuacucucacuaaucgccgucggucuccuacuauauuguaaagcccgaucaacaccggucacacucuccaaagaccaacucuccggaaucaacaauaucgcuuucucgaacuaaggacuagugcaucacauuuaaaagcaucucagccuaccaugagaauaagagaaagaaaaugaagaucaauagcuuauucaucucuuuuucuuuuucguugguguaaagccaacacccugucuaaaaaacauaaauuucuuuaaucauuuugccucuuuucucugugcuucaauuaauaaaaaauggaaagaaccuagaucuaaaaaaaaaaaaaaaaaaaaaaaaaaaaaaaaaaaaaaaaaaaaaaaaaaaaaaaaaaaaaaaaugcaucccccccccccccccccccccccccccccccaaaggcucuuuucagagccaccagaauu

SEQ ID NO: 474 - RNA, 1942 nt, Artificial Sequence
  mRNA product Design i-3 comprising derived and/or modified sequence from HRSV(A2)__F0 (artificial)
gggagaaagcuuaccauggaguugcuaauccucaaagcaaaugcaauuaccacaauccucacugcagucacauuuuguuuugcuucuggucaaaacaucacugaagaauuuuaucaaucaacaugcagugcaguuagcaaaggcuaucuuagugcucugagaacugguugguauaccaguguuauaacuauagaauuaaguaauaucaaggaaaauaaguguaauggaacagaugcuaagguaaaauugauaaaacaagaauuagauaaauauaaaaaugcuguaacagaauugcaguugcucaugcaaagcacaccagcaacaaacaaucgagccagaagagaacuaccaagguuuaugaauuauacacucaacaaugccaaaaaaaccaauguaacauuaagcaagaaaaggaaaagaagauuucuugguuuuuuguuagguguuggaucugcaaucgccaguggcguugcuguaucuaagguccugcaccuagaaggggaagugaacaagaucaaaagugcucuacuauccacaaacaaggcuguagucagcuuaucaaauggaguuagugucuuaaccagcaaaguguuagaccucaaaaacuauauagauaaacaauuguuaccuauugugaacaagcaaagcugcagcauaucaaauauagaaacugugauagaguuccaacaaaagaacaacagacuacuagagauuaccagggaauuuaguguuaaugcagguguaacuacaccuguaagcacuuacauguuaacuaauagugaauuauugucauuaaucaaugauaugccuauaacaaaugaucagaaaaaguuaauguccaacaauguucaaauaguuagacagcaaaguuacucuaucauguccauaauaaaagaggaagucuuagcauauguaguacaauuaccacuauaugguguuauagauacacccuguuggaaacuacacacauccccucuauguacaaccaacacaaaagaaggguccaacaucuguuuaacaagaacugacagaggaugguacugugacaaugcaggaucaguaucuuucuucccacaagcugaaacauguaaaguucaaucaaaucgaguauuuugugacacaaugaacaguuuaacauuaccaagugaaguaaaucucugcaauguugacauauucaaccccaaauaugauuguaaaauuaugacuucaaaaacagauguaagcagcuccguuaucacaucucuaggagccauugugucaugcuauggcaaaacuaaauguacagcauccaauaaaaaucguggaaucauaaagacauuuucuaacgggugcgauuauguaucaaauaaagggguggacacugugucuguagguaacacauuauauuauguaaauaagcaagaagguaaaagucucuauguaaaaggugaaccaauaauaaauuucuaugacccauuaguauuccccucugaugaauuugaugcaucaauaucucaagucaacgagaagauuaaccagagccuagcauuuauucguaaauccgaugaauuauuacauaauguaaaugcugguaaauccaccacaaauaucaugauaacuacuauaauuauagugauuauaguaauauuguuaucauuaauugcuguuggacugcucuuauacuguaaggccagaagcacaccagucacacuaagcaaagaucaacugagugguauaaauaauauugcauuuaguaacuaaggacuaguuauaagacugacuagcccgaugggccucccaacgggcccuccuccccuccuugcaccgagauuaauaaaaaaaaaaaaaaaaaaaaaaaaaaaaaaaaaaaaaaaaaaaaaaaaaaaaaaaaaaaaaaaaugcaucccccccccccccccccccccccccccccccaaaggcucuuuucagagccaccagaauu

SEQ ID NO: 475 - RNA, 1942 nt, Artificial Sequence
  mRNA product Design i-3 comprising derived and/or modified sequence from HRSV(A2)__F0 (opt1) R6939/R7003
gggagaaagcuuaccauggagcugcucauccugaaggccaacgccaucaccaccauccugacggcggugaccuucugcuucgccagcggccagaacaucaccgaggaguucuaccaguccaccugcagcgccgucuccaagggguaccucagcgcccugcggacgggcugguacaccuccgugaucaccaucgagcugagcaacaucaaggagaacaagugcaacgggaccgacgccaaggugaagcucaucaagcaggagcuggacaaguacaagaacgcggucacggagcugcagcuccugaugcaguccaccccggcaaccaacaaccgcgcccggcgcgagcugccccgguucaugaacuacacccucaacaacgccaagaagacgaacgugacccugagcaagaagcgcaagcggcgcuuccugggcuuccuccugggggugggcuccgccaucgcgagcggcgucgccguguccaaggugcugcaccucgagggggaggucaacaagaucaagagcgcccugcuguccaccaacaaggccguggugagccucuccaacggcgucagcgugcugaccuccaaggugcuggaccucaagaacuacaucgacaagcagcugcugcccaucgucaacaagcagagcugcuccaucagcaacaucgagacggugaucgaguuccagcagaagaacaaccggcuccuggagaucacccgcgaguucagcgugaacgccggggucaccacccccguguccacguacaugcugaccaacagcgagcuccugucccugaucaacgacaugccgaucaccaacgaccagaagaagcucaugagcaacaacgugcagaucguccggcagcaguccuacagcaucauguccaucaucaaggaggaggugcuggcguacgugguccagcugccccucuacggcgugaucgacacccccugcuggaagcugcacacgagcccccugugcaccaccaacaccaaggagggguccaacaucugccucacgcgcaccgaccggggcugguacugcgacaacgccggcagcgucuccuucuucccgcaggccgagaccugcaaggugcagagcaaccgcguguucugcgacaccaugaacucccugacgcugcccagcgagguaaaccucugcaacgucgacaucuucaaccccaaguacgacugcaagaucaugaccuccaagaccgacgugagcuccagcgugaucaccucccugggggccaucgucagcugcuacggcaagacgaagugcaccgccagcaacaagaaccgggggaucaucaagaccuucuccaacggcugcgacuacgugagcaacaagggcguggacaccguguccgucgggaacacccuguacuacgugaacaagcaggagggcaagagccucuacgugaagggggagcccaucaucaacuucuacgacccgcuggucuuccccuccgacgaguucgacgcgagcaucucccaggugaacgagaagaucaaccagagccuggccuucauccgcaaguccgacgagcugcuccacaacgugaacgccggcaagagcacgaccaacaucaugaucaccaccaucaucaucgucaucaucgugauccugcugucccucaucgccguggggcugcugcucuacugcaaggcccggagcacgcccgucacccuguccaaggaccagcugagcggcaucaacaacaucgcguucuccaacugaggacuaguuauaagacugacuagcccgaugggccucccaacgggcccuccuccccuccuugcaccgagauuaauaaaaaaaaaaaaaaaaaaaaaaaaaaaaaaaaaaaaaaaaaaaaaaaaaaaaaaaaaaaaaaaaugcaucccccccccccccccccccccccccccccccaaaggcucuuuucagagccaccagaauu

SEQ ID NO: 476 - RNA, 1942 nt, Artificial Sequence
  mRNA product Design i-3 comprising derived and/or modified sequence from HRSV(A2)__F0 (opt1)
gggagaaagcuuaccauggagcugcucauccugaaggccaacgccaucaccaccauccugacggcggugaccuucugcuucgccagcggccagaacaucaccgaggaguucuaccaguccacgugcagcgccgucuccaagggguaccucagcgcccugcgcaccggcugguacaccuccgugaucaccaucgagcugagcaacaucaaggagaacaagugcaacgggaccgacgccaaggugaagcucaucaagcaggagcuggacaaguacaagaacgcggucacggagcugcagcuccugaugcaguccacccccgccaccaacaaccgggcccgccgggagcugccgcgcuucaugaacuacacccucaacaacgccaagaagacgaacgugacccugagcaagaagcggaagcgccgguuccugggcuuccuccugggggugggcuccgcgaucgccagcggcgucgccguguccaaggugcugcaccucgagggggaggucaacaagaucaagagcgcccugcuguccaccaacaaggccguggugagccucuccaacggcgucagcgugcugaccuccaaggugcuggaccucaagaacuacaucgacaagcagcugcugcccaucgucaacaagcagagcugcuccaucagcaacaucgagacggugaucgaguuccagcagaagaacaaccgccuccuggagaucacccgggaguucagcgugaacgcgggggucaccacccccguguccacguacaugcugaccaacagcgagcuccugucccugaucaacgacaugcccaucaccaacgaccagaagaagcucaugagcaacaacgugcagaucguccgccagcaguccuacagcaucauguccaucaucaaggaggaggugcuggccuacgugguccagcugccgcucuacggcgugaucgacacccccugcuggaagcugcacacgagcccccugugcaccaccaacaccaaggagggguccaacaucugccucacgcggaccgaccgcggcugguacugcgacaacgccggcagcgucuccuucuucccccaggccgagaccugcaaggugcagagcaaccggguguucugcgacaccaugaacucccugacgcugccgagcgaggucaaccucugcaacguggacaucuucaaccccaaguacgacugcaagaucaugaccuccaagaccgacgugagcuccagcgucaucaccucccugggggccaucgugagcugcuacggcaagacgaagugcaccgcgagcaacaagaaccgcgggaucaucaagaccuucuccaacggcugcgacuacgugagcaacaagggcgucgacaccguguccguggggaacacccuguacuacgucaacaagcaggagggcaagagccucuacgugaagggggagcccaucaucaacuucuacgacccccugguguucccguccgacgaguucgacgccagcaucucccaggucaacgagaagaucaaccagagccuggccuucauccggaaguccgacgagcuccugcacaacgugaacgccggcaagagcacgaccaacaucaugaucaccaccaucaucaucgugaucaucgucauccugcugucccucaucgccguggggcugcugcucuacugcaaggcgcgcagcacgcccgugacccuguccaaggaccagcugagcggcaucaacaacaucgccuucuccaacugaggacuaguuauaagacugacuagcccgaugggccucccaacgggcccuccuccccuccuugcaccgagauuaauaaaaaaaaaaaaaaaaaaaaaaaaaaaaaaaaaaaaaaaaaaaaaaaaaaaaaaaaaaaaaaaaugcaucccccccccccccccccccccccccccccccaaaggcucuuuucagagccaccagaauu

SEQ ID NO: 477 - RNA, 1942 nt, Artificial Sequence
  mRNA product Design i-3 comprising derived and/or modified sequence from HRSV(A2)__F0 (opt2)
gggagaaagcuuaccauggagcuccucauccucaaggccaacgccaucaccaccauccucaccgccgucaccuucugcuucgccuccggccagaacaucaccgaggaguucuaccaguccaccugcuccgccgucuccaagggcuaccucuccgcccuccgcaccggcugguacaccuccgucaucaccaucgagcucuccaacaucaaggagaacaagugcaacggcaccgacgccaaggucaagcucaucaagcaggagcucgacaaguacaagaacgccgucaccgagcuccagcuccucaugcaguccacccccgccaccaacaaccgcgcccgccgcgagcucccccgcuucaugaacuacacccucaacaacgccaagaagaccaacgucacccucuccaagaagcgcaagcgccgcuuccucggcuuccuccucggcgucggcuccgccaucgccuccggcgucgccgucuccaagguccuccaccucgagggcgaggucaacaagaucaaguccgcccuccucuccaccaacaaggccgucgucucccucuccaacggcgucuccguccucaccuccaagguccucgaccucaagaacuacaucgacaagcagcuccuccccaucgucaacaagcaguccugcuccaucuccaacaucgagaccgucaucgaguuccagcagaagaacaaccgccuccucgagaucacccgcgaguucuccgucaacgccggcgucaccacccccgucuccaccuacaugcucaccaacuccgagcuccucucccucaucaacgacaugcccaucaccaacgaccagaagaagcucauguccaacaacguccagaucguccgccagcaguccuacuccaucauguccaucaucaaggaggagguccucgccuacgucguccagcucccccucuacggcgucaucgacacccccugcuggaagcuccacaccuccccccucugcaccaccaacaccaaggagggcuccaacaucugccucacccgcaccgaccgcggcugguacugcgacaacgccggcuccgucuccuucuucccccaggccgagaccugcaagguccaguccaaccgcgucuucugcgacaccaugaacucccucacccuccccuccgaggucaaccucugcaacgucgacaucuucaaccccaaguacgacugcaagaucaugaccuccaagaccgacgucuccuccuccgucaucaccucccucggcgccaucgucuccugcuacggcaagaccaagugcaccgccuccaacaagaaccgcggcaucaucaagaccuucuccaacggcugcgacuacgucuccaacaagggcgucgacaccgucuccgucggcaacacccucuacuacgucaacaagcaggagggcaagucccucuacgucaagggcgagcccaucaucaacuucuacgacccccucgucuuccccuccgacgaguucgacgccuccaucucccaggucaacgagaagaucaaccagucccucgccuucauccgcaaguccgacgagcuccuccacaacgucaacgccggcaaguccaccaccaacaucaugaucaccaccaucaucaucgucaucaucgucauccuccucucccucaucgccgucggccuccuccucuacugcaaggcccgcuccacccccgucacccucuccaaggaccagcucuccggcaucaacaacaucgccuucuccaacugaggacuaguuauaagacugacuagcccgaugggccucccaacgggcccuccuccccuccuugcaccgagauuaauaaaaaaaaaaaaaaaaaaaaaaaaaaaaaaaaaaaaaaaaaaaaaaaaaaaaaaaaaaaaaaaaugcaucccccccccccccccccccccccccccccccaaaggcucuuuucagagccaccagaauu

SEQ ID NO: 478 - RNA, 1942 nt, Artificial Sequence
  mRNA product Design i-3 comprising derived and/or modified sequence from HRSV(A2)__F0 (opt3)
gggagaaagcuuaccauggagcugcucauccuuaaggccaacgcuauuaccacaauacugacugcagugacguucugcuuugccagcggccagaauaucaccgaagaguucuaccaauccacauguucugcggucucaaaaggguauuugagugcuuuaagaacuggaugguacaccagcguuauuacaaucgaacuguccaacauuaaggagaauaaaugcaacgguaccgacgccaaggugaaacuaaucaagcaggaacucgauaaguauaaaaaugcaguaacugagcugcagcuucugaugcagucuacacccgccaccaacaauagggcucggcgcgaguugccucgauuuaugaacuacacgcucaauaacgcaaagaaaacuaaugugacccugucgaagaaacguaagagaagguuccugggcuuucucuuaggggucggaucagccauagcuagcggcguggccguuaguaaggugcugcaccuugaaggugaggucaacaaaaucaaguccgcguugcugucuacaaauaaagcagugguaagccuauccaacgggguuucagugcucacuucuaagguccuggaccuuaaaaauuauauugauaagcaacuguugccaaucgugaacaaacagagcuguucuauuuccaacaucgaaaccgugauagaguuccagcagaagaauaaccggcuccuggagauuacacgcgaauuuucagucaaugccggaguuaccacgccggugagcacuuacauguuaacaaacagugagcugcucucucuuaucaaugacaugcccauuaccaacgaucaaaagaaacugauguccaauaacguacagaucgugagacagcagagcuauucgaucaugucuauuauaaaggaagaggucuuggcuuacgugguucaacuaccucuguacggcgugaucgacacuccaugcuggaaacuccauacauccccacuguguaccacgaauaccaaggaaggcucaaacauuugccuuacaaggacugaucgggggugguauugugacaaugccggaagugucagcuucuuuccucaggcagagaccugcaaagugcaguccaaccgcguauucugugauacaaugaauagucugacuuugccaagcgagguuaaccucugcaauguggacaucuuuaaccccaaguacgauuguaagauaaugaccucaaaaacagacgucaguuccagcgugauuaccucucugggugcuaucgucucaugcuauggcaagacuaaaugcacggccaguaacaagaaucgagggaucauuaaaacauucagcaacggaugugauuacguguccaauaagggcguugacaccgugucuguagguaacacuuuauauuacgucaauaagcaagaagggaaaucgcuguaugugaagggagagccuaucauuaacuuuuacgacccccuaguuuucccgagcgaugaauuugacgcguccauaucacaggugaaugagaaaaucaaccagagucucgccuucauuagaaagucugaugaacugcuucacaaugucaacgcaggcaaaagcaccacaaauaucaugaucaccacuauuauaaucgugauuaucguaauuuugcugucccucaucgcugugggccugcuucuguacugcaaggccaggucaacacccguuacguugagcaaggaccagcucucugggauaaacaauaucgcuuucuccaacugaggacuaguuauaagacugacuagcccgaugggccucccaacgggcccuccuccccuccuugcaccgagauuaauaaaaaaaaaaaaaaaaaaaaaaaaaaaaaaaaaaaaaaaaaaaaaaaaaaaaaaaaaaaaaaaaugcaucccccccccccccccccccccccccccccccaaaggcucuuuucagagccaccagaauu

SEQ ID NO: 479 - RNA, 1942 nt, Artificial Sequence
  mRNA product Design i-3 comprising derived and/or modified sequence from HRSV(A2)__F0 (opt4)
gggagaaagcuuaccauggagcugcugauccugaaggccaacgccaucaccaccauccugaccgccgugaccuucugcuucgccagcggccagaacaucaccgaggaguucuaccagagcaccugcagcgccgugagcaagggcuaccugagcgcccugagaaccggcugguacaccagcgugaucaccaucgagcugagcaacaucaaggagaacaagugcaacggcaccgacgccaaggugaagcugaucaagcaggagcuggacaaguacaagaacgccgugaccgagcugcagcugcugaugcagagcacccccgccaccaacaacagagccagaagagagcugcccagauucaugaacuacacccugaacaacgccaagaagaccaacgugacccugagcaagaagagaaagagaagauuccugggcuuccugcugggcgugggcagcgccaucgccagcggcguggccgugagcaaggugcugcaccuggagggcgaggugaacaagaucaagagcgcccugcugagcaccaacaaggccguggugagccugagcaacggcgugagcgugcugaccagcaaggugcuggaccugaagaacuacaucgacaagcagcugcugcccaucgugaacaagcagagcugcagcaucagcaacaucgagaccgugaucgaguuccagcagaagaacaacagacugcuggagaucaccagagaguucagcgugaacgccggcgugaccacccccgugagcaccuacaugcugaccaacagcgagcugcugagccugaucaacgacaugcccaucaccaacgaccagaagaagcugaugagcaacaacgugcagaucgugagacagcagagcuacagcaucaugagcaucaucaaggaggaggugcuggccuacguggugcagcugccccuguacggcgugaucgacacccccugcuggaagcugcacaccagcccccugugcaccaccaacaccaaggagggcagcaacaucugccugaccagaaccgacagaggcugguacugcgacaacgccggcagcgugagcuucuucccccaggccgagaccugcaaggugcagagcaacagaguguucugcgacaccaugaacagccugacccugcccagcgaggugaaccugugcaacguggacaucuucaaccccaaguacgacugcaagaucaugaccagcaagaccgacgugagcagcagcgugaucaccagccugggcgccaucgugagcugcuacggcaagaccaagugcaccgccagcaacaagaacagaggcaucaucaagaccuucagcaacggcugcgacuacgugagcaacaagggcguggacaccgugagcgugggcaacacccuguacuacgugaacaagcaggagggcaagagccuguacgugaagggcgagcccaucaucaacuucuacgacccccugguguuccccagcgacgaguucgacgccagcaucagccaggugaacgagaagaucaaccagagccuggccuucaucagaaagagcgacgagcugcugcacaacgugaacgccggcaagagcaccaccaacaucaugaucaccaccaucaucaucgugaucaucgugauccugcugagccugaucgccgugggccugcugcuguacugcaaggccagaagcacccccgugacccugagcaaggaccagcugagcggcaucaacaacaucgccuucagcaacugaggacuaguuauaagacugacuagcccgaugggccucccaacgggcccuccuccccuccuugcaccgagauuaauaaaaaaaaaaaaaaaaaaaaaaaaaaaaaaaaaaaaaaaaaaaaaaaaaaaaaaaaaaaaaaaaugcaucccccccccccccccccccccccccccccccaaaggcucuuuucagagccaccagaauu

SEQ ID NO: 480 - RNA, 1942 nt, Artificial Sequence
  mRNA product Design i-3 comprising derived and/or modified sequence from HRSV(A2)__F0 (opt5)
gggagaaagcuuaccauggagcugcucauccugaaggccaacgcuauuaccacaauccuuacggccgugaccuucugcuuugcgagcggccagaauauuacagaagaguucuaccaauccaccuguucugcugucagcaaaggguaucuguccgcccucagaacaggaugguacaccucuguuaucacaauugaacugagcaacaucaaggagaauaaaugcaacggcaccgacgccaaggugaaacuuaucaagcaggaacuggauaaguauaaaaaugcugugacggagcuccagcugcugaugcaguccacccccgccacaaacaaucgggcucgcagagagcucccucgguuuaugaacuacacccugaauaacgccaagaaaacaaaugucacccuuucuaagaaacgcaagagacgguuccugggguuucuccugggagugggcagcgcgauugccuccgggguugcugugagcaagguccuucaccuggaaggagaggugaacaaaaucaagucugcccuccuguccacgaauaaagcuguugugagccugucuaacggcgucuccgugcucacaagcaaggugcuggaccuuaaaaauuauauugauaagcaacugcucccgaucgucaacaaacagucuuguuccauuagcaacaucgaaaccguuauugaguuccagcagaagaauaaccgccugcuugagaucacaagagaauuuuccgugaaugccggcgugaccacccccgucucuacauacaugcugacgaacagcgagcuccugucccugaucaaugacaugccuauuaccaacgaucaaaagaaacucaugagcaauaacgugcagaucguucggcagcagucuuauuccauuaugagcaucauuaaggaagaggugcuggcguacgucgugcaacuuccccuguacgggguuaucgacacaccuugcuggaaacuccauaccucuccccuguguacaaccaauacgaaggaaggaagcaacaucugccuuacacgcaccgauagaggcugguauugugacaaugccggguccgugucuuucuuuccucaggcugagaccugcaaaguccagagcaaccggguguucugugauacaaugaacucccugacccucccgagcgaggucaaucugugcaauguggacauuuuuaaccccaaguacgauuguaagaucaugacaucuaaaacggacguuuccagcucugugauuaccucccugggagccaucgucagcugcuauggcaagacaaaaugcaccgcuuccaacaagaaucgcgggauuaucaaaacauucucuaacggaugugauuacgugagcaauaagggcguugacaccguguccgucggcaacacgcucuauuacgugaauaagcaagaagggaaaucucuguaugugaagggagagccuaucauuaacuuuuacgacccccuuguuuucccuagcgaugaauuugacgccuccaucagccaggucaaugagaaaauuaaccagucucuggccuucaucagaaaguccgaugaacuccugcacaaugugaacgcuggcaaaagcaccacaaauauuaugaucaccacaauuaucaucgugauuaucgucauucugcuuucucucaucgcgguggggcugcugcucuacugcaaggcccgguccacccccguuacgcugagcaaggaccagcuuucuggaauuaacaauaucgcuuucagcaacugaggacuaguuauaagacugacuagcccgaugggccucccaacgggcccuccuccccuccuugcaccgagauuaauaaaaaaaaaaaaaaaaaaaaaaaaaaaaaaaaaaaaaaaaaaaaaaaaaaaaaaaaaaaaaaaaugcaucccccccccccccccccccccccccccccccaaaggcucuuuucagagccaccagaauu

SEQ ID NO: 481 - RNA, 1942 nt, Artificial Sequence
  mRNA product Design i-3 comprising derived and/or modified sequence from HRSV(A2)__F0 (opt6)
gggagaaagcuuaccauggaacuucuaauauuaaaagcuaacgcaaucacuacuaucuuaaccgcaguaacauucuguuuugcauccggccaaaacauaacagaagaauuuuaccaaucaacuugcucugcagucucaaaagguuaucuaucugcauuaagaacaggcugguacaccucaguaauaacgaucgaacuaucaaacaucaaagaaaacaaauguaauggaacagacgcaaaaguaaaacuaaucaaacaagaacuagacaaauacaaaaacgcaguaaccgaacuccaacuccucaugcaaaguacaccagcaacaaauaacagagcaagacgugaacuaccacguuuuaugaauuacacgcucaauaacgcaaaaaaaacaaauguuacccuaucaaaaaaacgaaaaagaagauuccucggauuccuacuaggcguaggcucagcaauagcuucaggaguagcaguaucaaaaguacuccaccucgaaggagaaguaaacaaaaucaaaagcgcucuccucucaacaaacaaagcaguuguuucacucucaaacggaguaucaguacuaaccucaaaaguacuugaccuaaaaaauuauauagacaaacaacuauuaccaauaguaaacaaacaaagcugcuccaucuccaacaucgagacagucauagaauuucaacaaaaaaauaaccgccuauuagaaauaaccagagaauuuucaguaaacgcaggaguaacuaccccaguaucaacauauauguuaacaaacucagaacuccuaagucuaaucaacgacaugccaauaaccaacgaccaaaaaaaacuaaugagcaacaauguacaaauaguucgucaacaaucuuacuccauaaugucuauaauaaaagaagaaguacucgccuauguaguccaacuaccacuauacggagucaucgauacaccaugcuggaaacuccacacauccccacucuguacuacuaacaccaaagaagguucaaauauaugccuaaccagaacagauagagguugguacugcgauaaugcaggaucaguauccuuuuucccccaagccgaaacaugcaaaguucaauccaauagaguauuuugugauacaaugaacucuuuaacccucccauccgaagucaaucuauguaacgucgacauauuuaacccaaaauacgauugcaaaauaaugacaucaaaaacagacgucucauccucaguuauaacguccuuaggcgcuauaguaucaugcuacggcaaaacaaaauguacagcaucaaacaaaaacagaggaaucauaaaaacuuucucuaacgguugcgacuauguauccaacaaaggugucgacacaguauccguaggcaacacccuuuacuauguuaauaaacaagaaggaaaaucucuauauguaaaaggcgaaccaauuauaaauuuuuacgacccccuugucuuucccucugacgaauuugacgcuuccauaucacaagucaacgaaaaaaucaaccaaucccucgcauucauacgcaaaucagacgaacuacuacauaacgucaacgcaggcaaauccacaacaaacauaaugauaaccacaaucauaauuguaauaauaguaauacuacuuucucuaauagcagucggauuacucuuauacuguaaagcucgaucaacaccagucacccucucuaaagaucaacuauccggaaucaacaacauagcuuucucaaacuaaggacuaguuauaagacugacuagcccgaugggccucccaacgggcccuccuccccuccuugcaccgagauuaauaaaaaaaaaaaaaaaaaaaaaaaaaaaaaaaaaaaaaaaaaaaaaaaaaaaaaaaaaaaaaaaaugcaucccccccccccccccccccccccccccccccaaaggcucuuuucagagccaccagaauu

SEQ ID NO: 482 - RNA, 1942 nt, Artificial Sequence
  mRNA product Design i-3 comprising derived and/or modified sequence from HRSV(A2)__F0 (opt11)
gggagaaagcuuaccauggaacuccucauacucaaagccaacgcaaucacaaccauacucaccgccgucaccuucugcuuugcaucuggccagaacaucacugaagaguucuaccaauccacaugcuccgccguaagcaaaggcuaccuauccgcccuacgcaccggcugguacaccagcguaaucaccauagaacucuccaauauaaaagaaaacaaaugcaacggcaccgacgcaaaagucaagcuaauaaaacaagaacucgacaaauacaaaaacgccguuaccgaacuccagcuacucaugcaaucgaccccagcaaccaacaaccgugcgagacgcgaacucccccgcuucaugaacuacacccuaaacaacgccaaaaagaccaacguaacucuauccaagaaacgcaaacgccgcuuccucggauuccuccucggcgucggcuccgcaaucgccagcggcgucgccguuagcaaaguccuucaccucgaaggagaaguaaacaaaauuaaaagcgcccucuuauccacaaacaaggccguaguaucccugucaaacggcgucuccguccuuacauccaaaguccucgaccucaagaacuacauagacaaacagcuacuacccauuguaaauaaacaaagcugcucaauuagcaacaucgaaaccguaaucgaguuccagcagaaaaacaacagacuucucgaaaucacccgcgaguucagcgucaacgccggcguaaccaccccugucucaacauacaugcuaaccaacagcgaacugcucucccucaucaacgacaugcccaucaccaacgaccaaaagaaacucaugagcaacaacguacaaaucgugcgccaacaguccuacucaauaaugucaaucaucaaagaagaagugcuagcauacgucguacaacuaccacucuacggcguaauagauacccccugcuggaagcuccauaccuccccacucuguaccaccaacaccaaagaaggcucaaacaucugccuaacgcgcacagaccguggaugguacugugacaacgccggcuccgucuccuucuucccucaagccgaaacaugcaaaguccaauccaacagagucuucugcgauaccaugaacucccugacacucccaagcgaagucaaccuuugcaacgucgauaucuuuaaccccaaauacgacugcaagaucaugacaucaaaaaccgacguauccuccucuguaauaaccucccuaggcgcaaucguaucaugcuacggcaaaaccaaauguaccgccuccaacaaaaaucgcggcaucaucaaaaccuucucgaacggcugcgacuacgucuccaacaaaggcguagacacaguuuccguaggcaacacccucuacuacgucaauaaacaggaaggcaagucccucuacgucaaaggcgaacccaucaucaauuucuacgacccccucguuuuccccuccgaugaguucgacgcaagcaucagccaggucaacgaaaagauaaaccagucccucgccuucauccgcaaaucagaugaacuccuucacaacguuaacgcaggcaagagcaccaccaacaucaugaucacaacuauaaucaucgucauaaucgucauccuacucucacuaaucgccgucggucuccuacuauauuguaaagcccgaucaacaccggucacacucuccaaagaccaacucuccggaaucaacaauaucgcuuucucgaacuaaggacuaguuauaagacugacuagcccgaugggccucccaacgggcccuccuccccuccuugcaccgagauuaauaaaaaaaaaaaaaaaaaaaaaaaaaaaaaaaaaaaaaaaaaaaaaaaaaaaaaaaaaaaaaaaaugcaucccccccccccccccccccccccccccccccaaaggcucuuuucagagccaccagaauu

SEQ ID NO: 483 - protein, 553 aa, Artificial Sequence
  derived and/or modified protein sequence (artificial) from HRSV(A2)__F-del
MELLILKANAITTILTAVTFCFASGQNITEEFYQSTCSAVSKGYLSALRTGWYTSVITIELSNIKENKCNGTDAKVKLIKQELDKYKNAVTELQLLMQSTPATNNRARRELPRFMNYTLNNAKKTNVTLSKKRKRRFLGFLLGVGSAIASGVAVSKVLHLEGEVNKIKSALLSTNKAVVSLSNGVSVLTSKVLDLKNYIDKQLLPIVNKQSCSISNIETVIEFQQKNNRLLEITREFSVNAGVTTPVSTYMLTNSELLSLINDMPITNDQKKLMSNNVQIVRQQSYSIMSIIKEEVLAYVVQLPLYGVIDTPCWKLHTSPLCTTNTKEGSNICLTRTDRGWYCDNAGSVSFFPQAETCKVQSNRVFCDTMNSLTLPSEVNLCNVDIFNPKYDCKIMTSKTDVSSSVITSLGAIVSCYGKTKCTASNKNRGIIKTFSNGCDYVSNKGVDTVSVGNTLYYVNKQEGKSLYVKGEPIINFYDPLVFPSDEFDASISQVNEKINQSLAFIRKSDELLHNVNAGKSTTNIMITTIIIVIIVILLSLIAVGLLLYCKAR

SEQ ID NO: 484 - RNA, 1662 nt, Artificial Sequence
  derived and/or modified CDS sequence (artificial) from HRSV(A2)__F-del
auggaguugcuaauccucaaagcaaaugcaauuaccacaauccucacugcagucacauuuuguuuugcuucuggucaaaacaucacugaagaauuuuaucaaucaacaugcagugcaguuagcaaaggcuaucuuagugcucugagaacugguugguauaccaguguuauaacuauagaauuaaguaauaucaaggaaaauaaguguaauggaacagaugcuaagguaaaauugauaaaacaagaauuagauaaauauaaaaaugcuguaacagaauugcaguugcucaugcaaagcacaccagcaacaaacaaucgagccagaagagaacuaccaagguuuaugaauuauacacucaacaaugccaaaaaaaccaauguaacauuaagcaagaaaaggaaaagaagauuucuugguuuuuuguuagguguuggaucugcaaucgccaguggcguugcuguaucuaagguccugcaccuagaaggggaagugaacaagaucaaaagugcucuacuauccacaaacaaggcuguagucagcuuaucaaauggaguuagugucuuaaccagcaaaguguuagaccucaaaaacuauauagauaaacaauuguuaccuauugugaacaagcaaagcugcagcauaucaaauauagaaacugugauagaguuccaacaaaagaacaacagacuacuagagauuaccagggaauuuaguguuaaugcagguguaacuacaccuguaagcacuuacauguuaacuaauagugaauuauugucauuaaucaaugauaugccuauaacaaaugaucagaaaaaguuaauguccaacaauguucaaauaguuagacagcaaaguuacucuaucauguccauaauaaaagaggaagucuuagcauauguaguacaauuaccacuauaugguguuauagauacacccuguuggaaacuacacacauccccucuauguacaaccaacacaaaagaaggguccaacaucuguuuaacaagaacugacagaggaugguacugugacaaugcaggaucaguaucuuucuucccacaagcugaaacauguaaaguucaaucaaaucgaguauuuugugacacaaugaacaguuuaacauuaccaagugaaguaaaucucugcaauguugacauauucaaccccaaauaugauuguaaaauuaugacuucaaaaacagauguaagcagcuccguuaucacaucucuaggagccauugugucaugcuauggcaaaacuaaauguacagcauccaauaaaaaucguggaaucauaaagacauuuucuaacgggugcgauuauguaucaaauaaagggguggacacugugucuguagguaacacauuauauuauguaaauaagcaagaagguaaaagucucuauguaaaaggugaaccaauaauaaauuucuaugacccauuaguauuccccucugaugaauuugaugcaucaauaucucaagucaacgagaagauuaaccagagccuagcauuuauucguaaauccgaugaauuauuacauaauguaaaugcugguaaauccaccacaaauaucaugauaacuacuauaauuauagugauuauaguaauauuguuaucauuaauugcuguuggacugcucuuauacuguaaggccagauaa

SEQ ID NO: 485 - RNA, 1662 nt, Artificial Sequence
  derived and/or modified CDS sequence (opt1) from HRSV(A2)__F-del
auggagcugcucauccugaaggccaacgccaucaccaccauccugacggcggugaccuucugcuucgccagcggccagaacaucaccgaggaguucuaccaguccaccugcagcgccgucuccaagggguaccucagcgcccugcggacgggcugguacaccuccgugaucaccaucgagcugagcaacaucaaggagaacaagugcaacgggaccgacgccaaggugaagcucaucaagcaggagcuggacaaguacaagaacgcggucacggagcugcagcuccugaugcaguccaccccggcaaccaacaaccgcgcccggcgcgagcugccccgguucaugaacuacacccucaacaacgccaagaagacgaacgugacccugagcaagaagcgcaagcggcgcuuccugggcuuccuccugggggugggcuccgccaucgcgagcggcgucgccguguccaaggugcugcaccucgagggggaggucaacaagaucaagagcgcccugcuguccaccaacaaggccguggugagccucuccaacggcgucagcgugcugaccuccaaggugcuggaccucaagaacuacaucgacaagcagcugcugcccaucgucaacaagcagagcugcuccaucagcaacaucgagacggugaucgaguuccagcagaagaacaaccggcuccuggagaucacccgcgaguucagcgugaacgccggggucaccacccccguguccacguacaugcugaccaacagcgagcuccugucccugaucaacgacaugccgaucaccaacgaccagaagaagcucaugagcaacaacgugcagaucguccggcagcaguccuacagcaucauguccaucaucaaggaggaggugcuggcguacgugguccagcugccccucuacggcgugaucgacacccccugcuggaagcugcacacgagcccccugugcaccaccaacaccaaggagggguccaacaucugccucacgcgcaccgaccggggcugguacugcgacaacgccggcagcgucuccuucuucccgcaggccgagaccugcaaggugcagagcaaccgcguguucugcgacaccaugaacucccugacgcugcccagcgagguaaaccucugcaacgucgacaucuucaaccccaaguacgacugcaagaucaugaccuccaagaccgacgugagcuccagcgugaucaccucccugggggccaucgucagcugcuacggcaagacgaagugcaccgccagcaacaagaaccgggggaucaucaagaccuucuccaacggcugcgacuacgugagcaacaagggcguggacaccguguccgucgggaacacccuguacuacgugaacaagcaggagggcaagagccucuacgugaagggggagcccaucaucaacuucuacgacccgcuggucuuccccuccgacgaguucgacgcgagcaucucccaggugaacgagaagaucaaccagagccuggccuucauccgcaaguccgacgagcugcuccacaacgugaacgccggcaagagcacgaccaacaucaugaucaccaccaucaucaucgucaucaucgugauccugcugucccucaucgccguggggcugcugcucuacugcaaggcccgguga

SEQ ID NO: 486 - RNA, 1662 nt, Artificial Sequence
  derived and/or modified CDS sequence (opt1) from HRSV(A2)__F-del
auggagcugcucauccugaaggccaacgccaucaccaccauccugacggcggugaccuucugcuucgccagcggccagaacaucaccgaggaguucuaccaguccacgugcagcgccgucuccaagggguaccucagcgcccugcgcaccggcugguacaccuccgugaucaccaucgagcugagcaacaucaaggagaacaagugcaacgggaccgacgccaaggugaagcucaucaagcaggagcuggacaaguacaagaacgcggucacggagcugcagcuccugaugcaguccacccccgccaccaacaaccgggcccgccgggagcugccgcgcuucaugaacuacacccucaacaacgccaagaagacgaacgugacccugagcaagaagcggaagcgccgguuccugggcuuccuccugggggugggcuccgcgaucgccagcggcgucgccguguccaaggugcugcaccucgagggggaggucaacaagaucaagagcgcccugcuguccaccaacaaggccguggugagccucuccaacggcgucagcgugcugaccuccaaggugcuggaccucaagaacuacaucgacaagcagcugcugcccaucgucaacaagcagagcugcuccaucagcaacaucgagacggugaucgaguuccagcagaagaacaaccgccuccuggagaucacccgggaguucagcgugaacgcgggggucaccacccccguguccacguacaugcugaccaacagcgagcuccugucccugaucaacgacaugcccaucaccaacgaccagaagaagcucaugagcaacaacgugcagaucguccgccagcaguccuacagcaucauguccaucaucaaggaggaggugcuggccuacgugguccagcugccgcucuacggcgugaucgacacccccugcuggaagcugcacacgagcccccugugcaccaccaacaccaaggagggguccaacaucugccucacgcggaccgaccgcggcugguacugcgacaacgccggcagcgucuccuucuucccccaggccgagaccugcaaggugcagagcaaccggguguucugcgacaccaugaacucccugacgcugccgagcgaggucaaccucugcaacguggacaucuucaaccccaaguacgacugcaagaucaugaccuccaagaccgacgugagcuccagcgucaucaccucccugggggccaucgugagcugcuacggcaagacgaagugcaccgcgagcaacaagaaccgcgggaucaucaagaccuucuccaacggcugcgacuacgugagcaacaagggcgucgacaccguguccguggggaacacccuguacuacgucaacaagcaggagggcaagagccucuacgugaagggggagcccaucaucaacuucuacgacccccugguguucccguccgacgaguucgacgccagcaucucccaggucaacgagaagaucaaccagagccuggccuucauccggaaguccgacgagcuccugcacaacgugaacgccggcaagagcacgaccaacaucaugaucaccaccaucaucaucgugaucaucgucauccugcugucccucaucgccguggggcugcugcucuacugcaaggcgcgcuga

SEQ ID NO: 487 - RNA, 1662 nt, Artificial Sequence
  derived and/or modified CDS sequence (opt2) from HRSV(A2)__F-del
auggagcuccucauccucaaggccaacgccaucaccaccauccucaccgccgucaccuucugcuucgccuccggccagaacaucaccgaggaguucuaccaguccaccugcuccgccgucuccaagggcuaccucuccgcccuccgcaccggcugguacaccuccgucaucaccaucgagcucuccaacaucaaggagaacaagugcaacggcaccgacgccaaggucaagcucaucaagcaggagcucgacaaguacaagaacgccgucaccgagcuccagcuccucaugcaguccacccccgccaccaacaaccgcgcccgccgcgagcucccccgcuucaugaacuacacccucaacaacgccaagaagaccaacgucacccucuccaagaagcgcaagcgccgcuuccucggcuuccuccucggcgucggcuccgccaucgccuccggcgucgccgucuccaagguccuccaccucgagggcgaggucaacaagaucaaguccgcccuccucuccaccaacaaggccgucgucucccucuccaacggcgucuccguccucaccuccaagguccucgaccucaagaacuacaucgacaagcagcuccuccccaucgucaacaagcaguccugcuccaucuccaacaucgagaccgucaucgaguuccagcagaagaacaaccgccuccucgagaucacccgcgaguucuccgucaacgccggcgucaccacccccgucuccaccuacaugcucaccaacuccgagcuccucucccucaucaacgacaugcccaucaccaacgaccagaagaagcucauguccaacaacguccagaucguccgccagcaguccuacuccaucauguccaucaucaaggaggagguccucgccuacgucguccagcucccccucuacggcgucaucgacacccccugcuggaagcuccacaccuccccccucugcaccaccaacaccaaggagggcuccaacaucugccucacccgcaccgaccgcggcugguacugcgacaacgccggcuccgucuccuucuucccccaggccgagaccugcaagguccaguccaaccgcgucuucugcgacaccaugaacucccucacccuccccuccgaggucaaccucugcaacgucgacaucuucaaccccaaguacgacugcaagaucaugaccuccaagaccgacgucuccuccuccgucaucaccucccucggcgccaucgucuccugcuacggcaagaccaagugcaccgccuccaacaagaaccgcggcaucaucaagaccuucuccaacggcugcgacuacgucuccaacaagggcgucgacaccgucuccgucggcaacacccucuacuacgucaacaagcaggagggcaagucccucuacgucaagggcgagcccaucaucaacuucuacgacccccucgucuuccccuccgacgaguucgacgccuccaucucccaggucaacgagaagaucaaccagucccucgccuucauccgcaaguccgacgagcuccuccacaacgucaacgccggcaaguccaccaccaacaucaugaucaccaccaucaucaucgucaucaucgucauccuccucucccucaucgccgucggccuccuccucuacugcaaggcccgcuga

SEQ ID NO: 488 - RNA, 1662 nt, Artificial Sequence
  derived and/or modified CDS sequence (opt3) from HRSV(A2)__F-del
auggagcugcucauccuuaaggccaacgcuauuaccacaauacugacugcagugacguucugcuuugccagcggccagaauaucaccgaagaguucuaccaauccacauguucugcggucucaaaaggguauuugagugcuuuaagaacuggaugguacaccagcguuauuacaaucgaacuguccaacauuaaggagaauaaaugcaacgguaccgacgccaaggugaaacuaaucaagcaggaacucgauaaguauaaaaaugcaguaacugagcugcagcuucugaugcagucuacacccgccaccaacaauagggcucggcgcgaguugccucgauuuaugaacuacacgcucaauaacgcaaagaaaacuaaugugacccugucgaagaaacguaagagaagguuccugggcuuucucuuaggggucggaucagccauagcuagcggcguggccguuaguaaggugcugcaccuugaaggugaggucaacaaaaucaaguccgcguugcugucuacaaauaaagcagugguaagccuauccaacgggguuucagugcucacuucuaagguccuggaccuuaaaaauuauauugauaagcaacuguugccaaucgugaacaaacagagcuguucuauuuccaacaucgaaaccgugauagaguuccagcagaagaauaaccggcuccuggagauuacacgcgaauuuucagucaaugccggaguuaccacgccggugagcacuuacauguuaacaaacagugagcugcucucucuuaucaaugacaugcccauuaccaacgaucaaaagaaacugauguccaauaacguacagaucgugagacagcagagcuauucgaucaugucuauuauaaaggaagaggucuuggcuuacgugguucaacuaccucuguacggcgugaucgacacuccaugcuggaaacuccauacauccccacuguguaccacgaauaccaaggaaggcucaaacauuugccuuacaaggacugaucgggggugguauugugacaaugccggaagugucagcuucuuuccucaggcagagaccugcaaagugcaguccaaccgcguauucugugauacaaugaauagucugacuuugccaagcgagguuaaccucugcaauguggacaucuuuaaccccaaguacgauuguaagauaaugaccucaaaaacagacgucaguuccagcgugauuaccucucugggugcuaucgucucaugcuauggcaagacuaaaugcacggccaguaacaagaaucgagggaucauuaaaacauucagcaacggaugugauuacguguccaauaagggcguugacaccgugucuguagguaacacuuuauauuacgucaauaagcaagaagggaaaucgcuguaugugaagggagagccuaucauuaacuuuuacgacccccuaguuuucccgagcgaugaauuugacgcguccauaucacaggugaaugagaaaaucaaccagagucucgccuucauuagaaagucugaugaacugcuucacaaugucaacgcaggcaaaagcaccacaaauaucaugaucaccacuauuauaaucgugauuaucguaauuuugcugucccucaucgcugugggccugcuucuguacugcaaggccagguga

SEQ ID NO: 489 - RNA, 1662 nt, Artificial Sequence
  derived and/or modified CDS sequence (opt4) from HRSV(A2)__F-del
auggagcugcugauccugaaggccaacgccaucaccaccauccugaccgccgugaccuucugcuucgccagcggccagaacaucaccgaggaguucuaccagagcaccugcagcgccgugagcaagggcuaccugagcgcccugagaaccggcugguacaccagcgugaucaccaucgagcugagcaacaucaaggagaacaagugcaacggcaccgacgccaaggugaagcugaucaagcaggagcuggacaaguacaagaacgccgugaccgagcugcagcugcugaugcagagcacccccgccaccaacaacagagccagaagagagcugcccagauucaugaacuacacccugaacaacgccaagaagaccaacgugacccugagcaagaagagaaagagaagauuccugggcuuccugcugggcgugggcagcgccaucgccagcggcguggccgugagcaaggugcugcaccuggagggcgaggugaacaagaucaagagcgcccugcugagcaccaacaaggccguggugagccugagcaacggcgugagcgugcugaccagcaaggugcuggaccugaagaacuacaucgacaagcagcugcugcccaucgugaacaagcagagcugcagcaucagcaacaucgagaccgugaucgaguuccagcagaagaacaacagacugcuggagaucaccagagaguucagcgugaacgccggcgugaccacccccgugagcaccuacaugcugaccaacagcgagcugcugagccugaucaacgacaugcccaucaccaacgaccagaagaagcugaugagcaacaacgugcagaucgugagacagcagagcuacagcaucaugagcaucaucaaggaggaggugcuggccuacguggugcagcugccccuguacggcgugaucgacacccccugcuggaagcugcacaccagcccccugugcaccaccaacaccaaggagggcagcaacaucugccugaccagaaccgacagaggcugguacugcgacaacgccggcagcgugagcuucuucccccaggccgagaccugcaaggugcagagcaacagaguguucugcgacaccaugaacagccugacccugcccagcgaggugaaccugugcaacguggacaucuucaaccccaaguacgacugcaagaucaugaccagcaagaccgacgugagcagcagcgugaucaccagccugggcgccaucgugagcugcuacggcaagaccaagugcaccgccagcaacaagaacagaggcaucaucaagaccuucagcaacggcugcgacuacgugagcaacaagggcguggacaccgugagcgugggcaacacccuguacuacgugaacaagcaggagggcaagagccuguacgugaagggcgagcccaucaucaacuucuacgacccccugguguuccccagcgacgaguucgacgccagcaucagccaggugaacgagaagaucaaccagagccuggccuucaucagaaagagcgacgagcugcugcacaacgugaacgccggcaagagcaccaccaacaucaugaucaccaccaucaucaucgugaucaucgugauccugcugagccugaucgccgugggccugcugcuguacugcaaggccagauga

SEQ ID NO: 490 - RNA, 1662 nt, Artificial Sequence
  derived and/or modified CDS sequence (opt5) from HRSV(A2)__F-del
auggagcugcucauccugaaggccaacgcuauuaccacaauccuuacggccgugaccuucugcuuugcgagcggccagaauauuacagaagaguucuaccaauccaccuguucugcugucagcaaaggguaucuguccgcccucagaacaggaugguacaccucuguuaucacaauugaacugagcaacaucaaggagaauaaaugcaacggcaccgacgccaaggugaaacuuaucaagcaggaacuggauaaguauaaaaaugcugugacggagcuccagcugcugaugcaguccacccccgccacaaacaaucgggcucgcagagagcucccucgguuuaugaacuacacccugaauaacgccaagaaaacaaaugucacccuuucuaagaaacgcaagagacgguuccugggguuucuccugggagugggcagcgcgauugccuccgggguugcugugagcaagguccuucaccuggaaggagaggugaacaaaaucaagucugcccuccuguccacgaauaaagcuguugugagccugucuaacggcgucuccgugcucacaagcaaggugcuggaccuuaaaaauuauauugauaagcaacugcucccgaucgucaacaaacagucuuguuccauuagcaacaucgaaaccguuauugaguuccagcagaagaauaaccgccugcuugagaucacaagagaauuuuccgugaaugccggcgugaccacccccgucucuacauacaugcugacgaacagcgagcuccugucccugaucaaugacaugccuauuaccaacgaucaaaagaaacucaugagcaauaacgugcagaucguucggcagcagucuuauuccauuaugagcaucauuaaggaagaggugcuggcguacgucgugcaacuuccccuguacgggguuaucgacacaccuugcuggaaacuccauaccucuccccuguguacaaccaauacgaaggaaggaagcaacaucugccuuacacgcaccgauagaggcugguauugugacaaugccggguccgugucuuucuuuccucaggcugagaccugcaaaguccagagcaaccggguguucugugauacaaugaacucccugacccucccgagcgaggucaaucugugcaauguggacauuuuuaaccccaaguacgauuguaagaucaugacaucuaaaacggacguuuccagcucugugauuaccucccugggagccaucgucagcugcuauggcaagacaaaaugcaccgcuuccaacaagaaucgcgggauuaucaaaacauucucuaacggaugugauuacgugagcaauaagggcguugacaccguguccgucggcaacacgcucuauuacgugaauaagcaagaagggaaaucucuguaugugaagggagagccuaucauuaacuuuuacgacccccuuguuuucccuagcgaugaauuugacgccuccaucagccaggucaaugagaaaauuaaccagucucuggccuucaucagaaaguccgaugaacuccugcacaaugugaacgcuggcaaaagcaccacaaauauuaugaucaccacaauuaucaucgugauuaucgucauucugcuuucucucaucgcgguggggcugcugcucuacugcaaggcccgguga

SEQ ID NO: 491 - RNA, 1662 nt, Artificial Sequence
  derived and/or modified CDS sequence (opt6) from HRSV(A2)__F-del
auggaauuacuaauacucaaagccaacgcaauaacaacaauacuaacagcaguaacauucugcuucgcaucaggacaaaacaucacagaagaauuuuaccaaaguacaugcagugcagucucuaaaggauaccucagugccuuacgcacaggaugguacacaucaguaauaacaaucgaacuuucaaacauaaaagaaaacaaaugcaauggaaccgacgccaaaguaaaacuaaucaaacaagaacuagacaaauauaaaaaugcaguaacagaauuacaacuccuaaugcaauccacaccagcaacaaauaacagagcaagacgagaacucccucgauucaugaauuacacauuaaacaacgcaaaaaaaacuaacguaacuuuaucaaaaaaaagaaaacguagauuucuaggauuccuacuaggcguaggguccgccauugcaucaggaguagcaguuagcaaaguauuacauuuagaaggagaaguaaauaaaaucaaaagcgcacuacucucaaccaacaaagcaguaguaucacucucaaacggaguaucaguacuaacauccaaaguacucgaccucaaaaacuacauagacaaacaauuacuacccauaguaaacaaacaaucaugcucuauaucaaauaucgaaacaguaaucgaauuucaacaaaaaaacaaucgacuacuugaaauaacaagagaguucuccgucaaugccggagucaccacaccagucucaacauacaugcuaaccaacucugaacuccuaucacuaauaaaugacaugccaauaacaaacgaccaaaaaaaacuaaugucaaauaacguacaaauaguacgacaacaaaguuauuccauaaugaguauaaucaaagaagaaguguuagcauacguaguccaacuaccauuauauggaguaauagacacaccauguuggaaauuacacaccucaccacucugcacuaccaauacaaaagaaggcucaaauauaugccuaacucgcacagacagaggcugguacugcgauaacgcaggauccguaucuuucuuuccccaagcagaaacuugcaaaguacaaucaaacagagucuucugcgacaccaugaauagucucacauuaccaucugaaguaaaccuauguaacguagauauauucaauccaaaauacgacugcaaaauaaugacaucaaaaaccgacgucucuagcaguguaaucacaucacuaggagcaauaguaagcugcuauggaaaaacaaaauguacagcaucaaacaaaaacaggggaauaauaaaaaccuucucaaacggaugugacuacguaucaaauaaaggcguagacacaguaagcguaggaaacacccuauacuacguuaacaaacaagaagggaaaucauuauacguaaaaggagaaccaauaauaaacuucuacgauccacucguauucccauccgacgaauuugacgccagcauaucccaaguuaacgaaaaaauaaaccaaucacuugcauuuauacgaaaaucugaugaacuucuccacaacguaaaugcaggaaaauccaccaccaauauaaugaucacaacuaucaucauaguaauaaucgucauuuuacuaucauuaauagcaguuggccuacuucuauacugcaaagcaagauaa

SEQ ID NO: 492 - RNA, 1662 nt, Artificial Sequence
  derived and/or modified CDS sequence (opt11) from HRSV(A2)__F-del
auggaacuacuaauccuaaaagccaacgcgaucaccaccauccuaacggcagucaccuucugcuucgcaucaggccaaaacaucacagaagaguucuaccaaagcacaugcuccgccguauccaaaggcuaccucagcgcccuacgcacaggcugguacacaucugucaucaccauagaacucuccaacaucaaagaaaacaaaugcaacggcacugacgccaaaguaaagcugaucaaacaagaacucgacaaauacaaaaacgcagucaccgaacuccaacuacucaugcaauccaccccugcaaccaacaacagggcccgccgcgaacucccccgcuucaugaacuacacuuuaaacaacgccaaaaagaccaacgucacacucagcaagaaacggaaacgacgauuccuaggguuucuccuaggcgucggcucggcaaucgccuccggcgucgccguaagcaaaguacuacaccuagaaggcgaagugaacaaaaucaaaagugcccuucucuccaccaacaaggccguagucucucuauccaacggagucucaguccucaccucaaagguccucgaccucaaaaacuacaucgacaaacaacuacuccccauugucaacaagcagucaugcuccauaucaaacaucgaaaccgucaucgaguuccaacagaaaaacaaccgacuccucgaaauaaccagagaguucucggucaacgccggcgucaccaccccagucagcaccuacaugcucacuaacuccgaacuccuaucccucaucaacgacaugccaauuaccaacgaccaaaagaaacuaaugucgaacaacguucaaaucguccgacaacaaaguuacuccaucaugagcauaaucaaagaagaaguucuagcguacgucguccaacucccacuauacggcgucaucgacacuccgugcuggaaacuccacacaucaccccuauguacaaccaacacaaaagaaggcagcaacaucugccucacccgcaccgaccgagggugguauugcgauaacgcuggcagcgucuccuucuucccccaagccgaaaccugcaaaguccaaucaaacagaguauucugcgacaccaugaacucccuuacucucccuagcgaagucaaccucugcaacguugacauauucaaccccaaauacgacugcaaaaucaugaccuccaagaccgacgucuccuccuccgucaucacaucucuaggugccauugucuccugcuacggaaaaaccaaaugcacagccuccaacaaaaaccgcggcaucauaaaaaccuucuccaacggcugcgacuacgucaguaauaaaggcgucgacacgguauccguugggaauacgcuuuacuacguaaauaaacaagaaggcaaaucccucuacgucaaaggugaacccaucauaaacuucuacgacccgcuuguguucccauccgacgaguucgacgccagcaucagccaggucaacgaaaagaucaaccaaucccuagccuucauccgcaaaagcgacgaacuacuacacaacgucaacgccggaaaauccacaaccaacaucaugaucaccaccaucaucaucgucaucaucguaauccuacucucucucaucgccgucggccuccuacuguacuguaaagcccgauag

SEQ ID NO: 493 - RNA, 1938 nt, Artificial Sequence
  mRNA product Design a-1 comprising derived and/or modified sequence from HRSV(A2)__F-del (artificial)
gggagagucccgcagucggcguccagcggcucugcuuguucgugugugugucguugcaggccuuauucaagcuuaccauggaguugcuaauccucaaagcaaaugcaauuaccacaauccucacugcagucacauuuuguuuugcuucuggucaaaacaucacugaagaauuuuaucaaucaacaugcagugcaguuagcaaaggcuaucuuagugcucugagaacugguugguauaccaguguuauaacuauagaauuaaguaauaucaaggaaaauaaguguaauggaacagaugcuaagguaaaauugauaaaacaagaauuagauaaauauaaaaaugcuguaacagaauugcaguugcucaugcaaagcacaccagcaacaaacaaucgagccagaagagaacuaccaagguuuaugaauuauacacucaacaaugccaaaaaaaccaauguaacauuaagcaagaaaaggaaaagaagauuucuugguuuuuuguuagguguuggaucugcaaucgccaguggcguugcuguaucuaagguccugcaccuagaaggggaagugaacaagaucaaaagugcucuacuauccacaaacaaggcuguagucagcuuaucaaauggaguuagugucuuaaccagcaaaguguuagaccucaaaaacuauauagauaaacaauuguuaccuauugugaacaagcaaagcugcagcauaucaaauauagaaacugugauagaguuccaacaaaagaacaacagacuacuagagauuaccagggaauuuaguguuaaugcagguguaacuacaccuguaagcacuuacauguuaacuaauagugaauuauugucauuaaucaaugauaugccuauaacaaaugaucagaaaaaguuaauguccaacaauguucaaauaguuagacagcaaaguuacucuaucauguccauaauaaaagaggaagucuuagcauauguaguacaauuaccacuauaugguguuauagauacacccuguuggaaacuacacacauccccucuauguacaaccaacacaaaagaaggguccaacaucuguuuaacaagaacugacagaggaugguacugugacaaugcaggaucaguaucuuucuucccacaagcugaaacauguaaaguucaaucaaaucgaguauuuugugacacaaugaacaguuuaacauuaccaagugaaguaaaucucugcaauguugacauauucaaccccaaauaugauuguaaaauuaugacuucaaaaacagauguaagcagcuccguuaucacaucucuaggagccauugugucaugcuauggcaaaacuaaauguacagcauccaauaaaaaucguggaaucauaaagacauuuucuaacgggugcgauuauguaucaaauaaagggguggacacugugucuguagguaacacauuauauuauguaaauaagcaagaagguaaaagucucuauguaaaaggugaaccaauaauaaauuucuaugacccauuaguauuccccucugaugaauuugaugcaucaauaucucaagucaacgagaagauuaaccagagccuagcauuuauucguaaauccgaugaauuauuacauaauguaaaugcugguaaauccaccacaaauaucaugauaacuacuauaauuauagugauuauaguaauauuguuaucauuaauugcuguuggacugcucuuauacuguaaggccagauaaggacuagucccuguucccagagcccacuuuuuuuucuuuuuuugaaauaaaauagccugucuuucagaucuaaaaaaaaaaaaaaaaaaaaaaaaaaaaaaaaaaaaaaaaaaaaaaaaaaaaaaaaaaaaaaaaugcaucccccccccccccccccccccccccccccccaaaggcucuuuucagagccaccagaauu

SEQ ID NO: 494 - RNA, 1938 nt, Artificial Sequence
  mRNA product Design a-1 comprising derived and/or modified sequence from HRSV(A2)__F-del (opt1)
gggagagucccgcagucggcguccagcggcucugcuuguucgugugugugucguugcaggccuuauucaagcuuaccauggagcugcucauccugaaggccaacgccaucaccaccauccugacggcggugaccuucugcuucgccagcggccagaacaucaccgaggaguucuaccaguccaccugcagcgccgucuccaagggguaccucagcgcccugcggacgggcugguacaccuccgugaucaccaucgagcugagcaacaucaaggagaacaagugcaacgggaccgacgccaaggugaagcucaucaagcaggagcuggacaaguacaagaacgcggucacggagcugcagcuccugaugcaguccaccccggcaaccaacaaccgcgcccggcgcgagcugccccgguucaugaacuacacccucaacaacgccaagaagacgaacgugacccugagcaagaagcgcaagcggcgcuuccugggcuuccuccugggggugggcuccgccaucgcgagcggcgucgccguguccaaggugcugcaccucgagggggaggucaacaagaucaagagcgcccugcuguccaccaacaaggccguggugagccucuccaacggcgucagcgugcugaccuccaaggugcuggaccucaagaacuacaucgacaagcagcugcugcccaucgucaacaagcagagcugcuccaucagcaacaucgagacggugaucgaguuccagcagaagaacaaccggcuccuggagaucacccgcgaguucagcgugaacgccggggucaccacccccguguccacguacaugcugaccaacagcgagcuccugucccugaucaacgacaugccgaucaccaacgaccagaagaagcucaugagcaacaacgugcagaucguccggcagcaguccuacagcaucauguccaucaucaaggaggaggugcuggcguacgugguccagcugccccucuacggcgugaucgacacccccugcuggaagcugcacacgagcccccugugcaccaccaacaccaaggagggguccaacaucugccucacgcgcaccgaccggggcugguacugcgacaacgccggcagcgucuccuucuucccgcaggccgagaccugcaaggugcagagcaaccgcguguucugcgacaccaugaacucccugacgcugcccagcgagguaaaccucugcaacgucgacaucuucaaccccaaguacgacugcaagaucaugaccuccaagaccgacgugagcuccagcgugaucaccucccugggggccaucgucagcugcuacggcaagacgaagugcaccgccagcaacaagaaccgggggaucaucaagaccuucuccaacggcugcgacuacgugagcaacaagggcguggacaccguguccgucgggaacacccuguacuacgugaacaagcaggagggcaagagccucuacgugaagggggagcccaucaucaacuucuacgacccgcuggucuuccccuccgacgaguucgacgcgagcaucucccaggugaacgagaagaucaaccagagccuggccuucauccgcaaguccgacgagcugcuccacaacgugaacgccggcaagagcacgaccaacaucaugaucaccaccaucaucaucgucaucaucgugauccugcugucccucaucgccguggggcugcugcucuacugcaaggcccggugaggacuagucccuguucccagagcccacuuuuuuuucuuuuuuugaaauaaaauagccugucuuucagaucuaaaaaaaaaaaaaaaaaaaaaaaaaaaaaaaaaaaaaaaaaaaaaaaaaaaaaaaaaaaaaaaaugcaucccccccccccccccccccccccccccccccaaaggcucuuuucagagccaccagaauu

SEQ ID NO: 495 - RNA, 1938 nt, Artificial Sequence
  mRNA product Design a-1 comprising derived and/or modified sequence from HRSV(A2)__F-del (opt1)
gggagagucccgcagucggcguccagcggcucugcuuguucgugugugugucguugcaggccuuauucaagcuuaccauggagcugcucauccugaaggccaacgccaucaccaccauccugacggcggugaccuucugcuucgccagcggccagaacaucaccgaggaguucuaccaguccacgugcagcgccgucuccaagggguaccucagcgcccugcgcaccggcugguacaccuccgugaucaccaucgagcugagcaacaucaaggagaacaagugcaacgggaccgacgccaaggugaagcucaucaagcaggagcuggacaaguacaagaacgcggucacggagcugcagcuccugaugcaguccacccccgccaccaacaaccgggcccgccgggagcugccgcgcuucaugaacuacacccucaacaacgccaagaagacgaacgugacccugagcaagaagcggaagcgccgguuccugggcuuccuccugggggugggcuccgcgaucgccagcggcgucgccguguccaaggugcugcaccucgagggggaggucaacaagaucaagagcgcccugcuguccaccaacaaggccguggugagccucuccaacggcgucagcgugcugaccuccaaggugcuggaccucaagaacuacaucgacaagcagcugcugcccaucgucaacaagcagagcugcuccaucagcaacaucgagacggugaucgaguuccagcagaagaacaaccgccuccuggagaucacccgggaguucagcgugaacgcgggggucaccacccccguguccacguacaugcugaccaacagcgagcuccugucccugaucaacgacaugcccaucaccaacgaccagaagaagcucaugagcaacaacgugcagaucguccgccagcaguccuacagcaucauguccaucaucaaggaggaggugcuggccuacgugguccagcugccgcucuacggcgugaucgacacccccugcuggaagcugcacacgagcccccugugcaccaccaacaccaaggagggguccaacaucugccucacgcggaccgaccgcggcugguacugcgacaacgccggcagcgucuccuucuucccccaggccgagaccugcaaggugcagagcaaccggguguucugcgacaccaugaacucccugacgcugccgagcgaggucaaccucugcaacguggacaucuucaaccccaaguacgacugcaagaucaugaccuccaagaccgacgugagcuccagcgucaucaccucccugggggccaucgugagcugcuacggcaagacgaagugcaccgcgagcaacaagaaccgcgggaucaucaagaccuucuccaacggcugcgacuacgugagcaacaagggcgucgacaccguguccguggggaacacccuguacuacgucaacaagcaggagggcaagagccucuacgugaagggggagcccaucaucaacuucuacgacccccugguguucccguccgacgaguucgacgccagcaucucccaggucaacgagaagaucaaccagagccuggccuucauccggaaguccgacgagcuccugcacaacgugaacgccggcaagagcacgaccaacaucaugaucaccaccaucaucaucgugaucaucgucauccugcugucccucaucgccguggggcugcugcucuacugcaaggcgcgcugaggacuagucccuguucccagagcccacuuuuuuuucuuuuuuugaaauaaaauagccugucuuucagaucuaaaaaaaaaaaaaaaaaaaaaaaaaaaaaaaaaaaaaaaaaaaaaaaaaaaaaaaaaaaaaaaaugcaucccccccccccccccccccccccccccccccaaaggcucuuuucagagccaccagaauu

SEQ ID NO: 496 - RNA, 1938 nt, Artificial Sequence
  mRNA product Design a-1 comprising derived and/or modified sequence from HRSV(A2)__F-del (opt2)
gggagagucccgcagucggcguccagcggcucugcuuguucgugugugugucguugcaggccuuauucaagcuuaccauggagcuccucauccucaaggccaacgccaucaccaccauccucaccgccgucaccuucugcuucgccuccggccagaacaucaccgaggaguucuaccaguccaccugcuccgccgucuccaagggcuaccucuccgcccuccgcaccggcugguacaccuccgucaucaccaucgagcucuccaacaucaaggagaacaagugcaacggcaccgacgccaaggucaagcucaucaagcaggagcucgacaaguacaagaacgccgucaccgagcuccagcuccucaugcaguccacccccgccaccaacaaccgcgcccgccgcgagcucccccgcuucaugaacuacacccucaacaacgccaagaagaccaacgucacccucuccaagaagcgcaagcgccgcuuccucggcuuccuccucggcgucggcuccgccaucgccuccggcgucgccgucuccaagguccuccaccucgagggcgaggucaacaagaucaaguccgcccuccucuccaccaacaaggccgucgucucccucuccaacggcgucuccguccucaccuccaagguccucgaccucaagaacuacaucgacaagcagcuccuccccaucgucaacaagcaguccugcuccaucuccaacaucgagaccgucaucgaguuccagcagaagaacaaccgccuccucgagaucacccgcgaguucuccgucaacgccggcgucaccacccccgucuccaccuacaugcucaccaacuccgagcuccucucccucaucaacgacaugcccaucaccaacgaccagaagaagcucauguccaacaacguccagaucguccgccagcaguccuacuccaucauguccaucaucaaggaggagguccucgccuacgucguccagcucccccucuacggcgucaucgacacccccugcuggaagcuccacaccuccccccucugcaccaccaacaccaaggagggcuccaacaucugccucacccgcaccgaccgcggcugguacugcgacaacgccggcuccgucuccuucuucccccaggccgagaccugcaagguccaguccaaccgcgucuucugcgacaccaugaacucccucacccuccccuccgaggucaaccucugcaacgucgacaucuucaaccccaaguacgacugcaagaucaugaccuccaagaccgacgucuccuccuccgucaucaccucccucggcgccaucgucuccugcuacggcaagaccaagugcaccgccuccaacaagaaccgcggcaucaucaagaccuucuccaacggcugcgacuacgucuccaacaagggcgucgacaccgucuccgucggcaacacccucuacuacgucaacaagcaggagggcaagucccucuacgucaagggcgagcccaucaucaacuucuacgacccccucgucuuccccuccgacgaguucgacgccuccaucucccaggucaacgagaagaucaaccagucccucgccuucauccgcaaguccgacgagcuccuccacaacgucaacgccggcaaguccaccaccaacaucaugaucaccaccaucaucaucgucaucaucgucauccuccucucccucaucgccgucggccuccuccucuacugcaaggcccgcugaggacuagucccuguucccagagcccacuuuuuuuucuuuuuuugaaauaaaauagccugucuuucagaucuaaaaaaaaaaaaaaaaaaaaaaaaaaaaaaaaaaaaaaaaaaaaaaaaaaaaaaaaaaaaaaaaugcaucccccccccccccccccccccccccccccccaaaggcucuuuucagagccaccagaauu

SEQ ID NO: 497 - RNA, 1938 nt, Artificial Sequence
  mRNA product Design a-1 comprising derived and/or modified sequence from HRSV(A2)__F-del (opt3)
gggagagucccgcagucggcguccagcggcucugcuuguucgugugugugucguugcaggccuuauucaagcuuaccauggagcugcucauccuuaaggccaacgcuauuaccacaauacugacugcagugacguucugcuuugccagcggccagaauaucaccgaagaguucuaccaauccacauguucugcggucucaaaaggguauuugagugcuuuaagaacuggaugguacaccagcguuauuacaaucgaacuguccaacauuaaggagaauaaaugcaacgguaccgacgccaaggugaaacuaaucaagcaggaacucgauaaguauaaaaaugcaguaacugagcugcagcuucugaugcagucuacacccgccaccaacaauagggcucggcgcgaguugccucgauuuaugaacuacacgcucaauaacgcaaagaaaacuaaugugacccugucgaagaaacguaagagaagguuccugggcuuucucuuaggggucggaucagccauagcuagcggcguggccguuaguaaggugcugcaccuugaaggugaggucaacaaaaucaaguccgcguugcugucuacaaauaaagcagugguaagccuauccaacgggguuucagugcucacuucuaagguccuggaccuuaaaaauuauauugauaagcaacuguugccaaucgugaacaaacagagcuguucuauuuccaacaucgaaaccgugauagaguuccagcagaagaauaaccggcuccuggagauuacacgcgaauuuucagucaaugccggaguuaccacgccggugagcacuuacauguuaacaaacagugagcugcucucucuuaucaaugacaugcccauuaccaacgaucaaaagaaacugauguccaauaacguacagaucgugagacagcagagcuauucgaucaugucuauuauaaaggaagaggucuuggcuuacgugguucaacuaccucuguacggcgugaucgacacuccaugcuggaaacuccauacauccccacuguguaccacgaauaccaaggaaggcucaaacauuugccuuacaaggacugaucgggggugguauugugacaaugccggaagugucagcuucuuuccucaggcagagaccugcaaagugcaguccaaccgcguauucugugauacaaugaauagucugacuuugccaagcgagguuaaccucugcaauguggacaucuuuaaccccaaguacgauuguaagauaaugaccucaaaaacagacgucaguuccagcgugauuaccucucugggugcuaucgucucaugcuauggcaagacuaaaugcacggccaguaacaagaaucgagggaucauuaaaacauucagcaacggaugugauuacguguccaauaagggcguugacaccgugucuguagguaacacuuuauauuacgucaauaagcaagaagggaaaucgcuguaugugaagggagagccuaucauuaacuuuuacgacccccuaguuuucccgagcgaugaauuugacgcguccauaucacaggugaaugagaaaaucaaccagagucucgccuucauuagaaagucugaugaacugcuucacaaugucaacgcaggcaaaagcaccacaaauaucaugaucaccacuauuauaaucgugauuaucguaauuuugcugucccucaucgcugugggccugcuucuguacugcaaggccaggugaggacuagucccuguucccagagcccacuuuuuuuucuuuuuuugaaauaaaauagccugucuuucagaucuaaaaaaaaaaaaaaaaaaaaaaaaaaaaaaaaaaaaaaaaaaaaaaaaaaaaaaaaaaaaaaaaugcaucccccccccccccccccccccccccccccccaaaggcucuuuucagagccaccagaauu

SEQ ID NO: 498 - RNA, 1938 nt, Artificial Sequence
  mRNA product Design a-1 comprising derived and/or modified sequence from HRSV(A2)__F-del (opt4)
gggagagucccgcagucggcguccagcggcucugcuuguucgugugugugucguugcaggccuuauucaagcuuaccauggagcugcugauccugaaggccaacgccaucaccaccauccugaccgccgugaccuucugcuucgccagcggccagaacaucaccgaggaguucuaccagagcaccugcagcgccgugagcaagggcuaccugagcgcccugagaaccggcugguacaccagcgugaucaccaucgagcugagcaacaucaaggagaacaagugcaacggcaccgacgccaaggugaagcugaucaagcaggagcuggacaaguacaagaacgccgugaccgagcugcagcugcugaugcagagcacccccgccaccaacaacagagccagaagagagcugcccagauucaugaacuacacccugaacaacgccaagaagaccaacgugacccugagcaagaagagaaagagaagauuccugggcuuccugcugggcgugggcagcgccaucgccagcggcguggccgugagcaaggugcugcaccuggagggcgaggugaacaagaucaagagcgcccugcugagcaccaacaaggccguggugagccugagcaacggcgugagcgugcugaccagcaaggugcuggaccugaagaacuacaucgacaagcagcugcugcccaucgugaacaagcagagcugcagcaucagcaacaucgagaccgugaucgaguuccagcagaagaacaacagacugcuggagaucaccagagaguucagcgugaacgccggcgugaccacccccgugagcaccuacaugcugaccaacagcgagcugcugagccugaucaacgacaugcccaucaccaacgaccagaagaagcugaugagcaacaacgugcagaucgugagacagcagagcuacagcaucaugagcaucaucaaggaggaggugcuggccuacguggugcagcugccccuguacggcgugaucgacacccccugcuggaagcugcacaccagcccccugugcaccaccaacaccaaggagggcagcaacaucugccugaccagaaccgacagaggcugguacugcgacaacgccggcagcgugagcuucuucccccaggccgagaccugcaaggugcagagcaacagaguguucugcgacaccaugaacagccugacccugcccagcgaggugaaccugugcaacguggacaucuucaaccccaaguacgacugcaagaucaugaccagcaagaccgacgugagcagcagcgugaucaccagccugggcgccaucgugagcugcuacggcaagaccaagugcaccgccagcaacaagaacagaggcaucaucaagaccuucagcaacggcugcgacuacgugagcaacaagggcguggacaccgugagcgugggcaacacccuguacuacgugaacaagcaggagggcaagagccuguacgugaagggcgagcccaucaucaacuucuacgacccccugguguuccccagcgacgaguucgacgccagcaucagccaggugaacgagaagaucaaccagagccuggccuucaucagaaagagcgacgagcugcugcacaacgugaacgccggcaagagcaccaccaacaucaugaucaccaccaucaucaucgugaucaucgugauccugcugagccugaucgccgugggccugcugcuguacugcaaggccagaugaggacuagucccuguucccagagcccacuuuuuuuucuuuuuuugaaauaaaauagccugucuuucagaucuaaaaaaaaaaaaaaaaaaaaaaaaaaaaaaaaaaaaaaaaaaaaaaaaaaaaaaaaaaaaaaaaugcaucccccccccccccccccccccccccccccccaaaggcucuuuucagagccaccagaauu

SEQ ID NO: 499 - RNA, 1938 nt, Artificial Sequence
  mRNA product Design a-1 comprising derived and/or modified sequence from HRSV(A2)__F-del (opt5)
gggagagucccgcagucggcguccagcggcucugcuuguucgugugugugucguugcaggccuuauucaagcuuaccauggagcugcucauccugaaggccaacgcuauuaccacaauccuuacggccgugaccuucugcuuugcgagcggccagaauauuacagaagaguucuaccaauccaccuguucugcugucagcaaaggguaucuguccgcccucagaacaggaugguacaccucuguuaucacaauugaacugagcaacaucaaggagaauaaaugcaacggcaccgacgccaaggugaaacuuaucaagcaggaacuggauaaguauaaaaaugcugugacggagcuccagcugcugaugcaguccacccccgccacaaacaaucgggcucgcagagagcucccucgguuuaugaacuacacccugaauaacgccaagaaaacaaaugucacccuuucuaagaaacgcaagagacgguuccugggguuucuccugggagugggcagcgcgauugccuccgggguugcugugagcaagguccuucaccuggaaggagaggugaacaaaaucaagucugcccuccuguccacgaauaaagcuguugugagccugucuaacggcgucuccgugcucacaagcaaggugcuggaccuuaaaaauuauauugauaagcaacugcucccgaucgucaacaaacagucuuguuccauuagcaacaucgaaaccguuauugaguuccagcagaagaauaaccgccugcuugagaucacaagagaauuuuccgugaaugccggcgugaccacccccgucucuacauacaugcugacgaacagcgagcuccugucccugaucaaugacaugccuauuaccaacgaucaaaagaaacucaugagcaauaacgugcagaucguucggcagcagucuuauuccauuaugagcaucauuaaggaagaggugcuggcguacgucgugcaacuuccccuguacgggguuaucgacacaccuugcuggaaacuccauaccucuccccuguguacaaccaauacgaaggaaggaagcaacaucugccuuacacgcaccgauagaggcugguauugugacaaugccggguccgugucuuucuuuccucaggcugagaccugcaaaguccagagcaaccggguguucugugauacaaugaacucccugacccucccgagcgaggucaaucugugcaauguggacauuuuuaaccccaaguacgauuguaagaucaugacaucuaaaacggacguuuccagcucugugauuaccucccugggagccaucgucagcugcuauggcaagacaaaaugcaccgcuuccaacaagaaucgcgggauuaucaaaacauucucuaacggaugugauuacgugagcaauaagggcguugacaccguguccgucggcaacacgcucuauuacgugaauaagcaagaagggaaaucucuguaugugaagggagagccuaucauuaacuuuuacgacccccuuguuuucccuagcgaugaauuugacgccuccaucagccaggucaaugagaaaauuaaccagucucuggccuucaucagaaaguccgaugaacuccugcacaaugugaacgcuggcaaaagcaccacaaauauuaugaucaccacaauuaucaucgugauuaucgucauucugcuuucucucaucgcgguggggcugcugcucuacugcaaggcccggugaggacuagucccuguucccagagcccacuuuuuuuucuuuuuuugaaauaaaauagccugucuuucagaucuaaaaaaaaaaaaaaaaaaaaaaaaaaaaaaaaaaaaaaaaaaaaaaaaaaaaaaaaaaaaaaaaugcaucccccccccccccccccccccccccccccccaaaggcucuuuucagagccaccagaauu

SEQ ID NO: 500 - RNA, 1938 nt, Artificial Sequence
  mRNA product Design a-1 comprising derived and/or modified sequence from HRSV(A2)__F-del (opt6)
gggagagucccgcagucggcguccagcggcucugcuuguucgugugugugucguugcaggccuuauucaagcuuaccauggaauuacuaauacucaaagccaacgcaauaacaacaauacuaacagcaguaacauucugcuucgcaucaggacaaaacaucacagaagaauuuuaccaaaguacaugcagugcagucucuaaaggauaccucagugccuuacgcacaggaugguacacaucaguaauaacaaucgaacuuucaaacauaaaagaaaacaaaugcaauggaaccgacgccaaaguaaaacuaaucaaacaagaacuagacaaauauaaaaaugcaguaacagaauuacaacuccuaaugcaauccacaccagcaacaaauaacagagcaagacgagaacucccucgauucaugaauuacacauuaaacaacgcaaaaaaaacuaacguaacuuuaucaaaaaaaagaaaacguagauuucuaggauuccuacuaggcguaggguccgccauugcaucaggaguagcaguuagcaaaguauuacauuuagaaggagaaguaaauaaaaucaaaagcgcacuacucucaaccaacaaagcaguaguaucacucucaaacggaguaucaguacuaacauccaaaguacucgaccucaaaaacuacauagacaaacaauuacuacccauaguaaacaaacaaucaugcucuauaucaaauaucgaaacaguaaucgaauuucaacaaaaaaacaaucgacuacuugaaauaacaagagaguucuccgucaaugccggagucaccacaccagucucaacauacaugcuaaccaacucugaacuccuaucacuaauaaaugacaugccaauaacaaacgaccaaaaaaaacuaaugucaaauaacguacaaauaguacgacaacaaaguuauuccauaaugaguauaaucaaagaagaaguguuagcauacguaguccaacuaccauuauauggaguaauagacacaccauguuggaaauuacacaccucaccacucugcacuaccaauacaaaagaaggcucaaauauaugccuaacucgcacagacagaggcugguacugcgauaacgcaggauccguaucuuucuuuccccaagcagaaacuugcaaaguacaaucaaacagagucuucugcgacaccaugaauagucucacauuaccaucugaaguaaaccuauguaacguagauauauucaauccaaaauacgacugcaaaauaaugacaucaaaaaccgacgucucuagcaguguaaucacaucacuaggagcaauaguaagcugcuauggaaaaacaaaauguacagcaucaaacaaaaacaggggaauaauaaaaaccuucucaaacggaugugacuacguaucaaauaaaggcguagacacaguaagcguaggaaacacccuauacuacguuaacaaacaagaagggaaaucauuauacguaaaaggagaaccaauaauaaacuucuacgauccacucguauucccauccgacgaauuugacgccagcauaucccaaguuaacgaaaaaauaaaccaaucacuugcauuuauacgaaaaucugaugaacuucuccacaacguaaaugcaggaaaauccaccaccaauauaaugaucacaacuaucaucauaguaauaaucgucauuuuacuaucauuaauagcaguuggccuacuucuauacugcaaagcaagauaaggacuagucccuguucccagagcccacuuuuuuuucuuuuuuugaaauaaaauagccugucuuucagaucuaaaaaaaaaaaaaaaaaaaaaaaaaaaaaaaaaaaaaaaaaaaaaaaaaaaaaaaaaaaaaaaaugcaucccccccccccccccccccccccccccccccaaaggcucuuuucagagccaccagaauu

SEQ ID NO: 501 - RNA, 1938 nt, Artificial Sequence
  mRNA product Design a-1 comprising derived and/or modified sequence from HRSV(A2)__F-del (opt11)
gggagagucccgcagucggcguccagcggcucugcuuguucgugugugugucguugcaggccuuauucaagcuuaccauggaacuacuaauccuaaaagccaacgcgaucaccaccauccuaacggcagucaccuucugcuucgcaucaggccaaaacaucacagaagaguucuaccaaagcacaugcuccgccguauccaaaggcuaccucagcgcccuacgcacaggcugguacacaucugucaucaccauagaacucuccaacaucaaagaaaacaaaugcaacggcacugacgccaaaguaaagcugaucaaacaagaacucgacaaauacaaaaacgcagucaccgaacuccaacuacucaugcaauccaccccugcaaccaacaacagggcccgccgcgaacucccccgcuucaugaacuacacuuuaaacaacgccaaaaagaccaacgucacacucagcaagaaacggaaacgacgauuccuaggguuucuccuaggcgucggcucggcaaucgccuccggcgucgccguaagcaaaguacuacaccuagaaggcgaagugaacaaaaucaaaagugcccuucucuccaccaacaaggccguagucucucuauccaacggagucucaguccucaccucaaagguccucgaccucaaaaacuacaucgacaaacaacuacuccccauugucaacaagcagucaugcuccauaucaaacaucgaaaccgucaucgaguuccaacagaaaaacaaccgacuccucgaaauaaccagagaguucucggucaacgccggcgucaccaccccagucagcaccuacaugcucacuaacuccgaacuccuaucccucaucaacgacaugccaauuaccaacgaccaaaagaaacuaaugucgaacaacguucaaaucguccgacaacaaaguuacuccaucaugagcauaaucaaagaagaaguucuagcguacgucguccaacucccacuauacggcgucaucgacacuccgugcuggaaacuccacacaucaccccuauguacaaccaacacaaaagaaggcagcaacaucugccucacccgcaccgaccgagggugguauugcgauaacgcuggcagcgucuccuucuucccccaagccgaaaccugcaaaguccaaucaaacagaguauucugcgacaccaugaacucccuuacucucccuagcgaagucaaccucugcaacguugacauauucaaccccaaauacgacugcaaaaucaugaccuccaagaccgacgucuccuccuccgucaucacaucucuaggugccauugucuccugcuacggaaaaaccaaaugcacagccuccaacaaaaaccgcggcaucauaaaaaccuucuccaacggcugcgacuacgucaguaauaaaggcgucgacacgguauccguugggaauacgcuuuacuacguaaauaaacaagaaggcaaaucccucuacgucaaaggugaacccaucauaaacuucuacgacccgcuuguguucccauccgacgaguucgacgccagcaucagccaggucaacgaaaagaucaaccaaucccuagccuucauccgcaaaagcgacgaacuacuacacaacgucaacgccggaaaauccacaaccaacaucaugaucaccaccaucaucaucgucaucaucguaauccuacucucucucaucgccgucggccuccuacuguacuguaaagcccgauagggacuagucccuguucccagagcccacuuuuuuuucuuuuuuugaaauaaaauagccugucuuucagaucuaaaaaaaaaaaaaaaaaaaaaaaaaaaaaaaaaaaaaaaaaaaaaaaaaaaaaaaaaaaaaaaaugcaucccccccccccccccccccccccccccccccaaaggcucuuuucagagccaccagaauu

SEQ ID NO: 502 - RNA, 1957 nt, Artificial Sequence
  mRNA product Design a-2 comprising derived and/or modified sequence from HRSV(A2)__F-del (artificial)
gggagaguccgcucagccagguugcagaagcggcuuagcguguguccuaaucuucucucugcguguagguaggccugugccgcaaacaagcuuaccauggaguugcuaauccucaaagcaaaugcaauuaccacaauccucacugcagucacauuuuguuuugcuucuggucaaaacaucacugaagaauuuuaucaaucaacaugcagugcaguuagcaaaggcuaucuuagugcucugagaacugguugguauaccaguguuauaacuauagaauuaaguaauaucaaggaaaauaaguguaauggaacagaugcuaagguaaaauugauaaaacaagaauuagauaaauauaaaaaugcuguaacagaauugcaguugcucaugcaaagcacaccagcaacaaacaaucgagccagaagagaacuaccaagguuuaugaauuauacacucaacaaugccaaaaaaaccaauguaacauuaagcaagaaaaggaaaagaagauuucuugguuuuuuguuagguguuggaucugcaaucgccaguggcguugcuguaucuaagguccugcaccuagaaggggaagugaacaagaucaaaagugcucuacuauccacaaacaaggcuguagucagcuuaucaaauggaguuagugucuuaaccagcaaaguguuagaccucaaaaacuauauagauaaacaauuguuaccuauugugaacaagcaaagcugcagcauaucaaauauagaaacugugauagaguuccaacaaaagaacaacagacuacuagagauuaccagggaauuuaguguuaaugcagguguaacuacaccuguaagcacuuacauguuaacuaauagugaauuauugucauuaaucaaugauaugccuauaacaaaugaucagaaaaaguuaauguccaacaauguucaaauaguuagacagcaaaguuacucuaucauguccauaauaaaagaggaagucuuagcauauguaguacaauuaccacuauaugguguuauagauacacccuguuggaaacuacacacauccccucuauguacaaccaacacaaaagaaggguccaacaucuguuuaacaagaacugacagaggaugguacugugacaaugcaggaucaguaucuuucuucccacaagcugaaacauguaaaguucaaucaaaucgaguauuuugugacacaaugaacaguuuaacauuaccaagugaaguaaaucucugcaauguugacauauucaaccccaaauaugauuguaaaauuaugacuucaaaaacagauguaagcagcuccguuaucacaucucuaggagccauugugucaugcuauggcaaaacuaaauguacagcauccaauaaaaaucguggaaucauaaagacauuuucuaacgggugcgauuauguaucaaauaaagggguggacacugugucuguagguaacacauuauauuauguaaauaagcaagaagguaaaagucucuauguaaaaggugaaccaauaauaaauuucuaugacccauuaguauuccccucugaugaauuugaugcaucaauaucucaagucaacgagaagauuaaccagagccuagcauuuauucguaaauccgaugaauuauuacauaauguaaaugcugguaaauccaccacaaauaucaugauaacuacuauaauuauagugauuauaguaauauuguuaucauuaauugcuguuggacugcucuuauacuguaaggccagauaaggacuagucccuguucccagagcccacuuuuuuuucuuuuuuugaaauaaaauagccugucuuucagaucuaaaaaaaaaaaaaaaaaaaaaaaaaaaaaaaaaaaaaaaaaaaaaaaaaaaaaaaaaaaaaaaaugcaucccccccccccccccccccccccccccccccaaaggcucuuuucagagccaccagaauu

SEQ ID NO: 503 - RNA, 1957 nt, Artificial Sequence
  mRNA product Design a-2 comprising derived and/or modified sequence from HRSV(A2)__F-del (opt1)
gggagaguccgcucagccagguugcagaagcggcuuagcguguguccuaaucuucucucugcguguagguaggccugugccgcaaacaagcuuaccauggagcugcucauccugaaggccaacgccaucaccaccauccugacggcggugaccuucugcuucgccagcggccagaacaucaccgaggaguucuaccaguccaccugcagcgccgucuccaagggguaccucagcgcccugcggacgggcugguacaccuccgugaucaccaucgagcugagcaacaucaaggagaacaagugcaacgggaccgacgccaaggugaagcucaucaagcaggagcuggacaaguacaagaacgcggucacggagcugcagcuccugaugcaguccaccccggcaaccaacaaccgcgcccggcgcgagcugccccgguucaugaacuacacccucaacaacgccaagaagacgaacgugacccugagcaagaagcgcaagcggcgcuuccugggcuuccuccugggggugggcuccgccaucgcgagcggcgucgccguguccaaggugcugcaccucgagggggaggucaacaagaucaagagcgcccugcuguccaccaacaaggccguggugagccucuccaacggcgucagcgugcugaccuccaaggugcuggaccucaagaacuacaucgacaagcagcugcugcccaucgucaacaagcagagcugcuccaucagcaacaucgagacggugaucgaguuccagcagaagaacaaccggcuccuggagaucacccgcgaguucagcgugaacgccggggucaccacccccguguccacguacaugcugaccaacagcgagcuccugucccugaucaacgacaugccgaucaccaacgaccagaagaagcucaugagcaacaacgugcagaucguccggcagcaguccuacagcaucauguccaucaucaaggaggaggugcuggcguacgugguccagcugccccucuacggcgugaucgacacccccugcuggaagcugcacacgagcccccugugcaccaccaacaccaaggagggguccaacaucugccucacgcgcaccgaccggggcugguacugcgacaacgccggcagcgucuccuucuucccgcaggccgagaccugcaaggugcagagcaaccgcguguucugcgacaccaugaacucccugacgcugcccagcgagguaaaccucugcaacgucgacaucuucaaccccaaguacgacugcaagaucaugaccuccaagaccgacgugagcuccagcgugaucaccucccugggggccaucgucagcugcuacggcaagacgaagugcaccgccagcaacaagaaccgggggaucaucaagaccuucuccaacggcugcgacuacgugagcaacaagggcguggacaccguguccgucgggaacacccuguacuacgugaacaagcaggagggcaagagccucuacgugaagggggagcccaucaucaacuucuacgacccgcuggucuuccccuccgacgaguucgacgcgagcaucucccaggugaacgagaagaucaaccagagccuggccuucauccgcaaguccgacgagcugcuccacaacgugaacgccggcaagagcacgaccaacaucaugaucaccaccaucaucaucgucaucaucgugauccugcugucccucaucgccguggggcugcugcucuacugcaaggcccggugaggacuagucccuguucccagagcccacuuuuuuuucuuuuuuugaaauaaaauagccugucuuucagaucuaaaaaaaaaaaaaaaaaaaaaaaaaaaaaaaaaaaaaaaaaaaaaaaaaaaaaaaaaaaaaaaaugcaucccccccccccccccccccccccccccccccaaaggcucuuuucagagccaccagaauu

SEQ ID NO: 504 - RNA, 1957 nt, Artificial Sequence
  mRNA product Design a-2 comprising derived and/or modified sequence from HRSV(A2)__F-del (opt1)
gggagaguccgcucagccagguugcagaagcggcuuagcguguguccuaaucuucucucugcguguagguaggccugugccgcaaacaagcuuaccauggagcugcucauccugaaggccaacgccaucaccaccauccugacggcggugaccuucugcuucgccagcggccagaacaucaccgaggaguucuaccaguccacgugcagcgccgucuccaagggguaccucagcgcccugcgcaccggcugguacaccuccgugaucaccaucgagcugagcaacaucaaggagaacaagugcaacgggaccgacgccaaggugaagcucaucaagcaggagcuggacaaguacaagaacgcggucacggagcugcagcuccugaugcaguccacccccgccaccaacaaccgggcccgccgggagcugccgcgcuucaugaacuacacccucaacaacgccaagaagacgaacgugacccugagcaagaagcggaagcgccgguuccugggcuuccuccugggggugggcuccgcgaucgccagcggcgucgccguguccaaggugcugcaccucgagggggaggucaacaagaucaagagcgcccugcuguccaccaacaaggccguggugagccucuccaacggcgucagcgugcugaccuccaaggugcuggaccucaagaacuacaucgacaagcagcugcugcccaucgucaacaagcagagcugcuccaucagcaacaucgagacggugaucgaguuccagcagaagaacaaccgccuccuggagaucacccgggaguucagcgugaacgcgggggucaccacccccguguccacguacaugcugaccaacagcgagcuccugucccugaucaacgacaugcccaucaccaacgaccagaagaagcucaugagcaacaacgugcagaucguccgccagcaguccuacagcaucauguccaucaucaaggaggaggugcuggccuacgugguccagcugccgcucuacggcgugaucgacacccccugcuggaagcugcacacgagcccccugugcaccaccaacaccaaggagggguccaacaucugccucacgcggaccgaccgcggcugguacugcgacaacgccggcagcgucuccuucuucccccaggccgagaccugcaaggugcagagcaaccggguguucugcgacaccaugaacucccugacgcugccgagcgaggucaaccucugcaacguggacaucuucaaccccaaguacgacugcaagaucaugaccuccaagaccgacgugagcuccagcgucaucaccucccugggggccaucgugagcugcuacggcaagacgaagugcaccgcgagcaacaagaaccgcgggaucaucaagaccuucuccaacggcugcgacuacgugagcaacaagggcgucgacaccguguccguggggaacacccuguacuacgucaacaagcaggagggcaagagccucuacgugaagggggagcccaucaucaacuucuacgacccccugguguucccguccgacgaguucgacgccagcaucucccaggucaacgagaagaucaaccagagccuggccuucauccggaaguccgacgagcuccugcacaacgugaacgccggcaagagcacgaccaacaucaugaucaccaccaucaucaucgugaucaucgucauccugcugucccucaucgccguggggcugcugcucuacugcaaggcgcgcugaggacuagucccuguucccagagcccacuuuuuuuucuuuuuuugaaauaaaauagccugucuuucagaucuaaaaaaaaaaaaaaaaaaaaaaaaaaaaaaaaaaaaaaaaaaaaaaaaaaaaaaaaaaaaaaaaugcaucccccccccccccccccccccccccccccccaaaggcucuuuucagagccaccagaauu

SEQ ID NO: 505 - RNA, 1957 nt, Artificial Sequence
  mRNA product Design a-2 comprising derived and/or modified sequence from HRSV(A2)__F-del (opt2)
gggagaguccgcucagccagguugcagaagcggcuuagcguguguccuaaucuucucucugcguguagguaggccugugccgcaaacaagcuuaccauggagcuccucauccucaaggccaacgccaucaccaccauccucaccgccgucaccuucugcuucgccuccggccagaacaucaccgaggaguucuaccaguccaccugcuccgccgucuccaagggcuaccucuccgcccuccgcaccggcugguacaccuccgucaucaccaucgagcucuccaacaucaaggagaacaagugcaacggcaccgacgccaaggucaagcucaucaagcaggagcucgacaaguacaagaacgccgucaccgagcuccagcuccucaugcaguccacccccgccaccaacaaccgcgcccgccgcgagcucccccgcuucaugaacuacacccucaacaacgccaagaagaccaacgucacccucuccaagaagcgcaagcgccgcuuccucggcuuccuccucggcgucggcuccgccaucgccuccggcgucgccgucuccaagguccuccaccucgagggcgaggucaacaagaucaaguccgcccuccucuccaccaacaaggccgucgucucccucuccaacggcgucuccguccucaccuccaagguccucgaccucaagaacuacaucgacaagcagcuccuccccaucgucaacaagcaguccugcuccaucuccaacaucgagaccgucaucgaguuccagcagaagaacaaccgccuccucgagaucacccgcgaguucuccgucaacgccggcgucaccacccccgucuccaccuacaugcucaccaacuccgagcuccucucccucaucaacgacaugcccaucaccaacgaccagaagaagcucauguccaacaacguccagaucguccgccagcaguccuacuccaucauguccaucaucaaggaggagguccucgccuacgucguccagcucccccucuacggcgucaucgacacccccugcuggaagcuccacaccuccccccucugcaccaccaacaccaaggagggcuccaacaucugccucacccgcaccgaccgcggcugguacugcgacaacgccggcuccgucuccuucuucccccaggccgagaccugcaagguccaguccaaccgcgucuucugcgacaccaugaacucccucacccuccccuccgaggucaaccucugcaacgucgacaucuucaaccccaaguacgacugcaagaucaugaccuccaagaccgacgucuccuccuccgucaucaccucccucggcgccaucgucuccugcuacggcaagaccaagugcaccgccuccaacaagaaccgcggcaucaucaagaccuucuccaacggcugcgacuacgucuccaacaagggcgucgacaccgucuccgucggcaacacccucuacuacgucaacaagcaggagggcaagucccucuacgucaagggcgagcccaucaucaacuucuacgacccccucgucuuccccuccgacgaguucgacgccuccaucucccaggucaacgagaagaucaaccagucccucgccuucauccgcaaguccgacgagcuccuccacaacgucaacgccggcaaguccaccaccaacaucaugaucaccaccaucaucaucgucaucaucgucauccuccucucccucaucgccgucggccuccuccucuacugcaaggcccgcugaggacuagucccuguucccagagcccacuuuuuuuucuuuuuuugaaauaaaauagccugucuuucagaucuaaaaaaaaaaaaaaaaaaaaaaaaaaaaaaaaaaaaaaaaaaaaaaaaaaaaaaaaaaaaaaaaugcaucccccccccccccccccccccccccccccccaaaggcucuuuucagagccaccagaauu

SEQ ID NO: 506 - RNA, 1957 nt, Artificial Sequence
  mRNA product Design a-2 comprising derived and/or modified sequence from HRSV(A2)__F-del (opt3)
gggagaguccgcucagccagguugcagaagcggcuuagcguguguccuaaucuucucucugcguguagguaggccugugccgcaaacaagcuuaccauggagcugcucauccuuaaggccaacgcuauuaccacaauacugacugcagugacguucugcuuugccagcggccagaauaucaccgaagaguucuaccaauccacauguucugcggucucaaaaggguauuugagugcuuuaagaacuggaugguacaccagcguuauuacaaucgaacuguccaacauuaaggagaauaaaugcaacgguaccgacgccaaggugaaacuaaucaagcaggaacucgauaaguauaaaaaugcaguaacugagcugcagcuucugaugcagucuacacccgccaccaacaauagggcucggcgcgaguugccucgauuuaugaacuacacgcucaauaacgcaaagaaaacuaaugugacccugucgaagaaacguaagagaagguuccugggcuuucucuuaggggucggaucagccauagcuagcggcguggccguuaguaaggugcugcaccuugaaggugaggucaacaaaaucaaguccgcguugcugucuacaaauaaagcagugguaagccuauccaacgggguuucagugcucacuucuaagguccuggaccuuaaaaauuauauugauaagcaacuguugccaaucgugaacaaacagagcuguucuauuuccaacaucgaaaccgugauagaguuccagcagaagaauaaccggcuccuggagauuacacgcgaauuuucagucaaugccggaguuaccacgccggugagcacuuacauguuaacaaacagugagcugcucucucuuaucaaugacaugcccauuaccaacgaucaaaagaaacugauguccaauaacguacagaucgugagacagcagagcuauucgaucaugucuauuauaaaggaagaggucuuggcuuacgugguucaacuaccucuguacggcgugaucgacacuccaugcuggaaacuccauacauccccacuguguaccacgaauaccaaggaaggcucaaacauuugccuuacaaggacugaucgggggugguauugugacaaugccggaagugucagcuucuuuccucaggcagagaccugcaaagugcaguccaaccgcguauucugugauacaaugaauagucugacuuugccaagcgagguuaaccucugcaauguggacaucuuuaaccccaaguacgauuguaagauaaugaccucaaaaacagacgucaguuccagcgugauuaccucucugggugcuaucgucucaugcuauggcaagacuaaaugcacggccaguaacaagaaucgagggaucauuaaaacauucagcaacggaugugauuacguguccaauaagggcguugacaccgugucuguagguaacacuuuauauuacgucaauaagcaagaagggaaaucgcuguaugugaagggagagccuaucauuaacuuuuacgacccccuaguuuucccgagcgaugaauuugacgcguccauaucacaggugaaugagaaaaucaaccagagucucgccuucauuagaaagucugaugaacugcuucacaaugucaacgcaggcaaaagcaccacaaauaucaugaucaccacuauuauaaucgugauuaucguaauuuugcugucccucaucgcugugggccugcuucuguacugcaaggccaggugaggacuagucccuguucccagagcccacuuuuuuuucuuuuuuugaaauaaaauagccugucuuucagaucuaaaaaaaaaaaaaaaaaaaaaaaaaaaaaaaaaaaaaaaaaaaaaaaaaaaaaaaaaaaaaaaaugcaucccccccccccccccccccccccccccccccaaaggcucuuuucagagccaccagaauu

SEQ ID NO: 507 - RNA, 1957 nt, Artificial Sequence
  mRNA product Design a-2 comprising derived and/or modified sequence from HRSV(A2)__F-del (opt4)
gggagaguccgcucagccagguugcagaagcggcuuagcguguguccuaaucuucucucugcguguagguaggccugugccgcaaacaagcuuaccauggagcugcugauccugaaggccaacgccaucaccaccauccugaccgccgugaccuucugcuucgccagcggccagaacaucaccgaggaguucuaccagagcaccugcagcgccgugagcaagggcuaccugagcgcccugagaaccggcugguacaccagcgugaucaccaucgagcugagcaacaucaaggagaacaagugcaacggcaccgacgccaaggugaagcugaucaagcaggagcuggacaaguacaagaacgccgugaccgagcugcagcugcugaugcagagcacccccgccaccaacaacagagccagaagagagcugcccagauucaugaacuacacccugaacaacgccaagaagaccaacgugacccugagcaagaagagaaagagaagauuccugggcuuccugcugggcgugggcagcgccaucgccagcggcguggccgugagcaaggugcugcaccuggagggcgaggugaacaagaucaagagcgcccugcugagcaccaacaaggccguggugagccugagcaacggcgugagcgugcugaccagcaaggugcuggaccugaagaacuacaucgacaagcagcugcugcccaucgugaacaagcagagcugcagcaucagcaacaucgagaccgugaucgaguuccagcagaagaacaacagacugcuggagaucaccagagaguucagcgugaacgccggcgugaccacccccgugagcaccuacaugcugaccaacagcgagcugcugagccugaucaacgacaugcccaucaccaacgaccagaagaagcugaugagcaacaacgugcagaucgugagacagcagagcuacagcaucaugagcaucaucaaggaggaggugcuggccuacguggugcagcugccccuguacggcgugaucgacacccccugcuggaagcugcacaccagcccccugugcaccaccaacaccaaggagggcagcaacaucugccugaccagaaccgacagaggcugguacugcgacaacgccggcagcgugagcuucuucccccaggccgagaccugcaaggugcagagcaacagaguguucugcgacaccaugaacagccugacccugcccagcgaggugaaccugugcaacguggacaucuucaaccccaaguacgacugcaagaucaugaccagcaagaccgacgugagcagcagcgugaucaccagccugggcgccaucgugagcugcuacggcaagaccaagugcaccgccagcaacaagaacagaggcaucaucaagaccuucagcaacggcugcgacuacgugagcaacaagggcguggacaccgugagcgugggcaacacccuguacuacgugaacaagcaggagggcaagagccuguacgugaagggcgagcccaucaucaacuucuacgacccccugguguuccccagcgacgaguucgacgccagcaucagccaggugaacgagaagaucaaccagagccuggccuucaucagaaagagcgacgagcugcugcacaacgugaacgccggcaagagcaccaccaacaucaugaucaccaccaucaucaucgugaucaucgugauccugcugagccugaucgccgugggccugcugcuguacugcaaggccagaugaggacuagucccuguucccagagcccacuuuuuuuucuuuuuuugaaauaaaauagccugucuuucagaucuaaaaaaaaaaaaaaaaaaaaaaaaaaaaaaaaaaaaaaaaaaaaaaaaaaaaaaaaaaaaaaaaugcaucccccccccccccccccccccccccccccccaaaggcucuuuucagagccaccagaauu

SEQ ID NO: 508 - RNA, 1957 nt, Artificial Sequence
  mRNA product Design a-2 comprising derived and/or modified sequence from HRSV(A2)__F-del (opt5)
gggagaguccgcucagccagguugcagaagcggcuuagcguguguccuaaucuucucucugcguguagguaggccugugccgcaaacaagcuuaccauggagcugcucauccugaaggccaacgcuauuaccacaauccuuacggccgugaccuucugcuuugcgagcggccagaauauuacagaagaguucuaccaauccaccuguucugcugucagcaaaggguaucuguccgcccucagaacaggaugguacaccucuguuaucacaauugaacugagcaacaucaaggagaauaaaugcaacggcaccgacgccaaggugaaacuuaucaagcaggaacuggauaaguauaaaaaugcugugacggagcuccagcugcugaugcaguccacccccgccacaaacaaucgggcucgcagagagcucccucgguuuaugaacuacacccugaauaacgccaagaaaacaaaugucacccuuucuaagaaacgcaagagacgguuccugggguuucuccugggagugggcagcgcgauugccuccgggguugcugugagcaagguccuucaccuggaaggagaggugaacaaaaucaagucugcccuccuguccacgaauaaagcuguugugagccugucuaacggcgucuccgugcucacaagcaaggugcuggaccuuaaaaauuauauugauaagcaacugcucccgaucgucaacaaacagucuuguuccauuagcaacaucgaaaccguuauugaguuccagcagaagaauaaccgccugcuugagaucacaagagaauuuuccgugaaugccggcgugaccacccccgucucuacauacaugcugacgaacagcgagcuccugucccugaucaaugacaugccuauuaccaacgaucaaaagaaacucaugagcaauaacgugcagaucguucggcagcagucuuauuccauuaugagcaucauuaaggaagaggugcuggcguacgucgugcaacuuccccuguacgggguuaucgacacaccuugcuggaaacuccauaccucuccccuguguacaaccaauacgaaggaaggaagcaacaucugccuuacacgcaccgauagaggcugguauugugacaaugccggguccgugucuuucuuuccucaggcugagaccugcaaaguccagagcaaccggguguucugugauacaaugaacucccugacccucccgagcgaggucaaucugugcaauguggacauuuuuaaccccaaguacgauuguaagaucaugacaucuaaaacggacguuuccagcucugugauuaccucccugggagccaucgucagcugcuauggcaagacaaaaugcaccgcuuccaacaagaaucgcgggauuaucaaaacauucucuaacggaugugauuacgugagcaauaagggcguugacaccguguccgucggcaacacgcucuauuacgugaauaagcaagaagggaaaucucuguaugugaagggagagccuaucauuaacuuuuacgacccccuuguuuucccuagcgaugaauuugacgccuccaucagccaggucaaugagaaaauuaaccagucucuggccuucaucagaaaguccgaugaacuccugcacaaugugaacgcuggcaaaagcaccacaaauauuaugaucaccacaauuaucaucgugauuaucgucauucugcuuucucucaucgcgguggggcugcugcucuacugcaaggcccggugaggacuagucccuguucccagagcccacuuuuuuuucuuuuuuugaaauaaaauagccugucuuucagaucuaaaaaaaaaaaaaaaaaaaaaaaaaaaaaaaaaaaaaaaaaaaaaaaaaaaaaaaaaaaaaaaaugcaucccccccccccccccccccccccccccccccaaaggcucuuuucagagccaccagaauu

SEQ ID NO: 509 - RNA, 1957 nt, Artificial Sequence
  mRNA product Design a-2 comprising derived and/or modified sequence from HRSV(A2)__F-del (opt6)
gggagaguccgcucagccagguugcagaagcggcuuagcguguguccuaaucuucucucugcguguagguaggccugugccgcaaacaagcuuaccauggaauuacuaauacucaaagccaacgcaauaacaacaauacuaacagcaguaacauucugcuucgcaucaggacaaaacaucacagaagaauuuuaccaaaguacaugcagugcagucucuaaaggauaccucagugccuuacgcacaggaugguacacaucaguaauaacaaucgaacuuucaaacauaaaagaaaacaaaugcaauggaaccgacgccaaaguaaaacuaaucaaacaagaacuagacaaauauaaaaaugcaguaacagaauuacaacuccuaaugcaauccacaccagcaacaaauaacagagcaagacgagaacucccucgauucaugaauuacacauuaaacaacgcaaaaaaaacuaacguaacuuuaucaaaaaaaagaaaacguagauuucuaggauuccuacuaggcguaggguccgccauugcaucaggaguagcaguuagcaaaguauuacauuuagaaggagaaguaaauaaaaucaaaagcgcacuacucucaaccaacaaagcaguaguaucacucucaaacggaguaucaguacuaacauccaaaguacucgaccucaaaaacuacauagacaaacaauuacuacccauaguaaacaaacaaucaugcucuauaucaaauaucgaaacaguaaucgaauuucaacaaaaaaacaaucgacuacuugaaauaacaagagaguucuccgucaaugccggagucaccacaccagucucaacauacaugcuaaccaacucugaacuccuaucacuaauaaaugacaugccaauaacaaacgaccaaaaaaaacuaaugucaaauaacguacaaauaguacgacaacaaaguuauuccauaaugaguauaaucaaagaagaaguguuagcauacguaguccaacuaccauuauauggaguaauagacacaccauguuggaaauuacacaccucaccacucugcacuaccaauacaaaagaaggcucaaauauaugccuaacucgcacagacagaggcugguacugcgauaacgcaggauccguaucuuucuuuccccaagcagaaacuugcaaaguacaaucaaacagagucuucugcgacaccaugaauagucucacauuaccaucugaaguaaaccuauguaacguagauauauucaauccaaaauacgacugcaaaauaaugacaucaaaaaccgacgucucuagcaguguaaucacaucacuaggagcaauaguaagcugcuauggaaaaacaaaauguacagcaucaaacaaaaacaggggaauaauaaaaaccuucucaaacggaugugacuacguaucaaauaaaggcguagacacaguaagcguaggaaacacccuauacuacguuaacaaacaagaagggaaaucauuauacguaaaaggagaaccaauaauaaacuucuacgauccacucguauucccauccgacgaauuugacgccagcauaucccaaguuaacgaaaaaauaaaccaaucacuugcauuuauacgaaaaucugaugaacuucuccacaacguaaaugcaggaaaauccaccaccaauauaaugaucacaacuaucaucauaguaauaaucgucauuuuacuaucauuaauagcaguuggccuacuucuauacugcaaagcaagauaaggacuagucccuguucccagagcccacuuuuuuuucuuuuuuugaaauaaaauagccugucuuucagaucuaaaaaaaaaaaaaaaaaaaaaaaaaaaaaaaaaaaaaaaaaaaaaaaaaaaaaaaaaaaaaaaaugcaucccccccccccccccccccccccccccccccaaaggcucuuuucagagccaccagaauu

SEQ ID NO: 510 - RNA, 1957 nt, Artificial Sequence
  mRNA product Design a-2 comprising derived and/or modified sequence from HRSV(A2)__F-del (opt11)
gggagaguccgcucagccagguugcagaagcggcuuagcguguguccuaaucuucucucugcguguagguaggccugugccgcaaacaagcuuaccauggaacuacuaauccuaaaagccaacgcgaucaccaccauccuaacggcagucaccuucugcuucgcaucaggccaaaacaucacagaagaguucuaccaaagcacaugcuccgccguauccaaaggcuaccucagcgcccuacgcacaggcugguacacaucugucaucaccauagaacucuccaacaucaaagaaaacaaaugcaacggcacugacgccaaaguaaagcugaucaaacaagaacucgacaaauacaaaaacgcagucaccgaacuccaacuacucaugcaauccaccccugcaaccaacaacagggcccgccgcgaacucccccgcuucaugaacuacacuuuaaacaacgccaaaaagaccaacgucacacucagcaagaaacggaaacgacgauuccuaggguuucuccuaggcgucggcucggcaaucgccuccggcgucgccguaagcaaaguacuacaccuagaaggcgaagugaacaaaaucaaaagugcccuucucuccaccaacaaggccguagucucucuauccaacggagucucaguccucaccucaaagguccucgaccucaaaaacuacaucgacaaacaacuacuccccauugucaacaagcagucaugcuccauaucaaacaucgaaaccgucaucgaguuccaacagaaaaacaaccgacuccucgaaauaaccagagaguucucggucaacgccggcgucaccaccccagucagcaccuacaugcucacuaacuccgaacuccuaucccucaucaacgacaugccaauuaccaacgaccaaaagaaacuaaugucgaacaacguucaaaucguccgacaacaaaguuacuccaucaugagcauaaucaaagaagaaguucuagcguacgucguccaacucccacuauacggcgucaucgacacuccgugcuggaaacuccacacaucaccccuauguacaaccaacacaaaagaaggcagcaacaucugccucacccgcaccgaccgagggugguauugcgauaacgcuggcagcgucuccuucuucccccaagccgaaaccugcaaaguccaaucaaacagaguauucugcgacaccaugaacucccuuacucucccuagcgaagucaaccucugcaacguugacauauucaaccccaaauacgacugcaaaaucaugaccuccaagaccgacgucuccuccuccgucaucacaucucuaggugccauugucuccugcuacggaaaaaccaaaugcacagccuccaacaaaaaccgcggcaucauaaaaaccuucuccaacggcugcgacuacgucaguaauaaaggcgucgacacgguauccguugggaauacgcuuuacuacguaaauaaacaagaaggcaaaucccucuacgucaaaggugaacccaucauaaacuucuacgacccgcuuguguucccauccgacgaguucgacgccagcaucagccaggucaacgaaaagaucaaccaaucccuagccuucauccgcaaaagcgacgaacuacuacacaacgucaacgccggaaaauccacaaccaacaucaugaucaccaccaucaucaucgucaucaucguaauccuacucucucucaucgccgucggccuccuacuguacuguaaagcccgauagggacuagucccuguucccagagcccacuuuuuuuucuuuuuuugaaauaaaauagccugucuuucagaucuaaaaaaaaaaaaaaaaaaaaaaaaaaaaaaaaaaaaaaaaaaaaaaaaaaaaaaaaaaaaaaaaugcaucccccccccccccccccccccccccccccccaaaggcucuuuucagagccaccagaauu

SEQ ID NO: 511 - RNA, 2035 nt, Artificial Sequence
  mRNA product Design a-3 comprising derived and/or modified sequence from HRSV(A2)__F-del (artificial)
gggagagggcgcuuggcuugcaaggacccugagcugcggcauugaagcacacccaacccaacucgacugaagucagccucacugaaccggaucugagaaucuucucucucugggcuugccagggcucuccgaaccuagcuagcauccucuucaauuccaacuagaaagcuuaccauggaguugcuaauccucaaagcaaaugcaauuaccacaauccucacugcagucacauuuuguuuugcuucuggucaaaacaucacugaagaauuuuaucaaucaacaugcagugcaguuagcaaaggcuaucuuagugcucugagaacugguugguauaccaguguuauaacuauagaauuaaguaauaucaaggaaaauaaguguaauggaacagaugcuaagguaaaauugauaaaacaagaauuagauaaauauaaaaaugcuguaacagaauugcaguugcucaugcaaagcacaccagcaacaaacaaucgagccagaagagaacuaccaagguuuaugaauuauacacucaacaaugccaaaaaaaccaauguaacauuaagcaagaaaaggaaaagaagauuucuugguuuuuuguuagguguuggaucugcaaucgccaguggcguugcuguaucuaagguccugcaccuagaaggggaagugaacaagaucaaaagugcucuacuauccacaaacaaggcuguagucagcuuaucaaauggaguuagugucuuaaccagcaaaguguuagaccucaaaaacuauauagauaaacaauuguuaccuauugugaacaagcaaagcugcagcauaucaaauauagaaacugugauagaguuccaacaaaagaacaacagacuacuagagauuaccagggaauuuaguguuaaugcagguguaacuacaccuguaagcacuuacauguuaacuaauagugaauuauugucauuaaucaaugauaugccuauaacaaaugaucagaaaaaguuaauguccaacaauguucaaauaguuagacagcaaaguuacucuaucauguccauaauaaaagaggaagucuuagcauauguaguacaauuaccacuauaugguguuauagauacacccuguuggaaacuacacacauccccucuauguacaaccaacacaaaagaaggguccaacaucuguuuaacaagaacugacagaggaugguacugugacaaugcaggaucaguaucuuucuucccacaagcugaaacauguaaaguucaaucaaaucgaguauuuugugacacaaugaacaguuuaacauuaccaagugaaguaaaucucugcaauguugacauauucaaccccaaauaugauuguaaaauuaugacuucaaaaacagauguaagcagcuccguuaucacaucucuaggagccauugugucaugcuauggcaaaacuaaauguacagcauccaauaaaaaucguggaaucauaaagacauuuucuaacgggugcgauuauguaucaaauaaagggguggacacugugucuguagguaacacauuauauuauguaaauaagcaagaagguaaaagucucuauguaaaaggugaaccaauaauaaauuucuaugacccauuaguauuccccucugaugaauuugaugcaucaauaucucaagucaacgagaagauuaaccagagccuagcauuuauucguaaauccgaugaauuauuacauaauguaaaugcugguaaauccaccacaaauaucaugauaacuacuauaauuauagugauuauaguaauauuguuaucauuaauugcuguuggacugcucuuauacuguaaggccagauaaggacuagucccuguucccagagcccacuuuuuuuucuuuuuuugaaauaaaauagccugucuuucagaucuaaaaaaaaaaaaaaaaaaaaaaaaaaaaaaaaaaaaaaaaaaaaaaaaaaaaaaaaaaaaaaaaugcaucccccccccccccccccccccccccccccccaaaggcucuuuucagagccaccagaauu

SEQ ID NO: 512 - RNA, 2035 nt, Artificial Sequence
  mRNA product Design a-3 comprising derived and/or modified sequence from HRSV(A2)__F-del (opt1)
gggagagggcgcuuggcuugcaaggacccugagcugcggcauugaagcacacccaacccaacucgacugaagucagccucacugaaccggaucugagaaucuucucucucugggcuugccagggcucuccgaaccuagcuagcauccucuucaauuccaacuagaaagcuuaccauggagcugcucauccugaaggccaacgccaucaccaccauccugacggcggugaccuucugcuucgccagcggccagaacaucaccgaggaguucuaccaguccaccugcagcgccgucuccaagggguaccucagcgcccugcggacgggcugguacaccuccgugaucaccaucgagcugagcaacaucaaggagaacaagugcaacgggaccgacgccaaggugaagcucaucaagcaggagcuggacaaguacaagaacgcggucacggagcugcagcuccugaugcaguccaccccggcaaccaacaaccgcgcccggcgcgagcugccccgguucaugaacuacacccucaacaacgccaagaagacgaacgugacccugagcaagaagcgcaagcggcgcuuccugggcuuccuccugggggugggcuccgccaucgcgagcggcgucgccguguccaaggugcugcaccucgagggggaggucaacaagaucaagagcgcccugcuguccaccaacaaggccguggugagccucuccaacggcgucagcgugcugaccuccaaggugcuggaccucaagaacuacaucgacaagcagcugcugcccaucgucaacaagcagagcugcuccaucagcaacaucgagacggugaucgaguuccagcagaagaacaaccggcuccuggagaucacccgcgaguucagcgugaacgccggggucaccacccccguguccacguacaugcugaccaacagcgagcuccugucccugaucaacgacaugccgaucaccaacgaccagaagaagcucaugagcaacaacgugcagaucguccggcagcaguccuacagcaucauguccaucaucaaggaggaggugcuggcguacgugguccagcugccccucuacggcgugaucgacacccccugcuggaagcugcacacgagcccccugugcaccaccaacaccaaggagggguccaacaucugccucacgcgcaccgaccggggcugguacugcgacaacgccggcagcgucuccuucuucccgcaggccgagaccugcaaggugcagagcaaccgcguguucugcgacaccaugaacucccugacgcugcccagcgagguaaaccucugcaacgucgacaucuucaaccccaaguacgacugcaagaucaugaccuccaagaccgacgugagcuccagcgugaucaccucccugggggccaucgucagcugcuacggcaagacgaagugcaccgccagcaacaagaaccgggggaucaucaagaccuucuccaacggcugcgacuacgugagcaacaagggcguggacaccguguccgucgggaacacccuguacuacgugaacaagcaggagggcaagagccucuacgugaagggggagcccaucaucaacuucuacgacccgcuggucuuccccuccgacgaguucgacgcgagcaucucccaggugaacgagaagaucaaccagagccuggccuucauccgcaaguccgacgagcugcuccacaacgugaacgccggcaagagcacgaccaacaucaugaucaccaccaucaucaucgucaucaucgugauccugcugucccucaucgccguggggcugcugcucuacugcaaggcccggugaggacuagucccuguucccagagcccacuuuuuuuucuuuuuuugaaauaaaauagccugucuuucagaucuaaaaaaaaaaaaaaaaaaaaaaaaaaaaaaaaaaaaaaaaaaaaaaaaaaaaaaaaaaaaaaaaugcaucccccccccccccccccccccccccccccccaaaggcucuuuucagagccaccagaauu

SEQ ID NO: 513 - RNA, 2035 nt, Artificial Sequence
  mRNA product Design a-3 comprising derived and/or modified sequence from HRSV(A2)__F-del (opt1)
gggagagggcgcuuggcuugcaaggacccugagcugcggcauugaagcacacccaacccaacucgacugaagucagccucacugaaccggaucugagaaucuucucucucugggcuugccagggcucuccgaaccuagcuagcauccucuucaauuccaacuagaaagcuuaccauggagcugcucauccugaaggccaacgccaucaccaccauccugacggcggugaccuucugcuucgccagcggccagaacaucaccgaggaguucuaccaguccacgugcagcgccgucuccaagggguaccucagcgcccugcgcaccggcugguacaccuccgugaucaccaucgagcugagcaacaucaaggagaacaagugcaacgggaccgacgccaaggugaagcucaucaagcaggagcuggacaaguacaagaacgcggucacggagcugcagcuccugaugcaguccacccccgccaccaacaaccgggcccgccgggagcugccgcgcuucaugaacuacacccucaacaacgccaagaagacgaacgugacccugagcaagaagcggaagcgccgguuccugggcuuccuccugggggugggcuccgcgaucgccagcggcgucgccguguccaaggugcugcaccucgagggggaggucaacaagaucaagagcgcccugcuguccaccaacaaggccguggugagccucuccaacggcgucagcgugcugaccuccaaggugcuggaccucaagaacuacaucgacaagcagcugcugcccaucgucaacaagcagagcugcuccaucagcaacaucgagacggugaucgaguuccagcagaagaacaaccgccuccuggagaucacccgggaguucagcgugaacgcgggggucaccacccccguguccacguacaugcugaccaacagcgagcuccugucccugaucaacgacaugcccaucaccaacgaccagaagaagcucaugagcaacaacgugcagaucguccgccagcaguccuacagcaucauguccaucaucaaggaggaggugcuggccuacgugguccagcugccgcucuacggcgugaucgacacccccugcuggaagcugcacacgagcccccugugcaccaccaacaccaaggagggguccaacaucugccucacgcggaccgaccgcggcugguacugcgacaacgccggcagcgucuccuucuucccccaggccgagaccugcaaggugcagagcaaccggguguucugcgacaccaugaacucccugacgcugccgagcgaggucaaccucugcaacguggacaucuucaaccccaaguacgacugcaagaucaugaccuccaagaccgacgugagcuccagcgucaucaccucccugggggccaucgugagcugcuacggcaagacgaagugcaccgcgagcaacaagaaccgcgggaucaucaagaccuucuccaacggcugcgacuacgugagcaacaagggcgucgacaccguguccguggggaacacccuguacuacgucaacaagcaggagggcaagagccucuacgugaagggggagcccaucaucaacuucuacgacccccugguguucccguccgacgaguucgacgccagcaucucccaggucaacgagaagaucaaccagagccuggccuucauccggaaguccgacgagcuccugcacaacgugaacgccggcaagagcacgaccaacaucaugaucaccaccaucaucaucgugaucaucgucauccugcugucccucaucgccguggggcugcugcucuacugcaaggcgcgcugaggacuagucccuguucccagagcccacuuuuuuuucuuuuuuugaaauaaaauagccugucuuucagaucuaaaaaaaaaaaaaaaaaaaaaaaaaaaaaaaaaaaaaaaaaaaaaaaaaaaaaaaaaaaaaaaaugcaucccccccccccccccccccccccccccccccaaaggcucuuuucagagccaccagaauu

SEQ ID NO: 514 - RNA, 2035 nt, Artificial Sequence
  mRNA product Design a-3 comprising derived and/or modified sequence from HRSV(A2)__F-del (opt2)
gggagagggcgcuuggcuugcaaggacccugagcugcggcauugaagcacacccaacccaacucgacugaagucagccucacugaaccggaucugagaaucuucucucucugggcuugccagggcucuccgaaccuagcuagcauccucuucaauuccaacuagaaagcuuaccauggagcuccucauccucaaggccaacgccaucaccaccauccucaccgccgucaccuucugcuucgccuccggccagaacaucaccgaggaguucuaccaguccaccugcuccgccgucuccaagggcuaccucuccgcccuccgcaccggcugguacaccuccgucaucaccaucgagcucuccaacaucaaggagaacaagugcaacggcaccgacgccaaggucaagcucaucaagcaggagcucgacaaguacaagaacgccgucaccgagcuccagcuccucaugcaguccacccccgccaccaacaaccgcgcccgccgcgagcucccccgcuucaugaacuacacccucaacaacgccaagaagaccaacgucacccucuccaagaagcgcaagcgccgcuuccucggcuuccuccucggcgucggcuccgccaucgccuccggcgucgccgucuccaagguccuccaccucgagggcgaggucaacaagaucaaguccgcccuccucuccaccaacaaggccgucgucucccucuccaacggcgucuccguccucaccuccaagguccucgaccucaagaacuacaucgacaagcagcuccuccccaucgucaacaagcaguccugcuccaucuccaacaucgagaccgucaucgaguuccagcagaagaacaaccgccuccucgagaucacccgcgaguucuccgucaacgccggcgucaccacccccgucuccaccuacaugcucaccaacuccgagcuccucucccucaucaacgacaugcccaucaccaacgaccagaagaagcucauguccaacaacguccagaucguccgccagcaguccuacuccaucauguccaucaucaaggaggagguccucgccuacgucguccagcucccccucuacggcgucaucgacacccccugcuggaagcuccacaccuccccccucugcaccaccaacaccaaggagggcuccaacaucugccucacccgcaccgaccgcggcugguacugcgacaacgccggcuccgucuccuucuucccccaggccgagaccugcaagguccaguccaaccgcgucuucugcgacaccaugaacucccucacccuccccuccgaggucaaccucugcaacgucgacaucuucaaccccaaguacgacugcaagaucaugaccuccaagaccgacgucuccuccuccgucaucaccucccucggcgccaucgucuccugcuacggcaagaccaagugcaccgccuccaacaagaaccgcggcaucaucaagaccuucuccaacggcugcgacuacgucuccaacaagggcgucgacaccgucuccgucggcaacacccucuacuacgucaacaagcaggagggcaagucccucuacgucaagggcgagcccaucaucaacuucuacgacccccucgucuuccccuccgacgaguucgacgccuccaucucccaggucaacgagaagaucaaccagucccucgccuucauccgcaaguccgacgagcuccuccacaacgucaacgccggcaaguccaccaccaacaucaugaucaccaccaucaucaucgucaucaucgucauccuccucucccucaucgccgucggccuccuccucuacugcaaggcccgcugaggacuagucccuguucccagagcccacuuuuuuuucuuuuuuugaaauaaaauagccugucuuucagaucuaaaaaaaaaaaaaaaaaaaaaaaaaaaaaaaaaaaaaaaaaaaaaaaaaaaaaaaaaaaaaaaaugcaucccccccccccccccccccccccccccccccaaaggcucuuuucagagccaccagaauu

SEQ ID NO: 515 - RNA, 2035 nt, Artificial Sequence
  mRNA product Design a-3 comprising derived and/or modified sequence from HRSV(A2)__F-del (opt3)
gggagagggcgcuuggcuugcaaggacccugagcugcggcauugaagcacacccaacccaacucgacugaagucagccucacugaaccggaucugagaaucuucucucucugggcuugccagggcucuccgaaccuagcuagcauccucuucaauuccaacuagaaagcuuaccauggagcugcucauccuuaaggccaacgcuauuaccacaauacugacugcagugacguucugcuuugccagcggccagaauaucaccgaagaguucuaccaauccacauguucugcggucucaaaaggguauuugagugcuuuaagaacuggaugguacaccagcguuauuacaaucgaacuguccaacauuaaggagaauaaaugcaacgguaccgacgccaaggugaaacuaaucaagcaggaacucgauaaguauaaaaaugcaguaacugagcugcagcuucugaugcagucuacacccgccaccaacaauagggcucggcgcgaguugccucgauuuaugaacuacacgcucaauaacgcaaagaaaacuaaugugacccugucgaagaaacguaagagaagguuccugggcuuucucuuaggggucggaucagccauagcuagcggcguggccguuaguaaggugcugcaccuugaaggugaggucaacaaaaucaaguccgcguugcugucuacaaauaaagcagugguaagccuauccaacgggguuucagugcucacuucuaagguccuggaccuuaaaaauuauauugauaagcaacuguugccaaucgugaacaaacagagcuguucuauuuccaacaucgaaaccgugauagaguuccagcagaagaauaaccggcuccuggagauuacacgcgaauuuucagucaaugccggaguuaccacgccggugagcacuuacauguuaacaaacagugagcugcucucucuuaucaaugacaugcccauuaccaacgaucaaaagaaacugauguccaauaacguacagaucgugagacagcagagcuauucgaucaugucuauuauaaaggaagaggucuuggcuuacgugguucaacuaccucuguacggcgugaucgacacuccaugcuggaaacuccauacauccccacuguguaccacgaauaccaaggaaggcucaaacauuugccuuacaaggacugaucgggggugguauugugacaaugccggaagugucagcuucuuuccucaggcagagaccugcaaagugcaguccaaccgcguauucugugauacaaugaauagucugacuuugccaagcgagguuaaccucugcaauguggacaucuuuaaccccaaguacgauuguaagauaaugaccucaaaaacagacgucaguuccagcgugauuaccucucugggugcuaucgucucaugcuauggcaagacuaaaugcacggccaguaacaagaaucgagggaucauuaaaacauucagcaacggaugugauuacguguccaauaagggcguugacaccgugucuguagguaacacuuuauauuacgucaauaagcaagaagggaaaucgcuguaugugaagggagagccuaucauuaacuuuuacgacccccuaguuuucccgagcgaugaauuugacgcguccauaucacaggugaaugagaaaaucaaccagagucucgccuucauuagaaagucugaugaacugcuucacaaugucaacgcaggcaaaagcaccacaaauaucaugaucaccacuauuauaaucgugauuaucguaauuuugcugucccucaucgcugugggccugcuucuguacugcaaggccaggugaggacuagucccuguucccagagcccacuuuuuuuucuuuuuuugaaauaaaauagccugucuuucagaucuaaaaaaaaaaaaaaaaaaaaaaaaaaaaaaaaaaaaaaaaaaaaaaaaaaaaaaaaaaaaaaaaugcaucccccccccccccccccccccccccccccccaaaggcucuuuucagagccaccagaauu

SEQ ID NO: 516 - RNA, 2035 nt, Artificial Sequence
  mRNA product Design a-3 comprising derived and/or modified sequence from HRSV(A2)__F-del (opt4)
gggagagggcgcuuggcuugcaaggacccugagcugcggcauugaagcacacccaacccaacucgacugaagucagccucacugaaccggaucugagaaucuucucucucugggcuugccagggcucuccgaaccuagcuagcauccucuucaauuccaacuagaaagcuuaccauggagcugcugauccugaaggccaacgccaucaccaccauccugaccgccgugaccuucugcuucgccagcggccagaacaucaccgaggaguucuaccagagcaccugcagcgccgugagcaagggcuaccugagcgcccugagaaccggcugguacaccagcgugaucaccaucgagcugagcaacaucaaggagaacaagugcaacggcaccgacgccaaggugaagcugaucaagcaggagcuggacaaguacaagaacgccgugaccgagcugcagcugcugaugcagagcacccccgccaccaacaacagagccagaagagagcugcccagauucaugaacuacacccugaacaacgccaagaagaccaacgugacccugagcaagaagagaaagagaagauuccugggcuuccugcugggcgugggcagcgccaucgccagcggcguggccgugagcaaggugcugcaccuggagggcgaggugaacaagaucaagagcgcccugcugagcaccaacaaggccguggugagccugagcaacggcgugagcgugcugaccagcaaggugcuggaccugaagaacuacaucgacaagcagcugcugcccaucgugaacaagcagagcugcagcaucagcaacaucgagaccgugaucgaguuccagcagaagaacaacagacugcuggagaucaccagagaguucagcgugaacgccggcgugaccacccccgugagcaccuacaugcugaccaacagcgagcugcugagccugaucaacgacaugcccaucaccaacgaccagaagaagcugaugagcaacaacgugcagaucgugagacagcagagcuacagcaucaugagcaucaucaaggaggaggugcuggccuacguggugcagcugccccuguacggcgugaucgacacccccugcuggaagcugcacaccagcccccugugcaccaccaacaccaaggagggcagcaacaucugccugaccagaaccgacagaggcugguacugcgacaacgccggcagcgugagcuucuucccccaggccgagaccugcaaggugcagagcaacagaguguucugcgacaccaugaacagccugacccugcccagcgaggugaaccugugcaacguggacaucuucaaccccaaguacgacugcaagaucaugaccagcaagaccgacgugagcagcagcgugaucaccagccugggcgccaucgugagcugcuacggcaagaccaagugcaccgccagcaacaagaacagaggcaucaucaagaccuucagcaacggcugcgacuacgugagcaacaagggcguggacaccgugagcgugggcaacacccuguacuacgugaacaagcaggagggcaagagccuguacgugaagggcgagcccaucaucaacuucuacgacccccugguguuccccagcgacgaguucgacgccagcaucagccaggugaacgagaagaucaaccagagccuggccuucaucagaaagagcgacgagcugcugcacaacgugaacgccggcaagagcaccaccaacaucaugaucaccaccaucaucaucgugaucaucgugauccugcugagccugaucgccgugggccugcugcuguacugcaaggccagaugaggacuagucccuguucccagagcccacuuuuuuuucuuuuuuugaaauaaaauagccugucuuucagaucuaaaaaaaaaaaaaaaaaaaaaaaaaaaaaaaaaaaaaaaaaaaaaaaaaaaaaaaaaaaaaaaaugcaucccccccccccccccccccccccccccccccaaaggcucuuuucagagccaccagaauu

SEQ ID NO: 517 - RNA, 2035 nt, Artificial Sequence
  mRNA product Design a-3 comprising derived and/or modified sequence from HRSV(A2)__F-del (opt5)
gggagagggcgcuuggcuugcaaggacccugagcugcggcauugaagcacacccaacccaacucgacugaagucagccucacugaaccggaucugagaaucuucucucucugggcuugccagggcucuccgaaccuagcuagcauccucuucaauuccaacuagaaagcuuaccauggagcugcucauccugaaggccaacgcuauuaccacaauccuuacggccgugaccuucugcuuugcgagcggccagaauauuacagaagaguucuaccaauccaccuguucugcugucagcaaaggguaucuguccgcccucagaacaggaugguacaccucuguuaucacaauugaacugagcaacaucaaggagaauaaaugcaacggcaccgacgccaaggugaaacuuaucaagcaggaacuggauaaguauaaaaaugcugugacggagcuccagcugcugaugcaguccacccccgccacaaacaaucgggcucgcagagagcucccucgguuuaugaacuacacccugaauaacgccaagaaaacaaaugucacccuuucuaagaaacgcaagagacgguuccugggguuucuccugggagugggcagcgcgauugccuccgggguugcugugagcaagguccuucaccuggaaggagaggugaacaaaaucaagucugcccuccuguccacgaauaaagcuguugugagccugucuaacggcgucuccgugcucacaagcaaggugcuggaccuuaaaaauuauauugauaagcaacugcucccgaucgucaacaaacagucuuguuccauuagcaacaucgaaaccguuauugaguuccagcagaagaauaaccgccugcuugagaucacaagagaauuuuccgugaaugccggcgugaccacccccgucucuacauacaugcugacgaacagcgagcuccugucccugaucaaugacaugccuauuaccaacgaucaaaagaaacucaugagcaauaacgugcagaucguucggcagcagucuuauuccauuaugagcaucauuaaggaagaggugcuggcguacgucgugcaacuuccccuguacgggguuaucgacacaccuugcuggaaacuccauaccucuccccuguguacaaccaauacgaaggaaggaagcaacaucugccuuacacgcaccgauagaggcugguauugugacaaugccggguccgugucuuucuuuccucaggcugagaccugcaaaguccagagcaaccggguguucugugauacaaugaacucccugacccucccgagcgaggucaaucugugcaauguggacauuuuuaaccccaaguacgauuguaagaucaugacaucuaaaacggacguuuccagcucugugauuaccucccugggagccaucgucagcugcuauggcaagacaaaaugcaccgcuuccaacaagaaucgcgggauuaucaaaacauucucuaacggaugugauuacgugagcaauaagggcguugacaccguguccgucggcaacacgcucuauuacgugaauaagcaagaagggaaaucucuguaugugaagggagagccuaucauuaacuuuuacgacccccuuguuuucccuagcgaugaauuugacgccuccaucagccaggucaaugagaaaauuaaccagucucuggccuucaucagaaaguccgaugaacuccugcacaaugugaacgcuggcaaaagcaccacaaauauuaugaucaccacaauuaucaucgugauuaucgucauucugcuuucucucaucgcgguggggcugcugcucuacugcaaggcccggugaggacuagucccuguucccagagcccacuuuuuuuucuuuuuuugaaauaaaauagccugucuuucagaucuaaaaaaaaaaaaaaaaaaaaaaaaaaaaaaaaaaaaaaaaaaaaaaaaaaaaaaaaaaaaaaaaugcaucccccccccccccccccccccccccccccccaaaggcucuuuucagagccaccagaauu

SEQ ID NO: 518 - RNA, 2035 nt, Artificial Sequence
  mRNA product Design a-3 comprising derived and/or modified sequence from HRSV(A2)__F-del (opt6)
gggagagggcgcuuggcuugcaaggacccugagcugcggcauugaagcacacccaacccaacucgacugaagucagccucacugaaccggaucugagaaucuucucucucugggcuugccagggcucuccgaaccuagcuagcauccucuucaauuccaacuagaaagcuuaccauggaauuacuaauacucaaagccaacgcaauaacaacaauacuaacagcaguaacauucugcuucgcaucaggacaaaacaucacagaagaauuuuaccaaaguacaugcagugcagucucuaaaggauaccucagugccuuacgcacaggaugguacacaucaguaauaacaaucgaacuuucaaacauaaaagaaaacaaaugcaauggaaccgacgccaaaguaaaacuaaucaaacaagaacuagacaaauauaaaaaugcaguaacagaauuacaacuccuaaugcaauccacaccagcaacaaauaacagagcaagacgagaacucccucgauucaugaauuacacauuaaacaacgcaaaaaaaacuaacguaacuuuaucaaaaaaaagaaaacguagauuucuaggauuccuacuaggcguaggguccgccauugcaucaggaguagcaguuagcaaaguauuacauuuagaaggagaaguaaauaaaaucaaaagcgcacuacucucaaccaacaaagcaguaguaucacucucaaacggaguaucaguacuaacauccaaaguacucgaccucaaaaacuacauagacaaacaauuacuacccauaguaaacaaacaaucaugcucuauaucaaauaucgaaacaguaaucgaauuucaacaaaaaaacaaucgacuacuugaaauaacaagagaguucuccgucaaugccggagucaccacaccagucucaacauacaugcuaaccaacucugaacuccuaucacuaauaaaugacaugccaauaacaaacgaccaaaaaaaacuaaugucaaauaacguacaaauaguacgacaacaaaguuauuccauaaugaguauaaucaaagaagaaguguuagcauacguaguccaacuaccauuauauggaguaauagacacaccauguuggaaauuacacaccucaccacucugcacuaccaauacaaaagaaggcucaaauauaugccuaacucgcacagacagaggcugguacugcgauaacgcaggauccguaucuuucuuuccccaagcagaaacuugcaaaguacaaucaaacagagucuucugcgacaccaugaauagucucacauuaccaucugaaguaaaccuauguaacguagauauauucaauccaaaauacgacugcaaaauaaugacaucaaaaaccgacgucucuagcaguguaaucacaucacuaggagcaauaguaagcugcuauggaaaaacaaaauguacagcaucaaacaaaaacaggggaauaauaaaaaccuucucaaacggaugugacuacguaucaaauaaaggcguagacacaguaagcguaggaaacacccuauacuacguuaacaaacaagaagggaaaucauuauacguaaaaggagaaccaauaauaaacuucuacgauccacucguauucccauccgacgaauuugacgccagcauaucccaaguuaacgaaaaaauaaaccaaucacuugcauuuauacgaaaaucugaugaacuucuccacaacguaaaugcaggaaaauccaccaccaauauaaugaucacaacuaucaucauaguaauaaucgucauuuuacuaucauuaauagcaguuggccuacuucuauacugcaaagcaagauaaggacuagucccuguucccagagcccacuuuuuuuucuuuuuuugaaauaaaauagccugucuuucagaucuaaaaaaaaaaaaaaaaaaaaaaaaaaaaaaaaaaaaaaaaaaaaaaaaaaaaaaaaaaaaaaaaugcaucccccccccccccccccccccccccccccccaaaggcucuuuucagagccaccagaauu

SEQ ID NO: 519 - RNA, 2035 nt, Artificial Sequence
  mRNA product Design a-3 comprising derived and/or modified sequence from HRSV(A2)__F-del (opt11)
gggagagggcgcuuggcuugcaaggacccugagcugcggcauugaagcacacccaacccaacucgacugaagucagccucacugaaccggaucugagaaucuucucucucugggcuugccagggcucuccgaaccuagcuagcauccucuucaauuccaacuagaaagcuuaccauggaacuacuaauccuaaaagccaacgcgaucaccaccauccuaacggcagucaccuucugcuucgcaucaggccaaaacaucacagaagaguucuaccaaagcacaugcuccgccguauccaaaggcuaccucagcgcccuacgcacaggcugguacacaucugucaucaccauagaacucuccaacaucaaagaaaacaaaugcaacggcacugacgccaaaguaaagcugaucaaacaagaacucgacaaauacaaaaacgcagucaccgaacuccaacuacucaugcaauccaccccugcaaccaacaacagggcccgccgcgaacucccccgcuucaugaacuacacuuuaaacaacgccaaaaagaccaacgucacacucagcaagaaacggaaacgacgauuccuaggguuucuccuaggcgucggcucggcaaucgccuccggcgucgccguaagcaaaguacuacaccuagaaggcgaagugaacaaaaucaaaagugcccuucucuccaccaacaaggccguagucucucuauccaacggagucucaguccucaccucaaagguccucgaccucaaaaacuacaucgacaaacaacuacuccccauugucaacaagcagucaugcuccauaucaaacaucgaaaccgucaucgaguuccaacagaaaaacaaccgacuccucgaaauaaccagagaguucucggucaacgccggcgucaccaccccagucagcaccuacaugcucacuaacuccgaacuccuaucccucaucaacgacaugccaauuaccaacgaccaaaagaaacuaaugucgaacaacguucaaaucguccgacaacaaaguuacuccaucaugagcauaaucaaagaagaaguucuagcguacgucguccaacucccacuauacggcgucaucgacacuccgugcuggaaacuccacacaucaccccuauguacaaccaacacaaaagaaggcagcaacaucugccucacccgcaccgaccgagggugguauugcgauaacgcuggcagcgucuccuucuucccccaagccgaaaccugcaaaguccaaucaaacagaguauucugcgacaccaugaacucccuuacucucccuagcgaagucaaccucugcaacguugacauauucaaccccaaauacgacugcaaaaucaugaccuccaagaccgacgucuccuccuccgucaucacaucucuaggugccauugucuccugcuacggaaaaaccaaaugcacagccuccaacaaaaaccgcggcaucauaaaaaccuucuccaacggcugcgacuacgucaguaauaaaggcgucgacacgguauccguugggaauacgcuuuacuacguaaauaaacaagaaggcaaaucccucuacgucaaaggugaacccaucauaaacuucuacgacccgcuuguguucccauccgacgaguucgacgccagcaucagccaggucaacgaaaagaucaaccaaucccuagccuucauccgcaaaagcgacgaacuacuacacaacgucaacgccggaaaauccacaaccaacaucaugaucaccaccaucaucaucgucaucaucguaauccuacucucucucaucgccgucggccuccuacuguacuguaaagcccgauagggacuagucccuguucccagagcccacuuuuuuuucuuuuuuugaaauaaaauagccugucuuucagaucuaaaaaaaaaaaaaaaaaaaaaaaaaaaaaaaaaaaaaaaaaaaaaaaaaaaaaaaaaaaaaaaaugcaucccccccccccccccccccccccccccccccaaaggcucuuuucagagccaccagaauu

SEQ ID NO: 520 - RNA, 1984 nt, Artificial Sequence
  mRNA product Design a-4 comprising derived and/or modified sequence from HRSV(A2)__F-del (artificial)
gggagacuccugucgggcggaaguaggaggaguagaguuuaaaaacaguacucuuuuuccgguucgggacguaguugaagcaacgacaagccggauaaccgcucuugagacaggaagcuuaccauggaguugcuaauccucaaagcaaaugcaauuaccacaauccucacugcagucacauuuuguuuugcuucuggucaaaacaucacugaagaauuuuaucaaucaacaugcagugcaguuagcaaaggcuaucuuagugcucugagaacugguugguauaccaguguuauaacuauagaauuaaguaauaucaaggaaaauaaguguaauggaacagaugcuaagguaaaauugauaaaacaagaauuagauaaauauaaaaaugcuguaacagaauugcaguugcucaugcaaagcacaccagcaacaaacaaucgagccagaagagaacuaccaagguuuaugaauuauacacucaacaaugccaaaaaaaccaauguaacauuaagcaagaaaaggaaaagaagauuucuugguuuuuuguuagguguuggaucugcaaucgccaguggcguugcuguaucuaagguccugcaccuagaaggggaagugaacaagaucaaaagugcucuacuauccacaaacaaggcuguagucagcuuaucaaauggaguuagugucuuaaccagcaaaguguuagaccucaaaaacuauauagauaaacaauuguuaccuauugugaacaagcaaagcugcagcauaucaaauauagaaacugugauagaguuccaacaaaagaacaacagacuacuagagauuaccagggaauuuaguguuaaugcagguguaacuacaccuguaagcacuuacauguuaacuaauagugaauuauugucauuaaucaaugauaugccuauaacaaaugaucagaaaaaguuaauguccaacaauguucaaauaguuagacagcaaaguuacucuaucauguccauaauaaaagaggaagucuuagcauauguaguacaauuaccacuauaugguguuauagauacacccuguuggaaacuacacacauccccucuauguacaaccaacacaaaagaaggguccaacaucuguuuaacaagaacugacagaggaugguacugugacaaugcaggaucaguaucuuucuucccacaagcugaaacauguaaaguucaaucaaaucgaguauuuugugacacaaugaacaguuuaacauuaccaagugaaguaaaucucugcaauguugacauauucaaccccaaauaugauuguaaaauuaugacuucaaaaacagauguaagcagcuccguuaucacaucucuaggagccauugugucaugcuauggcaaaacuaaauguacagcauccaauaaaaaucguggaaucauaaagacauuuucuaacgggugcgauuauguaucaaauaaagggguggacacugugucuguagguaacacauuauauuauguaaauaagcaagaagguaaaagucucuauguaaaaggugaaccaauaauaaauuucuaugacccauuaguauuccccucugaugaauuugaugcaucaauaucucaagucaacgagaagauuaaccagagccuagcauuuauucguaaauccgaugaauuauuacauaauguaaaugcugguaaauccaccacaaauaucaugauaacuacuauaauuauagugauuauaguaauauuguuaucauuaauugcuguuggacugcucuuauacuguaaggccagauaaggacuagucccuguucccagagcccacuuuuuuuucuuuuuuugaaauaaaauagccugucuuucagaucuaaaaaaaaaaaaaaaaaaaaaaaaaaaaaaaaaaaaaaaaaaaaaaaaaaaaaaaaaaaaaaaaugcaucccccccccccccccccccccccccccccccaaaggcucuuuucagagccaccagaauu

SEQ ID NO: 521 - RNA, 1984 nt, Artificial Sequence
  mRNA product Design a-4 comprising derived and/or modified sequence from HRSV(A2)__F-del (opt1)
gggagacuccugucgggcggaaguaggaggaguagaguuuaaaaacaguacucuuuuuccgguucgggacguaguugaagcaacgacaagccggauaaccgcucuugagacaggaagcuuaccauggagcugcucauccugaaggccaacgccaucaccaccauccugacggcggugaccuucugcuucgccagcggccagaacaucaccgaggaguucuaccaguccaccugcagcgccgucuccaagggguaccucagcgcccugcggacgggcugguacaccuccgugaucaccaucgagcugagcaacaucaaggagaacaagugcaacgggaccgacgccaaggugaagcucaucaagcaggagcuggacaaguacaagaacgcggucacggagcugcagcuccugaugcaguccaccccggcaaccaacaaccgcgcccggcgcgagcugccccgguucaugaacuacacccucaacaacgccaagaagacgaacgugacccugagcaagaagcgcaagcggcgcuuccugggcuuccuccugggggugggcuccgccaucgcgagcggcgucgccguguccaaggugcugcaccucgagggggaggucaacaagaucaagagcgcccugcuguccaccaacaaggccguggugagccucuccaacggcgucagcgugcugaccuccaaggugcuggaccucaagaacuacaucgacaagcagcugcugcccaucgucaacaagcagagcugcuccaucagcaacaucgagacggugaucgaguuccagcagaagaacaaccggcuccuggagaucacccgcgaguucagcgugaacgccggggucaccacccccguguccacguacaugcugaccaacagcgagcuccugucccugaucaacgacaugccgaucaccaacgaccagaagaagcucaugagcaacaacgugcagaucguccggcagcaguccuacagcaucauguccaucaucaaggaggaggugcuggcguacgugguccagcugccccucuacggcgugaucgacacccccugcuggaagcugcacacgagcccccugugcaccaccaacaccaaggagggguccaacaucugccucacgcgcaccgaccggggcugguacugcgacaacgccggcagcgucuccuucuucccgcaggccgagaccugcaaggugcagagcaaccgcguguucugcgacaccaugaacucccugacgcugcccagcgagguaaaccucugcaacgucgacaucuucaaccccaaguacgacugcaagaucaugaccuccaagaccgacgugagcuccagcgugaucaccucccugggggccaucgucagcugcuacggcaagacgaagugcaccgccagcaacaagaaccgggggaucaucaagaccuucuccaacggcugcgacuacgugagcaacaagggcguggacaccguguccgucgggaacacccuguacuacgugaacaagcaggagggcaagagccucuacgugaagggggagcccaucaucaacuucuacgacccgcuggucuuccccuccgacgaguucgacgcgagcaucucccaggugaacgagaagaucaaccagagccuggccuucauccgcaaguccgacgagcugcuccacaacgugaacgccggcaagagcacgaccaacaucaugaucaccaccaucaucaucgucaucaucgugauccugcugucccucaucgccguggggcugcugcucuacugcaaggcccggugaggacuagucccuguucccagagcccacuuuuuuuucuuuuuuugaaauaaaauagccugucuuucagaucuaaaaaaaaaaaaaaaaaaaaaaaaaaaaaaaaaaaaaaaaaaaaaaaaaaaaaaaaaaaaaaaaugcaucccccccccccccccccccccccccccccccaaaggcucuuuucagagccaccagaauu

SEQ ID NO: 522 - RNA, 1984 nt, Artificial Sequence
  mRNA product Design a-4 comprising derived and/or modified sequence from HRSV(A2)__F-del (opt1)
gggagacuccugucgggcggaaguaggaggaguagaguuuaaaaacaguacucuuuuuccgguucgggacguaguugaagcaacgacaagccggauaaccgcucuugagacaggaagcuuaccauggagcugcucauccugaaggccaacgccaucaccaccauccugacggcggugaccuucugcuucgccagcggccagaacaucaccgaggaguucuaccaguccacgugcagcgccgucuccaagggguaccucagcgcccugcgcaccggcugguacaccuccgugaucaccaucgagcugagcaacaucaaggagaacaagugcaacgggaccgacgccaaggugaagcucaucaagcaggagcuggacaaguacaagaacgcggucacggagcugcagcuccugaugcaguccacccccgccaccaacaaccgggcccgccgggagcugccgcgcuucaugaacuacacccucaacaacgccaagaagacgaacgugacccugagcaagaagcggaagcgccgguuccugggcuuccuccugggggugggcuccgcgaucgccagcggcgucgccguguccaaggugcugcaccucgagggggaggucaacaagaucaagagcgcccugcuguccaccaacaaggccguggugagccucuccaacggcgucagcgugcugaccuccaaggugcuggaccucaagaacuacaucgacaagcagcugcugcccaucgucaacaagcagagcugcuccaucagcaacaucgagacggugaucgaguuccagcagaagaacaaccgccuccuggagaucacccgggaguucagcgugaacgcgggggucaccacccccguguccacguacaugcugaccaacagcgagcuccugucccugaucaacgacaugcccaucaccaacgaccagaagaagcucaugagcaacaacgugcagaucguccgccagcaguccuacagcaucauguccaucaucaaggaggaggugcuggccuacgugguccagcugccgcucuacggcgugaucgacacccccugcuggaagcugcacacgagcccccugugcaccaccaacaccaaggagggguccaacaucugccucacgcggaccgaccgcggcugguacugcgacaacgccggcagcgucuccuucuucccccaggccgagaccugcaaggugcagagcaaccggguguucugcgacaccaugaacucccugacgcugccgagcgaggucaaccucugcaacguggacaucuucaaccccaaguacgacugcaagaucaugaccuccaagaccgacgugagcuccagcgucaucaccucccugggggccaucgugagcugcuacggcaagacgaagugcaccgcgagcaacaagaaccgcgggaucaucaagaccuucuccaacggcugcgacuacgugagcaacaagggcgucgacaccguguccguggggaacacccuguacuacgucaacaagcaggagggcaagagccucuacgugaagggggagcccaucaucaacuucuacgacccccugguguucccguccgacgaguucgacgccagcaucucccaggucaacgagaagaucaaccagagccuggccuucauccggaaguccgacgagcuccugcacaacgugaacgccggcaagagcacgaccaacaucaugaucaccaccaucaucaucgugaucaucgucauccugcugucccucaucgccguggggcugcugcucuacugcaaggcgcgcugaggacuagucccuguucccagagcccacuuuuuuuucuuuuuuugaaauaaaauagccugucuuucagaucuaaaaaaaaaaaaaaaaaaaaaaaaaaaaaaaaaaaaaaaaaaaaaaaaaaaaaaaaaaaaaaaaugcaucccccccccccccccccccccccccccccccaaaggcucuuuucagagccaccagaauu

SEQ ID NO: 523 - RNA, 1984 nt, Artificial Sequence
  mRNA product Design a-4 comprising derived and/or modified sequence from HRSV(A2)__F-del (opt2)
gggagacuccugucgggcggaaguaggaggaguagaguuuaaaaacaguacucuuuuuccgguucgggacguaguugaagcaacgacaagccggauaaccgcucuugagacaggaagcuuaccauggagcuccucauccucaaggccaacgccaucaccaccauccucaccgccgucaccuucugcuucgccuccggccagaacaucaccgaggaguucuaccaguccaccugcuccgccgucuccaagggcuaccucuccgcccuccgcaccggcugguacaccuccgucaucaccaucgagcucuccaacaucaaggagaacaagugcaacggcaccgacgccaaggucaagcucaucaagcaggagcucgacaaguacaagaacgccgucaccgagcuccagcuccucaugcaguccacccccgccaccaacaaccgcgcccgccgcgagcucccccgcuucaugaacuacacccucaacaacgccaagaagaccaacgucacccucuccaagaagcgcaagcgccgcuuccucggcuuccuccucggcgucggcuccgccaucgccuccggcgucgccgucuccaagguccuccaccucgagggcgaggucaacaagaucaaguccgcccuccucuccaccaacaaggccgucgucucccucuccaacggcgucuccguccucaccuccaagguccucgaccucaagaacuacaucgacaagcagcuccuccccaucgucaacaagcaguccugcuccaucuccaacaucgagaccgucaucgaguuccagcagaagaacaaccgccuccucgagaucacccgcgaguucuccgucaacgccggcgucaccacccccgucuccaccuacaugcucaccaacuccgagcuccucucccucaucaacgacaugcccaucaccaacgaccagaagaagcucauguccaacaacguccagaucguccgccagcaguccuacuccaucauguccaucaucaaggaggagguccucgccuacgucguccagcucccccucuacggcgucaucgacacccccugcuggaagcuccacaccuccccccucugcaccaccaacaccaaggagggcuccaacaucugccucacccgcaccgaccgcggcugguacugcgacaacgccggcuccgucuccuucuucccccaggccgagaccugcaagguccaguccaaccgcgucuucugcgacaccaugaacucccucacccuccccuccgaggucaaccucugcaacgucgacaucuucaaccccaaguacgacugcaagaucaugaccuccaagaccgacgucuccuccuccgucaucaccucccucggcgccaucgucuccugcuacggcaagaccaagugcaccgccuccaacaagaaccgcggcaucaucaagaccuucuccaacggcugcgacuacgucuccaacaagggcgucgacaccgucuccgucggcaacacccucuacuacgucaacaagcaggagggcaagucccucuacgucaagggcgagcccaucaucaacuucuacgacccccucgucuuccccuccgacgaguucgacgccuccaucucccaggucaacgagaagaucaaccagucccucgccuucauccgcaaguccgacgagcuccuccacaacgucaacgccggcaaguccaccaccaacaucaugaucaccaccaucaucaucgucaucaucgucauccuccucucccucaucgccgucggccuccuccucuacugcaaggcccgcugaggacuagucccuguucccagagcccacuuuuuuuucuuuuuuugaaauaaaauagccugucuuucagaucuaaaaaaaaaaaaaaaaaaaaaaaaaaaaaaaaaaaaaaaaaaaaaaaaaaaaaaaaaaaaaaaaugcaucccccccccccccccccccccccccccccccaaaggcucuuuucagagccaccagaauu

SEQ ID NO: 524 - RNA, 1984 nt, Artificial Sequence
  mRNA product Design a-4 comprising derived and/or modified sequence from HRSV(A2)__F-del (opt3)
gggagacuccugucgggcggaaguaggaggaguagaguuuaaaaacaguacucuuuuuccgguucgggacguaguugaagcaacgacaagccggauaaccgcucuugagacaggaagcuuaccauggagcugcucauccuuaaggccaacgcuauuaccacaauacugacugcagugacguucugcuuugccagcggccagaauaucaccgaagaguucuaccaauccacauguucugcggucucaaaaggguauuugagugcuuuaagaacuggaugguacaccagcguuauuacaaucgaacuguccaacauuaaggagaauaaaugcaacgguaccgacgccaaggugaaacuaaucaagcaggaacucgauaaguauaaaaaugcaguaacugagcugcagcuucugaugcagucuacacccgccaccaacaauagggcucggcgcgaguugccucgauuuaugaacuacacgcucaauaacgcaaagaaaacuaaugugacccugucgaagaaacguaagagaagguuccugggcuuucucuuaggggucggaucagccauagcuagcggcguggccguuaguaaggugcugcaccuugaaggugaggucaacaaaaucaaguccgcguugcugucuacaaauaaagcagugguaagccuauccaacgggguuucagugcucacuucuaagguccuggaccuuaaaaauuauauugauaagcaacuguugccaaucgugaacaaacagagcuguucuauuuccaacaucgaaaccgugauagaguuccagcagaagaauaaccggcuccuggagauuacacgcgaauuuucagucaaugccggaguuaccacgccggugagcacuuacauguuaacaaacagugagcugcucucucuuaucaaugacaugcccauuaccaacgaucaaaagaaacugauguccaauaacguacagaucgugagacagcagagcuauucgaucaugucuauuauaaaggaagaggucuuggcuuacgugguucaacuaccucuguacggcgugaucgacacuccaugcuggaaacuccauacauccccacuguguaccacgaauaccaaggaaggcucaaacauuugccuuacaaggacugaucgggggugguauugugacaaugccggaagugucagcuucuuuccucaggcagagaccugcaaagugcaguccaaccgcguauucugugauacaaugaauagucugacuuugccaagcgagguuaaccucugcaauguggacaucuuuaaccccaaguacgauuguaagauaaugaccucaaaaacagacgucaguuccagcgugauuaccucucugggugcuaucgucucaugcuauggcaagacuaaaugcacggccaguaacaagaaucgagggaucauuaaaacauucagcaacggaugugauuacguguccaauaagggcguugacaccgugucuguagguaacacuuuauauuacgucaauaagcaagaagggaaaucgcuguaugugaagggagagccuaucauuaacuuuuacgacccccuaguuuucccgagcgaugaauuugacgcguccauaucacaggugaaugagaaaaucaaccagagucucgccuucauuagaaagucugaugaacugcuucacaaugucaacgcaggcaaaagcaccacaaauaucaugaucaccacuauuauaaucgugauuaucguaauuuugcugucccucaucgcugugggccugcuucuguacugcaaggccaggugaggacuagucccuguucccagagcccacuuuuuuuucuuuuuuugaaauaaaauagccugucuuucagaucuaaaaaaaaaaaaaaaaaaaaaaaaaaaaaaaaaaaaaaaaaaaaaaaaaaaaaaaaaaaaaaaaugcaucccccccccccccccccccccccccccccccaaaggcucuuuucagagccaccagaauu

SEQ ID NO: 525 - RNA, 1984 nt, Artificial Sequence
  mRNA product Design a-4 comprising derived and/or modified sequence from HRSV(A2)__F-del (opt4)
gggagacuccugucgggcggaaguaggaggaguagaguuuaaaaacaguacucuuuuuccgguucgggacguaguugaagcaacgacaagccggauaaccgcucuugagacaggaagcuuaccauggagcugcugauccugaaggccaacgccaucaccaccauccugaccgccgugaccuucugcuucgccagcggccagaacaucaccgaggaguucuaccagagcaccugcagcgccgugagcaagggcuaccugagcgcccugagaaccggcugguacaccagcgugaucaccaucgagcugagcaacaucaaggagaacaagugcaacggcaccgacgccaaggugaagcugaucaagcaggagcuggacaaguacaagaacgccgugaccgagcugcagcugcugaugcagagcacccccgccaccaacaacagagccagaagagagcugcccagauucaugaacuacacccugaacaacgccaagaagaccaacgugacccugagcaagaagagaaagagaagauuccugggcuuccugcugggcgugggcagcgccaucgccagcggcguggccgugagcaaggugcugcaccuggagggcgaggugaacaagaucaagagcgcccugcugagcaccaacaaggccguggugagccugagcaacggcgugagcgugcugaccagcaaggugcuggaccugaagaacuacaucgacaagcagcugcugcccaucgugaacaagcagagcugcagcaucagcaacaucgagaccgugaucgaguuccagcagaagaacaacagacugcuggagaucaccagagaguucagcgugaacgccggcgugaccacccccgugagcaccuacaugcugaccaacagcgagcugcugagccugaucaacgacaugcccaucaccaacgaccagaagaagcugaugagcaacaacgugcagaucgugagacagcagagcuacagcaucaugagcaucaucaaggaggaggugcuggccuacguggugcagcugccccuguacggcgugaucgacacccccugcuggaagcugcacaccagcccccugugcaccaccaacaccaaggagggcagcaacaucugccugaccagaaccgacagaggcugguacugcgacaacgccggcagcgugagcuucuucccccaggccgagaccugcaaggugcagagcaacagaguguucugcgacaccaugaacagccugacccugcccagcgaggugaaccugugcaacguggacaucuucaaccccaaguacgacugcaagaucaugaccagcaagaccgacgugagcagcagcgugaucaccagccugggcgccaucgugagcugcuacggcaagaccaagugcaccgccagcaacaagaacagaggcaucaucaagaccuucagcaacggcugcgacuacgugagcaacaagggcguggacaccgugagcgugggcaacacccuguacuacgugaacaagcaggagggcaagagccuguacgugaagggcgagcccaucaucaacuucuacgacccccugguguuccccagcgacgaguucgacgccagcaucagccaggugaacgagaagaucaaccagagccuggccuucaucagaaagagcgacgagcugcugcacaacgugaacgccggcaagagcaccaccaacaucaugaucaccaccaucaucaucgugaucaucgugauccugcugagccugaucgccgugggccugcugcuguacugcaaggccagaugaggacuagucccuguucccagagcccacuuuuuuuucuuuuuuugaaauaaaauagccugucuuucagaucuaaaaaaaaaaaaaaaaaaaaaaaaaaaaaaaaaaaaaaaaaaaaaaaaaaaaaaaaaaaaaaaaugcaucccccccccccccccccccccccccccccccaaaggcucuuuucagagccaccagaauu

SEQ ID NO: 526 - RNA, 1984 nt, Artificial Sequence
  mRNA product Design a-4 comprising derived and/or modified sequence from HRSV(A2)__F-del (opt5)
gggagacuccugucgggcggaaguaggaggaguagaguuuaaaaacaguacucuuuuuccgguucgggacguaguugaagcaacgacaagccggauaaccgcucuugagacaggaagcuuaccauggagcugcucauccugaaggccaacgcuauuaccacaauccuuacggccgugaccuucugcuuugcgagcggccagaauauuacagaagaguucuaccaauccaccuguucugcugucagcaaaggguaucuguccgcccucagaacaggaugguacaccucuguuaucacaauugaacugagcaacaucaaggagaauaaaugcaacggcaccgacgccaaggugaaacuuaucaagcaggaacuggauaaguauaaaaaugcugugacggagcuccagcugcugaugcaguccacccccgccacaaacaaucgggcucgcagagagcucccucgguuuaugaacuacacccugaauaacgccaagaaaacaaaugucacccuuucuaagaaacgcaagagacgguuccugggguuucuccugggagugggcagcgcgauugccuccgggguugcugugagcaagguccuucaccuggaaggagaggugaacaaaaucaagucugcccuccuguccacgaauaaagcuguugugagccugucuaacggcgucuccgugcucacaagcaaggugcuggaccuuaaaaauuauauugauaagcaacugcucccgaucgucaacaaacagucuuguuccauuagcaacaucgaaaccguuauugaguuccagcagaagaauaaccgccugcuugagaucacaagagaauuuuccgugaaugccggcgugaccacccccgucucuacauacaugcugacgaacagcgagcuccugucccugaucaaugacaugccuauuaccaacgaucaaaagaaacucaugagcaauaacgugcagaucguucggcagcagucuuauuccauuaugagcaucauuaaggaagaggugcuggcguacgucgugcaacuuccccuguacgggguuaucgacacaccuugcuggaaacuccauaccucuccccuguguacaaccaauacgaaggaaggaagcaacaucugccuuacacgcaccgauagaggcugguauugugacaaugccggguccgugucuuucuuuccucaggcugagaccugcaaaguccagagcaaccggguguucugugauacaaugaacucccugacccucccgagcgaggucaaucugugcaauguggacauuuuuaaccccaaguacgauuguaagaucaugacaucuaaaacggacguuuccagcucugugauuaccucccugggagccaucgucagcugcuauggcaagacaaaaugcaccgcuuccaacaagaaucgcgggauuaucaaaacauucucuaacggaugugauuacgugagcaauaagggcguugacaccguguccgucggcaacacgcucuauuacgugaauaagcaagaagggaaaucucuguaugugaagggagagccuaucauuaacuuuuacgacccccuuguuuucccuagcgaugaauuugacgccuccaucagccaggucaaugagaaaauuaaccagucucuggccuucaucagaaaguccgaugaacuccugcacaaugugaacgcuggcaaaagcaccacaaauauuaugaucaccacaauuaucaucgugauuaucgucauucugcuuucucucaucgcgguggggcugcugcucuacugcaaggcccggugaggacuagucccuguucccagagcccacuuuuuuuucuuuuuuugaaauaaaauagccugucuuucagaucuaaaaaaaaaaaaaaaaaaaaaaaaaaaaaaaaaaaaaaaaaaaaaaaaaaaaaaaaaaaaaaaaugcaucccccccccccccccccccccccccccccccaaaggcucuuuucagagccaccagaauu

SEQ ID NO: 527 - RNA, 1984 nt, Artificial Sequence
  mRNA product Design a-4 comprising derived and/or modified sequence from HRSV(A2)__F-del (opt6)
gggagacuccugucgggcggaaguaggaggaguagaguuuaaaaacaguacucuuuuuccgguucgggacguaguugaagcaacgacaagccggauaaccgcucuugagacaggaagcuuaccauggaauuacuaauacucaaagccaacgcaauaacaacaauacuaacagcaguaacauucugcuucgcaucaggacaaaacaucacagaagaauuuuaccaaaguacaugcagugcagucucuaaaggauaccucagugccuuacgcacaggaugguacacaucaguaauaacaaucgaacuuucaaacauaaaagaaaacaaaugcaauggaaccgacgccaaaguaaaacuaaucaaacaagaacuagacaaauauaaaaaugcaguaacagaauuacaacuccuaaugcaauccacaccagcaacaaauaacagagcaagacgagaacucccucgauucaugaauuacacauuaaacaacgcaaaaaaaacuaacguaacuuuaucaaaaaaaagaaaacguagauuucuaggauuccuacuaggcguaggguccgccauugcaucaggaguagcaguuagcaaaguauuacauuuagaaggagaaguaaauaaaaucaaaagcgcacuacucucaaccaacaaagcaguaguaucacucucaaacggaguaucaguacuaacauccaaaguacucgaccucaaaaacuacauagacaaacaauuacuacccauaguaaacaaacaaucaugcucuauaucaaauaucgaaacaguaaucgaauuucaacaaaaaaacaaucgacuacuugaaauaacaagagaguucuccgucaaugccggagucaccacaccagucucaacauacaugcuaaccaacucugaacuccuaucacuaauaaaugacaugccaauaacaaacgaccaaaaaaaacuaaugucaaauaacguacaaauaguacgacaacaaaguuauuccauaaugaguauaaucaaagaagaaguguuagcauacguaguccaacuaccauuauauggaguaauagacacaccauguuggaaauuacacaccucaccacucugcacuaccaauacaaaagaaggcucaaauauaugccuaacucgcacagacagaggcugguacugcgauaacgcaggauccguaucuuucuuuccccaagcagaaacuugcaaaguacaaucaaacagagucuucugcgacaccaugaauagucucacauuaccaucugaaguaaaccuauguaacguagauauauucaauccaaaauacgacugcaaaauaaugacaucaaaaaccgacgucucuagcaguguaaucacaucacuaggagcaauaguaagcugcuauggaaaaacaaaauguacagcaucaaacaaaaacaggggaauaauaaaaaccuucucaaacggaugugacuacguaucaaauaaaggcguagacacaguaagcguaggaaacacccuauacuacguuaacaaacaagaagggaaaucauuauacguaaaaggagaaccaauaauaaacuucuacgauccacucguauucccauccgacgaauuugacgccagcauaucccaaguuaacgaaaaaauaaaccaaucacuugcauuuauacgaaaaucugaugaacuucuccacaacguaaaugcaggaaaauccaccaccaauauaaugaucacaacuaucaucauaguaauaaucgucauuuuacuaucauuaauagcaguuggccuacuucuauacugcaaagcaagauaaggacuagucccuguucccagagcccacuuuuuuuucuuuuuuugaaauaaaauagccugucuuucagaucuaaaaaaaaaaaaaaaaaaaaaaaaaaaaaaaaaaaaaaaaaaaaaaaaaaaaaaaaaaaaaaaaugcaucccccccccccccccccccccccccccccccaaaggcucuuuucagagccaccagaauu

SEQ ID NO: 528 - RNA, 1984 nt, Artificial Sequence
  mRNA product Design a-4 comprising derived and/or modified sequence from HRSV(A2)__F-del (opt11)
gggagacuccugucgggcggaaguaggaggaguagaguuuaaaaacaguacucuuuuuccgguucgggacguaguugaagcaacgacaagccggauaaccgcucuugagacaggaagcuuaccauggaacuacuaauccuaaaagccaacgcgaucaccaccauccuaacggcagucaccuucugcuucgcaucaggccaaaacaucacagaagaguucuaccaaagcacaugcuccgccguauccaaaggcuaccucagcgcccuacgcacaggcugguacacaucugucaucaccauagaacucuccaacaucaaagaaaacaaaugcaacggcacugacgccaaaguaaagcugaucaaacaagaacucgacaaauacaaaaacgcagucaccgaacuccaacuacucaugcaauccaccccugcaaccaacaacagggcccgccgcgaacucccccgcuucaugaacuacacuuuaaacaacgccaaaaagaccaacgucacacucagcaagaaacggaaacgacgauuccuaggguuucuccuaggcgucggcucggcaaucgccuccggcgucgccguaagcaaaguacuacaccuagaaggcgaagugaacaaaaucaaaagugcccuucucuccaccaacaaggccguagucucucuauccaacggagucucaguccucaccucaaagguccucgaccucaaaaacuacaucgacaaacaacuacuccccauugucaacaagcagucaugcuccauaucaaacaucgaaaccgucaucgaguuccaacagaaaaacaaccgacuccucgaaauaaccagagaguucucggucaacgccggcgucaccaccccagucagcaccuacaugcucacuaacuccgaacuccuaucccucaucaacgacaugccaauuaccaacgaccaaaagaaacuaaugucgaacaacguucaaaucguccgacaacaaaguuacuccaucaugagcauaaucaaagaagaaguucuagcguacgucguccaacucccacuauacggcgucaucgacacuccgugcuggaaacuccacacaucaccccuauguacaaccaacacaaaagaaggcagcaacaucugccucacccgcaccgaccgagggugguauugcgauaacgcuggcagcgucuccuucuucccccaagccgaaaccugcaaaguccaaucaaacagaguauucugcgacaccaugaacucccuuacucucccuagcgaagucaaccucugcaacguugacauauucaaccccaaauacgacugcaaaaucaugaccuccaagaccgacgucuccuccuccgucaucacaucucuaggugccauugucuccugcuacggaaaaaccaaaugcacagccuccaacaaaaaccgcggcaucauaaaaaccuucuccaacggcugcgacuacgucaguaauaaaggcgucgacacgguauccguugggaauacgcuuuacuacguaaauaaacaagaaggcaaaucccucuacgucaaaggugaacccaucauaaacuucuacgacccgcuuguguucccauccgacgaguucgacgccagcaucagccaggucaacgaaaagaucaaccaaucccuagccuucauccgcaaaagcgacgaacuacuacacaacgucaacgccggaaaauccacaaccaacaucaugaucaccaccaucaucaucgucaucaucguaauccuacucucucucaucgccgucggccuccuacuguacuguaaagcccgauagggacuagucccuguucccagagcccacuuuuuuuucuuuuuuugaaauaaaauagccugucuuucagaucuaaaaaaaaaaaaaaaaaaaaaaaaaaaaaaaaaaaaaaaaaaaaaaaaaaaaaaaaaaaaaaaaugcaucccccccccccccccccccccccccccccccaaaggcucuuuucagagccaccagaauu

SEQ ID NO: 529 - RNA, 1930 nt, Artificial Sequence
  mRNA product Design a-5 comprising derived and/or modified sequence from HRSV(A2)__F-del (artificial)
gggagacuuucccauucuguagcagaauuugguguugccuguggucuuggucccgcggagaagcuuaccauggaguugcuaauccucaaagcaaaugcaauuaccacaauccucacugcagucacauuuuguuuugcuucuggucaaaacaucacugaagaauuuuaucaaucaacaugcagugcaguuagcaaaggcuaucuuagugcucugagaacugguugguauaccaguguuauaacuauagaauuaaguaauaucaaggaaaauaaguguaauggaacagaugcuaagguaaaauugauaaaacaagaauuagauaaauauaaaaaugcuguaacagaauugcaguugcucaugcaaagcacaccagcaacaaacaaucgagccagaagagaacuaccaagguuuaugaauuauacacucaacaaugccaaaaaaaccaauguaacauuaagcaagaaaaggaaaagaagauuucuugguuuuuuguuagguguuggaucugcaaucgccaguggcguugcuguaucuaagguccugcaccuagaaggggaagugaacaagaucaaaagugcucuacuauccacaaacaaggcuguagucagcuuaucaaauggaguuagugucuuaaccagcaaaguguuagaccucaaaaacuauauagauaaacaauuguuaccuauugugaacaagcaaagcugcagcauaucaaauauagaaacugugauagaguuccaacaaaagaacaacagacuacuagagauuaccagggaauuuaguguuaaugcagguguaacuacaccuguaagcacuuacauguuaacuaauagugaauuauugucauuaaucaaugauaugccuauaacaaaugaucagaaaaaguuaauguccaacaauguucaaauaguuagacagcaaaguuacucuaucauguccauaauaaaagaggaagucuuagcauauguaguacaauuaccacuauaugguguuauagauacacccuguuggaaacuacacacauccccucuauguacaaccaacacaaaagaaggguccaacaucuguuuaacaagaacugacagaggaugguacugugacaaugcaggaucaguaucuuucuucccacaagcugaaacauguaaaguucaaucaaaucgaguauuuugugacacaaugaacaguuuaacauuaccaagugaaguaaaucucugcaauguugacauauucaaccccaaauaugauuguaaaauuaugacuucaaaaacagauguaagcagcuccguuaucacaucucuaggagccauugugucaugcuauggcaaaacuaaauguacagcauccaauaaaaaucguggaaucauaaagacauuuucuaacgggugcgauuauguaucaaauaaagggguggacacugugucuguagguaacacauuauauuauguaaauaagcaagaagguaaaagucucuauguaaaaggugaaccaauaauaaauuucuaugacccauuaguauuccccucugaugaauuugaugcaucaauaucucaagucaacgagaagauuaaccagagccuagcauuuauucguaaauccgaugaauuauuacauaauguaaaugcugguaaauccaccacaaauaucaugauaacuacuauaauuauagugauuauaguaauauuguuaucauuaauugcuguuggacugcucuuauacuguaaggccagauaaggacuagucccuguucccagagcccacuuuuuuuucuuuuuuugaaauaaaauagccugucuuucagaucuaaaaaaaaaaaaaaaaaaaaaaaaaaaaaaaaaaaaaaaaaaaaaaaaaaaaaaaaaaaaaaaaugcaucccccccccccccccccccccccccccccccaaaggcucuuuucagagccaccagaauu

SEQ ID NO: 530 - RNA, 1930 nt, Artificial Sequence
  mRNA product Design a-5 comprising derived and/or modified sequence from HRSV(A2)__F-del (opt1)
gggagacuuucccauucuguagcagaauuugguguugccuguggucuuggucccgcggagaagcuuaccauggagcugcucauccugaaggccaacgccaucaccaccauccugacggcggugaccuucugcuucgccagcggccagaacaucaccgaggaguucuaccaguccaccugcagcgccgucuccaagggguaccucagcgcccugcggacgggcugguacaccuccgugaucaccaucgagcugagcaacaucaaggagaacaagugcaacgggaccgacgccaaggugaagcucaucaagcaggagcuggacaaguacaagaacgcggucacggagcugcagcuccugaugcaguccaccccggcaaccaacaaccgcgcccggcgcgagcugccccgguucaugaacuacacccucaacaacgccaagaagacgaacgugacccugagcaagaagcgcaagcggcgcuuccugggcuuccuccugggggugggcuccgccaucgcgagcggcgucgccguguccaaggugcugcaccucgagggggaggucaacaagaucaagagcgcccugcuguccaccaacaaggccguggugagccucuccaacggcgucagcgugcugaccuccaaggugcuggaccucaagaacuacaucgacaagcagcugcugcccaucgucaacaagcagagcugcuccaucagcaacaucgagacggugaucgaguuccagcagaagaacaaccggcuccuggagaucacccgcgaguucagcgugaacgccggggucaccacccccguguccacguacaugcugaccaacagcgagcuccugucccugaucaacgacaugccgaucaccaacgaccagaagaagcucaugagcaacaacgugcagaucguccggcagcaguccuacagcaucauguccaucaucaaggaggaggugcuggcguacgugguccagcugccccucuacggcgugaucgacacccccugcuggaagcugcacacgagcccccugugcaccaccaacaccaaggagggguccaacaucugccucacgcgcaccgaccggggcugguacugcgacaacgccggcagcgucuccuucuucccgcaggccgagaccugcaaggugcagagcaaccgcguguucugcgacaccaugaacucccugacgcugcccagcgagguaaaccucugcaacgucgacaucuucaaccccaaguacgacugcaagaucaugaccuccaagaccgacgugagcuccagcgugaucaccucccugggggccaucgucagcugcuacggcaagacgaagugcaccgccagcaacaagaaccgggggaucaucaagaccuucuccaacggcugcgacuacgugagcaacaagggcguggacaccguguccgucgggaacacccuguacuacgugaacaagcaggagggcaagagccucuacgugaagggggagcccaucaucaacuucuacgacccgcuggucuuccccuccgacgaguucgacgcgagcaucucccaggugaacgagaagaucaaccagagccuggccuucauccgcaaguccgacgagcugcuccacaacgugaacgccggcaagagcacgaccaacaucaugaucaccaccaucaucaucgucaucaucgugauccugcugucccucaucgccguggggcugcugcucuacugcaaggcccggugaggacuagucccuguucccagagcccacuuuuuuuucuuuuuuugaaauaaaauagccugucuuucagaucuaaaaaaaaaaaaaaaaaaaaaaaaaaaaaaaaaaaaaaaaaaaaaaaaaaaaaaaaaaaaaaaaugcaucccccccccccccccccccccccccccccccaaaggcucuuuucagagccaccagaauu

SEQ ID NO: 531 - RNA, 1930 nt, Artificial Sequence
  mRNA product Design a-5 comprising derived and/or modified sequence from HRSV(A2)__F-del (opt1)
gggagacuuucccauucuguagcagaauuugguguugccuguggucuuggucccgcggagaagcuuaccauggagcugcucauccugaaggccaacgccaucaccaccauccugacggcggugaccuucugcuucgccagcggccagaacaucaccgaggaguucuaccaguccacgugcagcgccgucuccaagggguaccucagcgcccugcgcaccggcugguacaccuccgugaucaccaucgagcugagcaacaucaaggagaacaagugcaacgggaccgacgccaaggugaagcucaucaagcaggagcuggacaaguacaagaacgcggucacggagcugcagcuccugaugcaguccacccccgccaccaacaaccgggcccgccgggagcugccgcgcuucaugaacuacacccucaacaacgccaagaagacgaacgugacccugagcaagaagcggaagcgccgguuccugggcuuccuccugggggugggcuccgcgaucgccagcggcgucgccguguccaaggugcugcaccucgagggggaggucaacaagaucaagagcgcccugcuguccaccaacaaggccguggugagccucuccaacggcgucagcgugcugaccuccaaggugcuggaccucaagaacuacaucgacaagcagcugcugcccaucgucaacaagcagagcugcuccaucagcaacaucgagacggugaucgaguuccagcagaagaacaaccgccuccuggagaucacccgggaguucagcgugaacgcgggggucaccacccccguguccacguacaugcugaccaacagcgagcuccugucccugaucaacgacaugcccaucaccaacgaccagaagaagcucaugagcaacaacgugcagaucguccgccagcaguccuacagcaucauguccaucaucaaggaggaggugcuggccuacgugguccagcugccgcucuacggcgugaucgacacccccugcuggaagcugcacacgagcccccugugcaccaccaacaccaaggagggguccaacaucugccucacgcggaccgaccgcggcugguacugcgacaacgccggcagcgucuccuucuucccccaggccgagaccugcaaggugcagagcaaccggguguucugcgacaccaugaacucccugacgcugccgagcgaggucaaccucugcaacguggacaucuucaaccccaaguacgacugcaagaucaugaccuccaagaccgacgugagcuccagcgucaucaccucccugggggccaucgugagcugcuacggcaagacgaagugcaccgcgagcaacaagaaccgcgggaucaucaagaccuucuccaacggcugcgacuacgugagcaacaagggcgucgacaccguguccguggggaacacccuguacuacgucaacaagcaggagggcaagagccucuacgugaagggggagcccaucaucaacuucuacgacccccugguguucccguccgacgaguucgacgccagcaucucccaggucaacgagaagaucaaccagagccuggccuucauccggaaguccgacgagcuccugcacaacgugaacgccggcaagagcacgaccaacaucaugaucaccaccaucaucaucgugaucaucgucauccugcugucccucaucgccguggggcugcugcucuacugcaaggcgcgcugaggacuagucccuguucccagagcccacuuuuuuuucuuuuuuugaaauaaaauagccugucuuucagaucuaaaaaaaaaaaaaaaaaaaaaaaaaaaaaaaaaaaaaaaaaaaaaaaaaaaaaaaaaaaaaaaaugcaucccccccccccccccccccccccccccccccaaaggcucuuuucagagccaccagaauu

SEQ ID NO: 532 - RNA, 1930 nt, Artificial Sequence
  mRNA product Design a-5 comprising derived and/or modified sequence from HRSV(A2)__F-del (opt2)
gggagacuuucccauucuguagcagaauuugguguugccuguggucuuggucccgcggagaagcuuaccauggagcuccucauccucaaggccaacgccaucaccaccauccucaccgccgucaccuucugcuucgccuccggccagaacaucaccgaggaguucuaccaguccaccugcuccgccgucuccaagggcuaccucuccgcccuccgcaccggcugguacaccuccgucaucaccaucgagcucuccaacaucaaggagaacaagugcaacggcaccgacgccaaggucaagcucaucaagcaggagcucgacaaguacaagaacgccgucaccgagcuccagcuccucaugcaguccacccccgccaccaacaaccgcgcccgccgcgagcucccccgcuucaugaacuacacccucaacaacgccaagaagaccaacgucacccucuccaagaagcgcaagcgccgcuuccucggcuuccuccucggcgucggcuccgccaucgccuccggcgucgccgucuccaagguccuccaccucgagggcgaggucaacaagaucaaguccgcccuccucuccaccaacaaggccgucgucucccucuccaacggcgucuccguccucaccuccaagguccucgaccucaagaacuacaucgacaagcagcuccuccccaucgucaacaagcaguccugcuccaucuccaacaucgagaccgucaucgaguuccagcagaagaacaaccgccuccucgagaucacccgcgaguucuccgucaacgccggcgucaccacccccgucuccaccuacaugcucaccaacuccgagcuccucucccucaucaacgacaugcccaucaccaacgaccagaagaagcucauguccaacaacguccagaucguccgccagcaguccuacuccaucauguccaucaucaaggaggagguccucgccuacgucguccagcucccccucuacggcgucaucgacacccccugcuggaagcuccacaccuccccccucugcaccaccaacaccaaggagggcuccaacaucugccucacccgcaccgaccgcggcugguacugcgacaacgccggcuccgucuccuucuucccccaggccgagaccugcaagguccaguccaaccgcgucuucugcgacaccaugaacucccucacccuccccuccgaggucaaccucugcaacgucgacaucuucaaccccaaguacgacugcaagaucaugaccuccaagaccgacgucuccuccuccgucaucaccucccucggcgccaucgucuccugcuacggcaagaccaagugcaccgccuccaacaagaaccgcggcaucaucaagaccuucuccaacggcugcgacuacgucuccaacaagggcgucgacaccgucuccgucggcaacacccucuacuacgucaacaagcaggagggcaagucccucuacgucaagggcgagcccaucaucaacuucuacgacccccucgucuuccccuccgacgaguucgacgccuccaucucccaggucaacgagaagaucaaccagucccucgccuucauccgcaaguccgacgagcuccuccacaacgucaacgccggcaaguccaccaccaacaucaugaucaccaccaucaucaucgucaucaucgucauccuccucucccucaucgccgucggccuccuccucuacugcaaggcccgcugaggacuagucccuguucccagagcccacuuuuuuuucuuuuuuugaaauaaaauagccugucuuucagaucuaaaaaaaaaaaaaaaaaaaaaaaaaaaaaaaaaaaaaaaaaaaaaaaaaaaaaaaaaaaaaaaaugcaucccccccccccccccccccccccccccccccaaaggcucuuuucagagccaccagaauu

SEQ ID NO: 533 - RNA, 1930 nt, Artificial Sequence
  mRNA product Design a-5 comprising derived and/or modified sequence from HRSV(A2)__F-del (opt3)
gggagacuuucccauucuguagcagaauuugguguugccuguggucuuggucccgcggagaagcuuaccauggagcugcucauccuuaaggccaacgcuauuaccacaauacugacugcagugacguucugcuuugccagcggccagaauaucaccgaagaguucuaccaauccacauguucugcggucucaaaaggguauuugagugcuuuaagaacuggaugguacaccagcguuauuacaaucgaacuguccaacauuaaggagaauaaaugcaacgguaccgacgccaaggugaaacuaaucaagcaggaacucgauaaguauaaaaaugcaguaacugagcugcagcuucugaugcagucuacacccgccaccaacaauagggcucggcgcgaguugccucgauuuaugaacuacacgcucaauaacgcaaagaaaacuaaugugacccugucgaagaaacguaagagaagguuccugggcuuucucuuaggggucggaucagccauagcuagcggcguggccguuaguaaggugcugcaccuugaaggugaggucaacaaaaucaaguccgcguugcugucuacaaauaaagcagugguaagccuauccaacgggguuucagugcucacuucuaagguccuggaccuuaaaaauuauauugauaagcaacuguugccaaucgugaacaaacagagcuguucuauuuccaacaucgaaaccgugauagaguuccagcagaagaauaaccggcuccuggagauuacacgcgaauuuucagucaaugccggaguuaccacgccggugagcacuuacauguuaacaaacagugagcugcucucucuuaucaaugacaugcccauuaccaacgaucaaaagaaacugauguccaauaacguacagaucgugagacagcagagcuauucgaucaugucuauuauaaaggaagaggucuuggcuuacgugguucaacuaccucuguacggcgugaucgacacuccaugcuggaaacuccauacauccccacuguguaccacgaauaccaaggaaggcucaaacauuugccuuacaaggacugaucgggggugguauugugacaaugccggaagugucagcuucuuuccucaggcagagaccugcaaagugcaguccaaccgcguauucugugauacaaugaauagucugacuuugccaagcgagguuaaccucugcaauguggacaucuuuaaccccaaguacgauuguaagauaaugaccucaaaaacagacgucaguuccagcgugauuaccucucugggugcuaucgucucaugcuauggcaagacuaaaugcacggccaguaacaagaaucgagggaucauuaaaacauucagcaacggaugugauuacguguccaauaagggcguugacaccgugucuguagguaacacuuuauauuacgucaauaagcaagaagggaaaucgcuguaugugaagggagagccuaucauuaacuuuuacgacccccuaguuuucccgagcgaugaauuugacgcguccauaucacaggugaaugagaaaaucaaccagagucucgccuucauuagaaagucugaugaacugcuucacaaugucaacgcaggcaaaagcaccacaaauaucaugaucaccacuauuauaaucgugauuaucguaauuuugcugucccucaucgcugugggccugcuucuguacugcaaggccaggugaggacuagucccuguucccagagcccacuuuuuuuucuuuuuuugaaauaaaauagccugucuuucagaucuaaaaaaaaaaaaaaaaaaaaaaaaaaaaaaaaaaaaaaaaaaaaaaaaaaaaaaaaaaaaaaaaugcaucccccccccccccccccccccccccccccccaaaggcucuuuucagagccaccagaauu

SEQ ID NO: 534 - RNA, 1930 nt, Artificial Sequence
  mRNA product Design a-5 comprising derived and/or modified sequence from HRSV(A2)__F-del (opt4)
gggagacuuucccauucuguagcagaauuugguguugccuguggucuuggucccgcggagaagcuuaccauggagcugcugauccugaaggccaacgccaucaccaccauccugaccgccgugaccuucugcuucgccagcggccagaacaucaccgaggaguucuaccagagcaccugcagcgccgugagcaagggcuaccugagcgcccugagaaccggcugguacaccagcgugaucaccaucgagcugagcaacaucaaggagaacaagugcaacggcaccgacgccaaggugaagcugaucaagcaggagcuggacaaguacaagaacgccgugaccgagcugcagcugcugaugcagagcacccccgccaccaacaacagagccagaagagagcugcccagauucaugaacuacacccugaacaacgccaagaagaccaacgugacccugagcaagaagagaaagagaagauuccugggcuuccugcugggcgugggcagcgccaucgccagcggcguggccgugagcaaggugcugcaccuggagggcgaggugaacaagaucaagagcgcccugcugagcaccaacaaggccguggugagccugagcaacggcgugagcgugcugaccagcaaggugcuggaccugaagaacuacaucgacaagcagcugcugcccaucgugaacaagcagagcugcagcaucagcaacaucgagaccgugaucgaguuccagcagaagaacaacagacugcuggagaucaccagagaguucagcgugaacgccggcgugaccacccccgugagcaccuacaugcugaccaacagcgagcugcugagccugaucaacgacaugcccaucaccaacgaccagaagaagcugaugagcaacaacgugcagaucgugagacagcagagcuacagcaucaugagcaucaucaaggaggaggugcuggccuacguggugcagcugccccuguacggcgugaucgacacccccugcuggaagcugcacaccagcccccugugcaccaccaacaccaaggagggcagcaacaucugccugaccagaaccgacagaggcugguacugcgacaacgccggcagcgugagcuucuucccccaggccgagaccugcaaggugcagagcaacagaguguucugcgacaccaugaacagccugacccugcccagcgaggugaaccugugcaacguggacaucuucaaccccaaguacgacugcaagaucaugaccagcaagaccgacgugagcagcagcgugaucaccagccugggcgccaucgugagcugcuacggcaagaccaagugcaccgccagcaacaagaacagaggcaucaucaagaccuucagcaacggcugcgacuacgugagcaacaagggcguggacaccgugagcgugggcaacacccuguacuacgugaacaagcaggagggcaagagccuguacgugaagggcgagcccaucaucaacuucuacgacccccugguguuccccagcgacgaguucgacgccagcaucagccaggugaacgagaagaucaaccagagccuggccuucaucagaaagagcgacgagcugcugcacaacgugaacgccggcaagagcaccaccaacaucaugaucaccaccaucaucaucgugaucaucgugauccugcugagccugaucgccgugggccugcugcuguacugcaaggccagaugaggacuagucccuguucccagagcccacuuuuuuuucuuuuuuugaaauaaaauagccugucuuucagaucuaaaaaaaaaaaaaaaaaaaaaaaaaaaaaaaaaaaaaaaaaaaaaaaaaaaaaaaaaaaaaaaaugcaucccccccccccccccccccccccccccccccaaaggcucuuuucagagccaccagaauu

SEQ ID NO: 535 - RNA, 1930 nt, Artificial Sequence
  mRNA product Design a-5 comprising derived and/or modified sequence from HRSV(A2)__F-del (opt5)
gggagacuuucccauucuguagcagaauuugguguugccuguggucuuggucccgcggagaagcuuaccauggagcugcucauccugaaggccaacgcuauuaccacaauccuuacggccgugaccuucugcuuugcgagcggccagaauauuacagaagaguucuaccaauccaccuguucugcugucagcaaaggguaucuguccgcccucagaacaggaugguacaccucuguuaucacaauugaacugagcaacaucaaggagaauaaaugcaacggcaccgacgccaaggugaaacuuaucaagcaggaacuggauaaguauaaaaaugcugugacggagcuccagcugcugaugcaguccacccccgccacaaacaaucgggcucgcagagagcucccucgguuuaugaacuacacccugaauaacgccaagaaaacaaaugucacccuuucuaagaaacgcaagagacgguuccugggguuucuccugggagugggcagcgcgauugccuccgggguugcugugagcaagguccuucaccuggaaggagaggugaacaaaaucaagucugcccuccuguccacgaauaaagcuguugugagccugucuaacggcgucuccgugcucacaagcaaggugcuggaccuuaaaaauuauauugauaagcaacugcucccgaucgucaacaaacagucuuguuccauuagcaacaucgaaaccguuauugaguuccagcagaagaauaaccgccugcuugagaucacaagagaauuuuccgugaaugccggcgugaccacccccgucucuacauacaugcugacgaacagcgagcuccugucccugaucaaugacaugccuauuaccaacgaucaaaagaaacucaugagcaauaacgugcagaucguucggcagcagucuuauuccauuaugagcaucauuaaggaagaggugcuggcguacgucgugcaacuuccccuguacgggguuaucgacacaccuugcuggaaacuccauaccucuccccuguguacaaccaauacgaaggaaggaagcaacaucugccuuacacgcaccgauagaggcugguauugugacaaugccggguccgugucuuucuuuccucaggcugagaccugcaaaguccagagcaaccggguguucugugauacaaugaacucccugacccucccgagcgaggucaaucugugcaauguggacauuuuuaaccccaaguacgauuguaagaucaugacaucuaaaacggacguuuccagcucugugauuaccucccugggagccaucgucagcugcuauggcaagacaaaaugcaccgcuuccaacaagaaucgcgggauuaucaaaacauucucuaacggaugugauuacgugagcaauaagggcguugacaccguguccgucggcaacacgcucuauuacgugaauaagcaagaagggaaaucucuguaugugaagggagagccuaucauuaacuuuuacgacccccuuguuuucccuagcgaugaauuugacgccuccaucagccaggucaaugagaaaauuaaccagucucuggccuucaucagaaaguccgaugaacuccugcacaaugugaacgcuggcaaaagcaccacaaauauuaugaucaccacaauuaucaucgugauuaucgucauucugcuuucucucaucgcgguggggcugcugcucuacugcaaggcccggugaggacuagucccuguucccagagcccacuuuuuuuucuuuuuuugaaauaaaauagccugucuuucagaucuaaaaaaaaaaaaaaaaaaaaaaaaaaaaaaaaaaaaaaaaaaaaaaaaaaaaaaaaaaaaaaaaugcaucccccccccccccccccccccccccccccccaaaggcucuuuucagagccaccagaauu

SEQ ID NO: 536 - RNA, 1930 nt, Artificial Sequence
  mRNA product Design a-5 comprising derived and/or modified sequence from HRSV(A2)__F-del (opt6)
gggagacuuucccauucuguagcagaauuugguguugccuguggucuuggucccgcggagaagcuuaccauggaauuacuaauacucaaagccaacgcaauaacaacaauacuaacagcaguaacauucugcuucgcaucaggacaaaacaucacagaagaauuuuaccaaaguacaugcagugcagucucuaaaggauaccucagugccuuacgcacaggaugguacacaucaguaauaacaaucgaacuuucaaacauaaaagaaaacaaaugcaauggaaccgacgccaaaguaaaacuaaucaaacaagaacuagacaaauauaaaaaugcaguaacagaauuacaacuccuaaugcaauccacaccagcaacaaauaacagagcaagacgagaacucccucgauucaugaauuacacauuaaacaacgcaaaaaaaacuaacguaacuuuaucaaaaaaaagaaaacguagauuucuaggauuccuacuaggcguaggguccgccauugcaucaggaguagcaguuagcaaaguauuacauuuagaaggagaaguaaauaaaaucaaaagcgcacuacucucaaccaacaaagcaguaguaucacucucaaacggaguaucaguacuaacauccaaaguacucgaccucaaaaacuacauagacaaacaauuacuacccauaguaaacaaacaaucaugcucuauaucaaauaucgaaacaguaaucgaauuucaacaaaaaaacaaucgacuacuugaaauaacaagagaguucuccgucaaugccggagucaccacaccagucucaacauacaugcuaaccaacucugaacuccuaucacuaauaaaugacaugccaauaacaaacgaccaaaaaaaacuaaugucaaauaacguacaaauaguacgacaacaaaguuauuccauaaugaguauaaucaaagaagaaguguuagcauacguaguccaacuaccauuauauggaguaauagacacaccauguuggaaauuacacaccucaccacucugcacuaccaauacaaaagaaggcucaaauauaugccuaacucgcacagacagaggcugguacugcgauaacgcaggauccguaucuuucuuuccccaagcagaaacuugcaaaguacaaucaaacagagucuucugcgacaccaugaauagucucacauuaccaucugaaguaaaccuauguaacguagauauauucaauccaaaauacgacugcaaaauaaugacaucaaaaaccgacgucucuagcaguguaaucacaucacuaggagcaauaguaagcugcuauggaaaaacaaaauguacagcaucaaacaaaaacaggggaauaauaaaaaccuucucaaacggaugugacuacguaucaaauaaaggcguagacacaguaagcguaggaaacacccuauacuacguuaacaaacaagaagggaaaucauuauacguaaaaggagaaccaauaauaaacuucuacgauccacucguauucccauccgacgaauuugacgccagcauaucccaaguuaacgaaaaaauaaaccaaucacuugcauuuauacgaaaaucugaugaacuucuccacaacguaaaugcaggaaaauccaccaccaauauaaugaucacaacuaucaucauaguaauaaucgucauuuuacuaucauuaauagcaguuggccuacuucuauacugcaaagcaagauaaggacuagucccuguucccagagcccacuuuuuuuucuuuuuuugaaauaaaauagccugucuuucagaucuaaaaaaaaaaaaaaaaaaaaaaaaaaaaaaaaaaaaaaaaaaaaaaaaaaaaaaaaaaaaaaaaugcaucccccccccccccccccccccccccccccccaaaggcucuuuucagagccaccagaauu

SEQ ID NO: 537 - RNA, 1930 nt, Artificial Sequence
  mRNA product Design a-5 comprising derived and/or modified sequence from HRSV(A2)__F-del (opt11)
gggagacuuucccauucuguagcagaauuugguguugccuguggucuuggucccgcggagaagcuuaccauggaacuacuaauccuaaaagccaacgcgaucaccaccauccuaacggcagucaccuucugcuucgcaucaggccaaaacaucacagaagaguucuaccaaagcacaugcuccgccguauccaaaggcuaccucagcgcccuacgcacaggcugguacacaucugucaucaccauagaacucuccaacaucaaagaaaacaaaugcaacggcacugacgccaaaguaaagcugaucaaacaagaacucgacaaauacaaaaacgcagucaccgaacuccaacuacucaugcaauccaccccugcaaccaacaacagggcccgccgcgaacucccccgcuucaugaacuacacuuuaaacaacgccaaaaagaccaacgucacacucagcaagaaacggaaacgacgauuccuaggguuucuccuaggcgucggcucggcaaucgccuccggcgucgccguaagcaaaguacuacaccuagaaggcgaagugaacaaaaucaaaagugcccuucucuccaccaacaaggccguagucucucuauccaacggagucucaguccucaccucaaagguccucgaccucaaaaacuacaucgacaaacaacuacuccccauugucaacaagcagucaugcuccauaucaaacaucgaaaccgucaucgaguuccaacagaaaaacaaccgacuccucgaaauaaccagagaguucucggucaacgccggcgucaccaccccagucagcaccuacaugcucacuaacuccgaacuccuaucccucaucaacgacaugccaauuaccaacgaccaaaagaaacuaaugucgaacaacguucaaaucguccgacaacaaaguuacuccaucaugagcauaaucaaagaagaaguucuagcguacgucguccaacucccacuauacggcgucaucgacacuccgugcuggaaacuccacacaucaccccuauguacaaccaacacaaaagaaggcagcaacaucugccucacccgcaccgaccgagggugguauugcgauaacgcuggcagcgucuccuucuucccccaagccgaaaccugcaaaguccaaucaaacagaguauucugcgacaccaugaacucccuuacucucccuagcgaagucaaccucugcaacguugacauauucaaccccaaauacgacugcaaaaucaugaccuccaagaccgacgucuccuccuccgucaucacaucucuaggugccauugucuccugcuacggaaaaaccaaaugcacagccuccaacaaaaaccgcggcaucauaaaaaccuucuccaacggcugcgacuacgucaguaauaaaggcgucgacacgguauccguugggaauacgcuuuacuacguaaauaaacaagaaggcaaaucccucuacgucaaaggugaacccaucauaaacuucuacgacccgcuuguguucccauccgacgaguucgacgccagcaucagccaggucaacgaaaagaucaaccaaucccuagccuucauccgcaaaagcgacgaacuacuacacaacgucaacgccggaaaauccacaaccaacaucaugaucaccaccaucaucaucgucaucaucguaauccuacucucucucaucgccgucggccuccuacuguacuguaaagcccgauagggacuagucccuguucccagagcccacuuuuuuuucuuuuuuugaaauaaaauagccugucuuucagaucuaaaaaaaaaaaaaaaaaaaaaaaaaaaaaaaaaaaaaaaaaaaaaaaaaaaaaaaaaaaaaaaaugcaucccccccccccccccccccccccccccccccaaaggcucuuuucagagccaccagaauu

SEQ ID NO: 538 - RNA, 2111 nt, Artificial Sequence
  mRNA product Design b-1 comprising derived and/or modified sequence from HRSV(A2)__F-del (artificial)
gggagacggagacggccugcaggaccugcucucucagcccucagccgaggccuacgccgagccgagugcgcagccgacgaccgggaggagccgcagccuucaacucugagguacugugauccgcgcugcccgccgggccgccccaguccgcugcugcggcaccuccuucccucgcgcccucuucgcucgccagcgccuucccugugagccugcgucaccgcggccgccaagcuuaccauggaguugcuaauccucaaagcaaaugcaauuaccacaauccucacugcagucacauuuuguuuugcuucuggucaaaacaucacugaagaauuuuaucaaucaacaugcagugcaguuagcaaaggcuaucuuagugcucugagaacugguugguauaccaguguuauaacuauagaauuaaguaauaucaaggaaaauaaguguaauggaacagaugcuaagguaaaauugauaaaacaagaauuagauaaauauaaaaaugcuguaacagaauugcaguugcucaugcaaagcacaccagcaacaaacaaucgagccagaagagaacuaccaagguuuaugaauuauacacucaacaaugccaaaaaaaccaauguaacauuaagcaagaaaaggaaaagaagauuucuugguuuuuuguuagguguuggaucugcaaucgccaguggcguugcuguaucuaagguccugcaccuagaaggggaagugaacaagaucaaaagugcucuacuauccacaaacaaggcuguagucagcuuaucaaauggaguuagugucuuaaccagcaaaguguuagaccucaaaaacuauauagauaaacaauuguuaccuauugugaacaagcaaagcugcagcauaucaaauauagaaacugugauagaguuccaacaaaagaacaacagacuacuagagauuaccagggaauuuaguguuaaugcagguguaacuacaccuguaagcacuuacauguuaacuaauagugaauuauugucauuaaucaaugauaugccuauaacaaaugaucagaaaaaguuaauguccaacaauguucaaauaguuagacagcaaaguuacucuaucauguccauaauaaaagaggaagucuuagcauauguaguacaauuaccacuauaugguguuauagauacacccuguuggaaacuacacacauccccucuauguacaaccaacacaaaagaaggguccaacaucuguuuaacaagaacugacagaggaugguacugugacaaugcaggaucaguaucuuucuucccacaagcugaaacauguaaaguucaaucaaaucgaguauuuugugacacaaugaacaguuuaacauuaccaagugaaguaaaucucugcaauguugacauauucaaccccaaauaugauuguaaaauuaugacuucaaaaacagauguaagcagcuccguuaucacaucucuaggagccauugugucaugcuauggcaaaacuaaauguacagcauccaauaaaaaucguggaaucauaaagacauuuucuaacgggugcgauuauguaucaaauaaagggguggacacugugucuguagguaacacauuauauuauguaaauaagcaagaagguaaaagucucuauguaaaaggugaaccaauaauaaauuucuaugacccauuaguauuccccucugaugaauuugaugcaucaauaucucaagucaacgagaagauuaaccagagccuagcauuuauucguaaauccgaugaauuauuacauaauguaaaugcugguaaauccaccacaaauaucaugauaacuacuauaauuauagugauuauaguaauauuguuaucauuaauugcuguuggacugcucuuauacuguaaggccagauaaggacuaguguccaccugucccuccugggcugcuggauugucucguuuuccugccaaauaaacaggaucagcgcuuuacagaucuaaaaaaaaaaaaaaaaaaaaaaaaaaaaaaaaaaaaaaaaaaaaaaaaaaaaaaaaaaaaaaaaugcaucccccccccccccccccccccccccccccccaaaggcucuuuucagagccaccagaauu

SEQ ID NO: 539 - RNA, 2111 nt, Artificial Sequence
  mRNA product Design b-1 comprising derived and/or modified sequence from HRSV(A2)__F-del (opt1)
gggagacggagacggccugcaggaccugcucucucagcccucagccgaggccuacgccgagccgagugcgcagccgacgaccgggaggagccgcagccuucaacucugagguacugugauccgcgcugcccgccgggccgccccaguccgcugcugcggcaccuccuucccucgcgcccucuucgcucgccagcgccuucccugugagccugcgucaccgcggccgccaagcuuaccauggagcugcucauccugaaggccaacgccaucaccaccauccugacggcggugaccuucugcuucgccagcggccagaacaucaccgaggaguucuaccaguccaccugcagcgccgucuccaagggguaccucagcgcccugcggacgggcugguacaccuccgugaucaccaucgagcugagcaacaucaaggagaacaagugcaacgggaccgacgccaaggugaagcucaucaagcaggagcuggacaaguacaagaacgcggucacggagcugcagcuccugaugcaguccaccccggcaaccaacaaccgcgcccggcgcgagcugccccgguucaugaacuacacccucaacaacgccaagaagacgaacgugacccugagcaagaagcgcaagcggcgcuuccugggcuuccuccugggggugggcuccgccaucgcgagcggcgucgccguguccaaggugcugcaccucgagggggaggucaacaagaucaagagcgcccugcuguccaccaacaaggccguggugagccucuccaacggcgucagcgugcugaccuccaaggugcuggaccucaagaacuacaucgacaagcagcugcugcccaucgucaacaagcagagcugcuccaucagcaacaucgagacggugaucgaguuccagcagaagaacaaccggcuccuggagaucacccgcgaguucagcgugaacgccggggucaccacccccguguccacguacaugcugaccaacagcgagcuccugucccugaucaacgacaugccgaucaccaacgaccagaagaagcucaugagcaacaacgugcagaucguccggcagcaguccuacagcaucauguccaucaucaaggaggaggugcuggcguacgugguccagcugccccucuacggcgugaucgacacccccugcuggaagcugcacacgagcccccugugcaccaccaacaccaaggagggguccaacaucugccucacgcgcaccgaccggggcugguacugcgacaacgccggcagcgucuccuucuucccgcaggccgagaccugcaaggugcagagcaaccgcguguucugcgacaccaugaacucccugacgcugcccagcgagguaaaccucugcaacgucgacaucuucaaccccaaguacgacugcaagaucaugaccuccaagaccgacgugagcuccagcgugaucaccucccugggggccaucgucagcugcuacggcaagacgaagugcaccgccagcaacaagaaccgggggaucaucaagaccuucuccaacggcugcgacuacgugagcaacaagggcguggacaccguguccgucgggaacacccuguacuacgugaacaagcaggagggcaagagccucuacgugaagggggagcccaucaucaacuucuacgacccgcuggucuuccccuccgacgaguucgacgcgagcaucucccaggugaacgagaagaucaaccagagccuggccuucauccgcaaguccgacgagcugcuccacaacgugaacgccggcaagagcacgaccaacaucaugaucaccaccaucaucaucgucaucaucgugauccugcugucccucaucgccguggggcugcugcucuacugcaaggcccggugaggacuaguguccaccugucccuccugggcugcuggauugucucguuuuccugccaaauaaacaggaucagcgcuuuacagaucuaaaaaaaaaaaaaaaaaaaaaaaaaaaaaaaaaaaaaaaaaaaaaaaaaaaaaaaaaaaaaaaaugcaucccccccccccccccccccccccccccccccaaaggcucuuuucagagccaccagaauu

SEQ ID NO: 540 - RNA, 2111 nt, Artificial Sequence
  mRNA product Design b-1 comprising derived and/or modified sequence from HRSV(A2)__F-del (opt1)
gggagacggagacggccugcaggaccugcucucucagcccucagccgaggccuacgccgagccgagugcgcagccgacgaccgggaggagccgcagccuucaacucugagguacugugauccgcgcugcccgccgggccgccccaguccgcugcugcggcaccuccuucccucgcgcccucuucgcucgccagcgccuucccugugagccugcgucaccgcggccgccaagcuuaccauggagcugcucauccugaaggccaacgccaucaccaccauccugacggcggugaccuucugcuucgccagcggccagaacaucaccgaggaguucuaccaguccacgugcagcgccgucuccaagggguaccucagcgcccugcgcaccggcugguacaccuccgugaucaccaucgagcugagcaacaucaaggagaacaagugcaacgggaccgacgccaaggugaagcucaucaagcaggagcuggacaaguacaagaacgcggucacggagcugcagcuccugaugcaguccacccccgccaccaacaaccgggcccgccgggagcugccgcgcuucaugaacuacacccucaacaacgccaagaagacgaacgugacccugagcaagaagcggaagcgccgguuccugggcuuccuccugggggugggcuccgcgaucgccagcggcgucgccguguccaaggugcugcaccucgagggggaggucaacaagaucaagagcgcccugcuguccaccaacaaggccguggugagccucuccaacggcgucagcgugcugaccuccaaggugcuggaccucaagaacuacaucgacaagcagcugcugcccaucgucaacaagcagagcugcuccaucagcaacaucgagacggugaucgaguuccagcagaagaacaaccgccuccuggagaucacccgggaguucagcgugaacgcgggggucaccacccccguguccacguacaugcugaccaacagcgagcuccugucccugaucaacgacaugcccaucaccaacgaccagaagaagcucaugagcaacaacgugcagaucguccgccagcaguccuacagcaucauguccaucaucaaggaggaggugcuggccuacgugguccagcugccgcucuacggcgugaucgacacccccugcuggaagcugcacacgagcccccugugcaccaccaacaccaaggagggguccaacaucugccucacgcggaccgaccgcggcugguacugcgacaacgccggcagcgucuccuucuucccccaggccgagaccugcaaggugcagagcaaccggguguucugcgacaccaugaacucccugacgcugccgagcgaggucaaccucugcaacguggacaucuucaaccccaaguacgacugcaagaucaugaccuccaagaccgacgugagcuccagcgucaucaccucccugggggccaucgugagcugcuacggcaagacgaagugcaccgcgagcaacaagaaccgcgggaucaucaagaccuucuccaacggcugcgacuacgugagcaacaagggcgucgacaccguguccguggggaacacccuguacuacgucaacaagcaggagggcaagagccucuacgugaagggggagcccaucaucaacuucuacgacccccugguguucccguccgacgaguucgacgccagcaucucccaggucaacgagaagaucaaccagagccuggccuucauccggaaguccgacgagcuccugcacaacgugaacgccggcaagagcacgaccaacaucaugaucaccaccaucaucaucgugaucaucgucauccugcugucccucaucgccguggggcugcugcucuacugcaaggcgcgcugaggacuaguguccaccugucccuccugggcugcuggauugucucguuuuccugccaaauaaacaggaucagcgcuuuacagaucuaaaaaaaaaaaaaaaaaaaaaaaaaaaaaaaaaaaaaaaaaaaaaaaaaaaaaaaaaaaaaaaaugcaucccccccccccccccccccccccccccccccaaaggcucuuuucagagccaccagaauu

SEQ ID NO: 541 - RNA, 2111 nt, Artificial Sequence
  mRNA product Design b-1 comprising derived and/or modified sequence from HRSV(A2)__F-del (opt2)
gggagacggagacggccugcaggaccugcucucucagcccucagccgaggccuacgccgagccgagugcgcagccgacgaccgggaggagccgcagccuucaacucugagguacugugauccgcgcugcccgccgggccgccccaguccgcugcugcggcaccuccuucccucgcgcccucuucgcucgccagcgccuucccugugagccugcgucaccgcggccgccaagcuuaccauggagcuccucauccucaaggccaacgccaucaccaccauccucaccgccgucaccuucugcuucgccuccggccagaacaucaccgaggaguucuaccaguccaccugcuccgccgucuccaagggcuaccucuccgcccuccgcaccggcugguacaccuccgucaucaccaucgagcucuccaacaucaaggagaacaagugcaacggcaccgacgccaaggucaagcucaucaagcaggagcucgacaaguacaagaacgccgucaccgagcuccagcuccucaugcaguccacccccgccaccaacaaccgcgcccgccgcgagcucccccgcuucaugaacuacacccucaacaacgccaagaagaccaacgucacccucuccaagaagcgcaagcgccgcuuccucggcuuccuccucggcgucggcuccgccaucgccuccggcgucgccgucuccaagguccuccaccucgagggcgaggucaacaagaucaaguccgcccuccucuccaccaacaaggccgucgucucccucuccaacggcgucuccguccucaccuccaagguccucgaccucaagaacuacaucgacaagcagcuccuccccaucgucaacaagcaguccugcuccaucuccaacaucgagaccgucaucgaguuccagcagaagaacaaccgccuccucgagaucacccgcgaguucuccgucaacgccggcgucaccacccccgucuccaccuacaugcucaccaacuccgagcuccucucccucaucaacgacaugcccaucaccaacgaccagaagaagcucauguccaacaacguccagaucguccgccagcaguccuacuccaucauguccaucaucaaggaggagguccucgccuacgucguccagcucccccucuacggcgucaucgacacccccugcuggaagcuccacaccuccccccucugcaccaccaacaccaaggagggcuccaacaucugccucacccgcaccgaccgcggcugguacugcgacaacgccggcuccgucuccuucuucccccaggccgagaccugcaagguccaguccaaccgcgucuucugcgacaccaugaacucccucacccuccccuccgaggucaaccucugcaacgucgacaucuucaaccccaaguacgacugcaagaucaugaccuccaagaccgacgucuccuccuccgucaucaccucccucggcgccaucgucuccugcuacggcaagaccaagugcaccgccuccaacaagaaccgcggcaucaucaagaccuucuccaacggcugcgacuacgucuccaacaagggcgucgacaccgucuccgucggcaacacccucuacuacgucaacaagcaggagggcaagucccucuacgucaagggcgagcccaucaucaacuucuacgacccccucgucuuccccuccgacgaguucgacgccuccaucucccaggucaacgagaagaucaaccagucccucgccuucauccgcaaguccgacgagcuccuccacaacgucaacgccggcaaguccaccaccaacaucaugaucaccaccaucaucaucgucaucaucgucauccuccucucccucaucgccgucggccuccuccucuacugcaaggcccgcugaggacuaguguccaccugucccuccugggcugcuggauugucucguuuuccugccaaauaaacaggaucagcgcuuuacagaucuaaaaaaaaaaaaaaaaaaaaaaaaaaaaaaaaaaaaaaaaaaaaaaaaaaaaaaaaaaaaaaaaugcaucccccccccccccccccccccccccccccccaaaggcucuuuucagagccaccagaauu

SEQ ID NO: 542 - RNA, 2111 nt, Artificial Sequence
  mRNA product Design b-1 comprising derived and/or modified sequence from HRSV(A2)__F-del (opt3)
gggagacggagacggccugcaggaccugcucucucagcccucagccgaggccuacgccgagccgagugcgcagccgacgaccgggaggagccgcagccuucaacucugagguacugugauccgcgcugcccgccgggccgccccaguccgcugcugcggcaccuccuucccucgcgcccucuucgcucgccagcgccuucccugugagccugcgucaccgcggccgccaagcuuaccauggagcugcucauccuuaaggccaacgcuauuaccacaauacugacugcagugacguucugcuuugccagcggccagaauaucaccgaagaguucuaccaauccacauguucugcggucucaaaaggguauuugagugcuuuaagaacuggaugguacaccagcguuauuacaaucgaacuguccaacauuaaggagaauaaaugcaacgguaccgacgccaaggugaaacuaaucaagcaggaacucgauaaguauaaaaaugcaguaacugagcugcagcuucugaugcagucuacacccgccaccaacaauagggcucggcgcgaguugccucgauuuaugaacuacacgcucaauaacgcaaagaaaacuaaugugacccugucgaagaaacguaagagaagguuccugggcuuucucuuaggggucggaucagccauagcuagcggcguggccguuaguaaggugcugcaccuugaaggugaggucaacaaaaucaaguccgcguugcugucuacaaauaaagcagugguaagccuauccaacgggguuucagugcucacuucuaagguccuggaccuuaaaaauuauauugauaagcaacuguugccaaucgugaacaaacagagcuguucuauuuccaacaucgaaaccgugauagaguuccagcagaagaauaaccggcuccuggagauuacacgcgaauuuucagucaaugccggaguuaccacgccggugagcacuuacauguuaacaaacagugagcugcucucucuuaucaaugacaugcccauuaccaacgaucaaaagaaacugauguccaauaacguacagaucgugagacagcagagcuauucgaucaugucuauuauaaaggaagaggucuuggcuuacgugguucaacuaccucuguacggcgugaucgacacuccaugcuggaaacuccauacauccccacuguguaccacgaauaccaaggaaggcucaaacauuugccuuacaaggacugaucgggggugguauugugacaaugccggaagugucagcuucuuuccucaggcagagaccugcaaagugcaguccaaccgcguauucugugauacaaugaauagucugacuuugccaagcgagguuaaccucugcaauguggacaucuuuaaccccaaguacgauuguaagauaaugaccucaaaaacagacgucaguuccagcgugauuaccucucugggugcuaucgucucaugcuauggcaagacuaaaugcacggccaguaacaagaaucgagggaucauuaaaacauucagcaacggaugugauuacguguccaauaagggcguugacaccgugucuguagguaacacuuuauauuacgucaauaagcaagaagggaaaucgcuguaugugaagggagagccuaucauuaacuuuuacgacccccuaguuuucccgagcgaugaauuugacgcguccauaucacaggugaaugagaaaaucaaccagagucucgccuucauuagaaagucugaugaacugcuucacaaugucaacgcaggcaaaagcaccacaaauaucaugaucaccacuauuauaaucgugauuaucguaauuuugcugucccucaucgcugugggccugcuucuguacugcaaggccaggugaggacuaguguccaccugucccuccugggcugcuggauugucucguuuuccugccaaauaaacaggaucagcgcuuuacagaucuaaaaaaaaaaaaaaaaaaaaaaaaaaaaaaaaaaaaaaaaaaaaaaaaaaaaaaaaaaaaaaaaugcaucccccccccccccccccccccccccccccccaaaggcucuuuucagagccaccagaauu

SEQ ID NO: 543 - RNA, 2111 nt, Artificial Sequence
  mRNA product Design b-1 comprising derived and/or modified sequence from HRSV(A2)__F-del (opt4)
gggagacggagacggccugcaggaccugcucucucagcccucagccgaggccuacgccgagccgagugcgcagccgacgaccgggaggagccgcagccuucaacucugagguacugugauccgcgcugcccgccgggccgccccaguccgcugcugcggcaccuccuucccucgcgcccucuucgcucgccagcgccuucccugugagccugcgucaccgcggccgccaagcuuaccauggagcugcugauccugaaggccaacgccaucaccaccauccugaccgccgugaccuucugcuucgccagcggccagaacaucaccgaggaguucuaccagagcaccugcagcgccgugagcaagggcuaccugagcgcccugagaaccggcugguacaccagcgugaucaccaucgagcugagcaacaucaaggagaacaagugcaacggcaccgacgccaaggugaagcugaucaagcaggagcuggacaaguacaagaacgccgugaccgagcugcagcugcugaugcagagcacccccgccaccaacaacagagccagaagagagcugcccagauucaugaacuacacccugaacaacgccaagaagaccaacgugacccugagcaagaagagaaagagaagauuccugggcuuccugcugggcgugggcagcgccaucgccagcggcguggccgugagcaaggugcugcaccuggagggcgaggugaacaagaucaagagcgcccugcugagcaccaacaaggccguggugagccugagcaacggcgugagcgugcugaccagcaaggugcuggaccugaagaacuacaucgacaagcagcugcugcccaucgugaacaagcagagcugcagcaucagcaacaucgagaccgugaucgaguuccagcagaagaacaacagacugcuggagaucaccagagaguucagcgugaacgccggcgugaccacccccgugagcaccuacaugcugaccaacagcgagcugcugagccugaucaacgacaugcccaucaccaacgaccagaagaagcugaugagcaacaacgugcagaucgugagacagcagagcuacagcaucaugagcaucaucaaggaggaggugcuggccuacguggugcagcugccccuguacggcgugaucgacacccccugcuggaagcugcacaccagcccccugugcaccaccaacaccaaggagggcagcaacaucugccugaccagaaccgacagaggcugguacugcgacaacgccggcagcgugagcuucuucccccaggccgagaccugcaaggugcagagcaacagaguguucugcgacaccaugaacagccugacccugcccagcgaggugaaccugugcaacguggacaucuucaaccccaaguacgacugcaagaucaugaccagcaagaccgacgugagcagcagcgugaucaccagccugggcgccaucgugagcugcuacggcaagaccaagugcaccgccagcaacaagaacagaggcaucaucaagaccuucagcaacggcugcgacuacgugagcaacaagggcguggacaccgugagcgugggcaacacccuguacuacgugaacaagcaggagggcaagagccuguacgugaagggcgagcccaucaucaacuucuacgacccccugguguuccccagcgacgaguucgacgccagcaucagccaggugaacgagaagaucaaccagagccuggccuucaucagaaagagcgacgagcugcugcacaacgugaacgccggcaagagcaccaccaacaucaugaucaccaccaucaucaucgugaucaucgugauccugcugagccugaucgccgugggccugcugcuguacugcaaggccagaugaggacuaguguccaccugucccuccugggcugcuggauugucucguuuuccugccaaauaaacaggaucagcgcuuuacagaucuaaaaaaaaaaaaaaaaaaaaaaaaaaaaaaaaaaaaaaaaaaaaaaaaaaaaaaaaaaaaaaaaugcaucccccccccccccccccccccccccccccccaaaggcucuuuucagagccaccagaauu

SEQ ID NO: 544 - RNA, 2111 nt, Artificial Sequence
  mRNA product Design b-1 comprising derived and/or modified sequence from HRSV(A2)__F-del (opt5)
gggagacggagacggccugcaggaccugcucucucagcccucagccgaggccuacgccgagccgagugcgcagccgacgaccgggaggagccgcagccuucaacucugagguacugugauccgcgcugcccgccgggccgccccaguccgcugcugcggcaccuccuucccucgcgcccucuucgcucgccagcgccuucccugugagccugcgucaccgcggccgccaagcuuaccauggagcugcucauccugaaggccaacgcuauuaccacaauccuuacggccgugaccuucugcuuugcgagcggccagaauauuacagaagaguucuaccaauccaccuguucugcugucagcaaaggguaucuguccgcccucagaacaggaugguacaccucuguuaucacaauugaacugagcaacaucaaggagaauaaaugcaacggcaccgacgccaaggugaaacuuaucaagcaggaacuggauaaguauaaaaaugcugugacggagcuccagcugcugaugcaguccacccccgccacaaacaaucgggcucgcagagagcucccucgguuuaugaacuacacccugaauaacgccaagaaaacaaaugucacccuuucuaagaaacgcaagagacgguuccugggguuucuccugggagugggcagcgcgauugccuccgggguugcugugagcaagguccuucaccuggaaggagaggugaacaaaaucaagucugcccuccuguccacgaauaaagcuguugugagccugucuaacggcgucuccgugcucacaagcaaggugcuggaccuuaaaaauuauauugauaagcaacugcucccgaucgucaacaaacagucuuguuccauuagcaacaucgaaaccguuauugaguuccagcagaagaauaaccgccugcuugagaucacaagagaauuuuccgugaaugccggcgugaccacccccgucucuacauacaugcugacgaacagcgagcuccugucccugaucaaugacaugccuauuaccaacgaucaaaagaaacucaugagcaauaacgugcagaucguucggcagcagucuuauuccauuaugagcaucauuaaggaagaggugcuggcguacgucgugcaacuuccccuguacgggguuaucgacacaccuugcuggaaacuccauaccucuccccuguguacaaccaauacgaaggaaggaagcaacaucugccuuacacgcaccgauagaggcugguauugugacaaugccggguccgugucuuucuuuccucaggcugagaccugcaaaguccagagcaaccggguguucugugauacaaugaacucccugacccucccgagcgaggucaaucugugcaauguggacauuuuuaaccccaaguacgauuguaagaucaugacaucuaaaacggacguuuccagcucugugauuaccucccugggagccaucgucagcugcuauggcaagacaaaaugcaccgcuuccaacaagaaucgcgggauuaucaaaacauucucuaacggaugugauuacgugagcaauaagggcguugacaccguguccgucggcaacacgcucuauuacgugaauaagcaagaagggaaaucucuguaugugaagggagagccuaucauuaacuuuuacgacccccuuguuuucccuagcgaugaauuugacgccuccaucagccaggucaaugagaaaauuaaccagucucuggccuucaucagaaaguccgaugaacuccugcacaaugugaacgcuggcaaaagcaccacaaauauuaugaucaccacaauuaucaucgugauuaucgucauucugcuuucucucaucgcgguggggcugcugcucuacugcaaggcccggugaggacuaguguccaccugucccuccugggcugcuggauugucucguuuuccugccaaauaaacaggaucagcgcuuuacagaucuaaaaaaaaaaaaaaaaaaaaaaaaaaaaaaaaaaaaaaaaaaaaaaaaaaaaaaaaaaaaaaaaugcaucccccccccccccccccccccccccccccccaaaggcucuuuucagagccaccagaauu

SEQ ID NO: 545 - RNA, 2111 nt, Artificial Sequence
  mRNA product Design b-1 comprising derived and/or modified sequence from HRSV(A2)__F-del (opt6)
gggagacggagacggccugcaggaccugcucucucagcccucagccgaggccuacgccgagccgagugcgcagccgacgaccgggaggagccgcagccuucaacucugagguacugugauccgcgcugcccgccgggccgccccaguccgcugcugcggcaccuccuucccucgcgcccucuucgcucgccagcgccuucccugugagccugcgucaccgcggccgccaagcuuaccauggaauuacuaauacucaaagccaacgcaauaacaacaauacuaacagcaguaacauucugcuucgcaucaggacaaaacaucacagaagaauuuuaccaaaguacaugcagugcagucucuaaaggauaccucagugccuuacgcacaggaugguacacaucaguaauaacaaucgaacuuucaaacauaaaagaaaacaaaugcaauggaaccgacgccaaaguaaaacuaaucaaacaagaacuagacaaauauaaaaaugcaguaacagaauuacaacuccuaaugcaauccacaccagcaacaaauaacagagcaagacgagaacucccucgauucaugaauuacacauuaaacaacgcaaaaaaaacuaacguaacuuuaucaaaaaaaagaaaacguagauuucuaggauuccuacuaggcguaggguccgccauugcaucaggaguagcaguuagcaaaguauuacauuuagaaggagaaguaaauaaaaucaaaagcgcacuacucucaaccaacaaagcaguaguaucacucucaaacggaguaucaguacuaacauccaaaguacucgaccucaaaaacuacauagacaaacaauuacuacccauaguaaacaaacaaucaugcucuauaucaaauaucgaaacaguaaucgaauuucaacaaaaaaacaaucgacuacuugaaauaacaagagaguucuccgucaaugccggagucaccacaccagucucaacauacaugcuaaccaacucugaacuccuaucacuaauaaaugacaugccaauaacaaacgaccaaaaaaaacuaaugucaaauaacguacaaauaguacgacaacaaaguuauuccauaaugaguauaaucaaagaagaaguguuagcauacguaguccaacuaccauuauauggaguaauagacacaccauguuggaaauuacacaccucaccacucugcacuaccaauacaaaagaaggcucaaauauaugccuaacucgcacagacagaggcugguacugcgauaacgcaggauccguaucuuucuuuccccaagcagaaacuugcaaaguacaaucaaacagagucuucugcgacaccaugaauagucucacauuaccaucugaaguaaaccuauguaacguagauauauucaauccaaaauacgacugcaaaauaaugacaucaaaaaccgacgucucuagcaguguaaucacaucacuaggagcaauaguaagcugcuauggaaaaacaaaauguacagcaucaaacaaaaacaggggaauaauaaaaaccuucucaaacggaugugacuacguaucaaauaaaggcguagacacaguaagcguaggaaacacccuauacuacguuaacaaacaagaagggaaaucauuauacguaaaaggagaaccaauaauaaacuucuacgauccacucguauucccauccgacgaauuugacgccagcauaucccaaguuaacgaaaaaauaaaccaaucacuugcauuuauacgaaaaucugaugaacuucuccacaacguaaaugcaggaaaauccaccaccaauauaaugaucacaacuaucaucauaguaauaaucgucauuuuacuaucauuaauagcaguuggccuacuucuauacugcaaagcaagauaaggacuaguguccaccugucccuccugggcugcuggauugucucguuuuccugccaaauaaacaggaucagcgcuuuacagaucuaaaaaaaaaaaaaaaaaaaaaaaaaaaaaaaaaaaaaaaaaaaaaaaaaaaaaaaaaaaaaaaaugcaucccccccccccccccccccccccccccccccaaaggcucuuuucagagccaccagaauu

SEQ ID NO: 546 - RNA, 2111 nt, Artificial Sequence
  mRNA product Design b-1 comprising derived and/or modified sequence from HRSV(A2)__F-del (opt11)
gggagacggagacggccugcaggaccugcucucucagcccucagccgaggccuacgccgagccgagugcgcagccgacgaccgggaggagccgcagccuucaacucugagguacugugauccgcgcugcccgccgggccgccccaguccgcugcugcggcaccuccuucccucgcgcccucuucgcucgccagcgccuucccugugagccugcgucaccgcggccgccaagcuuaccauggaacuacuaauccuaaaagccaacgcgaucaccaccauccuaacggcagucaccuucugcuucgcaucaggccaaaacaucacagaagaguucuaccaaagcacaugcuccgccguauccaaaggcuaccucagcgcccuacgcacaggcugguacacaucugucaucaccauagaacucuccaacaucaaagaaaacaaaugcaacggcacugacgccaaaguaaagcugaucaaacaagaacucgacaaauacaaaaacgcagucaccgaacuccaacuacucaugcaauccaccccugcaaccaacaacagggcccgccgcgaacucccccgcuucaugaacuacacuuuaaacaacgccaaaaagaccaacgucacacucagcaagaaacggaaacgacgauuccuaggguuucuccuaggcgucggcucggcaaucgccuccggcgucgccguaagcaaaguacuacaccuagaaggcgaagugaacaaaaucaaaagugcccuucucuccaccaacaaggccguagucucucuauccaacggagucucaguccucaccucaaagguccucgaccucaaaaacuacaucgacaaacaacuacuccccauugucaacaagcagucaugcuccauaucaaacaucgaaaccgucaucgaguuccaacagaaaaacaaccgacuccucgaaauaaccagagaguucucggucaacgccggcgucaccaccccagucagcaccuacaugcucacuaacuccgaacuccuaucccucaucaacgacaugccaauuaccaacgaccaaaagaaacuaaugucgaacaacguucaaaucguccgacaacaaaguuacuccaucaugagcauaaucaaagaagaaguucuagcguacgucguccaacucccacuauacggcgucaucgacacuccgugcuggaaacuccacacaucaccccuauguacaaccaacacaaaagaaggcagcaacaucugccucacccgcaccgaccgagggugguauugcgauaacgcuggcagcgucuccuucuucccccaagccgaaaccugcaaaguccaaucaaacagaguauucugcgacaccaugaacucccuuacucucccuagcgaagucaaccucugcaacguugacauauucaaccccaaauacgacugcaaaaucaugaccuccaagaccgacgucuccuccuccgucaucacaucucuaggugccauugucuccugcuacggaaaaaccaaaugcacagccuccaacaaaaaccgcggcaucauaaaaaccuucuccaacggcugcgacuacgucaguaauaaaggcgucgacacgguauccguugggaauacgcuuuacuacguaaauaaacaagaaggcaaaucccucuacgucaaaggugaacccaucauaaacuucuacgacccgcuuguguucccauccgacgaguucgacgccagcaucagccaggucaacgaaaagaucaaccaaucccuagccuucauccgcaaaagcgacgaacuacuacacaacgucaacgccggaaaauccacaaccaacaucaugaucaccaccaucaucaucgucaucaucguaauccuacucucucucaucgccgucggccuccuacuguacuguaaagcccgauagggacuaguguccaccugucccuccugggcugcuggauugucucguuuuccugccaaauaaacaggaucagcgcuuuacagaucuaaaaaaaaaaaaaaaaaaaaaaaaaaaaaaaaaaaaaaaaaaaaaaaaaaaaaaaaaaaaaaaaugcaucccccccccccccccccccccccccccccccaaaggcucuuuucagagccaccagaauu

SEQ ID NO: 547 - RNA, 1931 nt, Artificial Sequence
  mRNA product Design b-2 comprising derived and/or modified sequence from HRSV(A2)__F-del (artificial)
gggagagccucugcuggaguccggggaguggcguuggcugcuagagcgaagcuuaccauggaguugcuaauccucaaagcaaaugcaauuaccacaauccucacugcagucacauuuuguuuugcuucuggucaaaacaucacugaagaauuuuaucaaucaacaugcagugcaguuagcaaaggcuaucuuagugcucugagaacugguugguauaccaguguuauaacuauagaauuaaguaauaucaaggaaaauaaguguaauggaacagaugcuaagguaaaauugauaaaacaagaauuagauaaauauaaaaaugcuguaacagaauugcaguugcucaugcaaagcacaccagcaacaaacaaucgagccagaagagaacuaccaagguuuaugaauuauacacucaacaaugccaaaaaaaccaauguaacauuaagcaagaaaaggaaaagaagauuucuugguuuuuuguuagguguuggaucugcaaucgccaguggcguugcuguaucuaagguccugcaccuagaaggggaagugaacaagaucaaaagugcucuacuauccacaaacaaggcuguagucagcuuaucaaauggaguuagugucuuaaccagcaaaguguuagaccucaaaaacuauauagauaaacaauuguuaccuauugugaacaagcaaagcugcagcauaucaaauauagaaacugugauagaguuccaacaaaagaacaacagacuacuagagauuaccagggaauuuaguguuaaugcagguguaacuacaccuguaagcacuuacauguuaacuaauagugaauuauugucauuaaucaaugauaugccuauaacaaaugaucagaaaaaguuaauguccaacaauguucaaauaguuagacagcaaaguuacucuaucauguccauaauaaaagaggaagucuuagcauauguaguacaauuaccacuauaugguguuauagauacacccuguuggaaacuacacacauccccucuauguacaaccaacacaaaagaaggguccaacaucuguuuaacaagaacugacagaggaugguacugugacaaugcaggaucaguaucuuucuucccacaagcugaaacauguaaaguucaaucaaaucgaguauuuugugacacaaugaacaguuuaacauuaccaagugaaguaaaucucugcaauguugacauauucaaccccaaauaugauuguaaaauuaugacuucaaaaacagauguaagcagcuccguuaucacaucucuaggagccauugugucaugcuauggcaaaacuaaauguacagcauccaauaaaaaucguggaaucauaaagacauuuucuaacgggugcgauuauguaucaaauaaagggguggacacugugucuguagguaacacauuauauuauguaaauaagcaagaagguaaaagucucuauguaaaaggugaaccaauaauaaauuucuaugacccauuaguauuccccucugaugaauuugaugcaucaauaucucaagucaacgagaagauuaaccagagccuagcauuuauucguaaauccgaugaauuauuacauaauguaaaugcugguaaauccaccacaaauaucaugauaacuacuauaauuauagugauuauaguaauauuguuaucauuaauugcuguuggacugcucuuauacuguaaggccagauaaggacuaguguccaccugucccuccugggcugcuggauugucucguuuuccugccaaauaaacaggaucagcgcuuuacagaucuaaaaaaaaaaaaaaaaaaaaaaaaaaaaaaaaaaaaaaaaaaaaaaaaaaaaaaaaaaaaaaaaugcaucccccccccccccccccccccccccccccccaaaggcucuuuucagagccaccagaauu

SEQ ID NO: 548 - RNA, 1931 nt, Artificial Sequence
  mRNA product Design b-2 comprising derived and/or modified sequence from HRSV(A2)__F-del (opt1)
gggagagccucugcuggaguccggggaguggcguuggcugcuagagcgaagcuuaccauggagcugcucauccugaaggccaacgccaucaccaccauccugacggcggugaccuucugcuucgccagcggccagaacaucaccgaggaguucuaccaguccaccugcagcgccgucuccaagggguaccucagcgcccugcggacgggcugguacaccuccgugaucaccaucgagcugagcaacaucaaggagaacaagugcaacgggaccgacgccaaggugaagcucaucaagcaggagcuggacaaguacaagaacgcggucacggagcugcagcuccugaugcaguccaccccggcaaccaacaaccgcgcccggcgcgagcugccccgguucaugaacuacacccucaacaacgccaagaagacgaacgugacccugagcaagaagcgcaagcggcgcuuccugggcuuccuccugggggugggcuccgccaucgcgagcggcgucgccguguccaaggugcugcaccucgagggggaggucaacaagaucaagagcgcccugcuguccaccaacaaggccguggugagccucuccaacggcgucagcgugcugaccuccaaggugcuggaccucaagaacuacaucgacaagcagcugcugcccaucgucaacaagcagagcugcuccaucagcaacaucgagacggugaucgaguuccagcagaagaacaaccggcuccuggagaucacccgcgaguucagcgugaacgccggggucaccacccccguguccacguacaugcugaccaacagcgagcuccugucccugaucaacgacaugccgaucaccaacgaccagaagaagcucaugagcaacaacgugcagaucguccggcagcaguccuacagcaucauguccaucaucaaggaggaggugcuggcguacgugguccagcugccccucuacggcgugaucgacacccccugcuggaagcugcacacgagcccccugugcaccaccaacaccaaggagggguccaacaucugccucacgcgcaccgaccggggcugguacugcgacaacgccggcagcgucuccuucuucccgcaggccgagaccugcaaggugcagagcaaccgcguguucugcgacaccaugaacucccugacgcugcccagcgagguaaaccucugcaacgucgacaucuucaaccccaaguacgacugcaagaucaugaccuccaagaccgacgugagcuccagcgugaucaccucccugggggccaucgucagcugcuacggcaagacgaagugcaccgccagcaacaagaaccgggggaucaucaagaccuucuccaacggcugcgacuacgugagcaacaagggcguggacaccguguccgucgggaacacccuguacuacgugaacaagcaggagggcaagagccucuacgugaagggggagcccaucaucaacuucuacgacccgcuggucuuccccuccgacgaguucgacgcgagcaucucccaggugaacgagaagaucaaccagagccuggccuucauccgcaaguccgacgagcugcuccacaacgugaacgccggcaagagcacgaccaacaucaugaucaccaccaucaucaucgucaucaucgugauccugcugucccucaucgccguggggcugcugcucuacugcaaggcccggugaggacuaguguccaccugucccuccugggcugcuggauugucucguuuuccugccaaauaaacaggaucagcgcuuuacagaucuaaaaaaaaaaaaaaaaaaaaaaaaaaaaaaaaaaaaaaaaaaaaaaaaaaaaaaaaaaaaaaaaugcaucccccccccccccccccccccccccccccccaaaggcucuuuucagagccaccagaauu

SEQ ID NO: 549 - RNA, 1931 nt, Artificial Sequence
  mRNA product Design b-2 comprising derived and/or modified sequence from HRSV(A2)__F-del (opt1)
gggagagccucugcuggaguccggggaguggcguuggcugcuagagcgaagcuuaccauggagcugcucauccugaaggccaacgccaucaccaccauccugacggcggugaccuucugcuucgccagcggccagaacaucaccgaggaguucuaccaguccacgugcagcgccgucuccaagggguaccucagcgcccugcgcaccggcugguacaccuccgugaucaccaucgagcugagcaacaucaaggagaacaagugcaacgggaccgacgccaaggugaagcucaucaagcaggagcuggacaaguacaagaacgcggucacggagcugcagcuccugaugcaguccacccccgccaccaacaaccgggcccgccgggagcugccgcgcuucaugaacuacacccucaacaacgccaagaagacgaacgugacccugagcaagaagcggaagcgccgguuccugggcuuccuccugggggugggcuccgcgaucgccagcggcgucgccguguccaaggugcugcaccucgagggggaggucaacaagaucaagagcgcccugcuguccaccaacaaggccguggugagccucuccaacggcgucagcgugcugaccuccaaggugcuggaccucaagaacuacaucgacaagcagcugcugcccaucgucaacaagcagagcugcuccaucagcaacaucgagacggugaucgaguuccagcagaagaacaaccgccuccuggagaucacccgggaguucagcgugaacgcgggggucaccacccccguguccacguacaugcugaccaacagcgagcuccugucccugaucaacgacaugcccaucaccaacgaccagaagaagcucaugagcaacaacgugcagaucguccgccagcaguccuacagcaucauguccaucaucaaggaggaggugcuggccuacgugguccagcugccgcucuacggcgugaucgacacccccugcuggaagcugcacacgagcccccugugcaccaccaacaccaaggagggguccaacaucugccucacgcggaccgaccgcggcugguacugcgacaacgccggcagcgucuccuucuucccccaggccgagaccugcaaggugcagagcaaccggguguucugcgacaccaugaacucccugacgcugccgagcgaggucaaccucugcaacguggacaucuucaaccccaaguacgacugcaagaucaugaccuccaagaccgacgugagcuccagcgucaucaccucccugggggccaucgugagcugcuacggcaagacgaagugcaccgcgagcaacaagaaccgcgggaucaucaagaccuucuccaacggcugcgacuacgugagcaacaagggcgucgacaccguguccguggggaacacccuguacuacgucaacaagcaggagggcaagagccucuacgugaagggggagcccaucaucaacuucuacgacccccugguguucccguccgacgaguucgacgccagcaucucccaggucaacgagaagaucaaccagagccuggccuucauccggaaguccgacgagcuccugcacaacgugaacgccggcaagagcacgaccaacaucaugaucaccaccaucaucaucgugaucaucgucauccugcugucccucaucgccguggggcugcugcucuacugcaaggcgcgcugaggacuaguguccaccugucccuccugggcugcuggauugucucguuuuccugccaaauaaacaggaucagcgcuuuacagaucuaaaaaaaaaaaaaaaaaaaaaaaaaaaaaaaaaaaaaaaaaaaaaaaaaaaaaaaaaaaaaaaaugcaucccccccccccccccccccccccccccccccaaaggcucuuuucagagccaccagaauu

SEQ ID NO: 550 - RNA, 1931 nt, Artificial Sequence
  mRNA product Design b-2 comprising derived and/or modified sequence from HRSV(A2)__F-del (opt2)
gggagagccucugcuggaguccggggaguggcguuggcugcuagagcgaagcuuaccauggagcuccucauccucaaggccaacgccaucaccaccauccucaccgccgucaccuucugcuucgccuccggccagaacaucaccgaggaguucuaccaguccaccugcuccgccgucuccaagggcuaccucuccgcccuccgcaccggcugguacaccuccgucaucaccaucgagcucuccaacaucaaggagaacaagugcaacggcaccgacgccaaggucaagcucaucaagcaggagcucgacaaguacaagaacgccgucaccgagcuccagcuccucaugcaguccacccccgccaccaacaaccgcgcccgccgcgagcucccccgcuucaugaacuacacccucaacaacgccaagaagaccaacgucacccucuccaagaagcgcaagcgccgcuuccucggcuuccuccucggcgucggcuccgccaucgccuccggcgucgccgucuccaagguccuccaccucgagggcgaggucaacaagaucaaguccgcccuccucuccaccaacaaggccgucgucucccucuccaacggcgucuccguccucaccuccaagguccucgaccucaagaacuacaucgacaagcagcuccuccccaucgucaacaagcaguccugcuccaucuccaacaucgagaccgucaucgaguuccagcagaagaacaaccgccuccucgagaucacccgcgaguucuccgucaacgccggcgucaccacccccgucuccaccuacaugcucaccaacuccgagcuccucucccucaucaacgacaugcccaucaccaacgaccagaagaagcucauguccaacaacguccagaucguccgccagcaguccuacuccaucauguccaucaucaaggaggagguccucgccuacgucguccagcucccccucuacggcgucaucgacacccccugcuggaagcuccacaccuccccccucugcaccaccaacaccaaggagggcuccaacaucugccucacccgcaccgaccgcggcugguacugcgacaacgccggcuccgucuccuucuucccccaggccgagaccugcaagguccaguccaaccgcgucuucugcgacaccaugaacucccucacccuccccuccgaggucaaccucugcaacgucgacaucuucaaccccaaguacgacugcaagaucaugaccuccaagaccgacgucuccuccuccgucaucaccucccucggcgccaucgucuccugcuacggcaagaccaagugcaccgccuccaacaagaaccgcggcaucaucaagaccuucuccaacggcugcgacuacgucuccaacaagggcgucgacaccgucuccgucggcaacacccucuacuacgucaacaagcaggagggcaagucccucuacgucaagggcgagcccaucaucaacuucuacgacccccucgucuuccccuccgacgaguucgacgccuccaucucccaggucaacgagaagaucaaccagucccucgccuucauccgcaaguccgacgagcuccuccacaacgucaacgccggcaaguccaccaccaacaucaugaucaccaccaucaucaucgucaucaucgucauccuccucucccucaucgccgucggccuccuccucuacugcaaggcccgcugaggacuaguguccaccugucccuccugggcugcuggauugucucguuuuccugccaaauaaacaggaucagcgcuuuacagaucuaaaaaaaaaaaaaaaaaaaaaaaaaaaaaaaaaaaaaaaaaaaaaaaaaaaaaaaaaaaaaaaaugcaucccccccccccccccccccccccccccccccaaaggcucuuuucagagccaccagaauu

SEQ ID NO: 551 - RNA, 1931 nt, Artificial Sequence
  mRNA product Design b-2 comprising derived and/or modified sequence from HRSV(A2)__F-del (opt3)
gggagagccucugcuggaguccggggaguggcguuggcugcuagagcgaagcuuaccauggagcugcucauccuuaaggccaacgcuauuaccacaauacugacugcagugacguucugcuuugccagcggccagaauaucaccgaagaguucuaccaauccacauguucugcggucucaaaaggguauuugagugcuuuaagaacuggaugguacaccagcguuauuacaaucgaacuguccaacauuaaggagaauaaaugcaacgguaccgacgccaaggugaaacuaaucaagcaggaacucgauaaguauaaaaaugcaguaacugagcugcagcuucugaugcagucuacacccgccaccaacaauagggcucggcgcgaguugccucgauuuaugaacuacacgcucaauaacgcaaagaaaacuaaugugacccugucgaagaaacguaagagaagguuccugggcuuucucuuaggggucggaucagccauagcuagcggcguggccguuaguaaggugcugcaccuugaaggugaggucaacaaaaucaaguccgcguugcugucuacaaauaaagcagugguaagccuauccaacgggguuucagugcucacuucuaagguccuggaccuuaaaaauuauauugauaagcaacuguugccaaucgugaacaaacagagcuguucuauuuccaacaucgaaaccgugauagaguuccagcagaagaauaaccggcuccuggagauuacacgcgaauuuucagucaaugccggaguuaccacgccggugagcacuuacauguuaacaaacagugagcugcucucucuuaucaaugacaugcccauuaccaacgaucaaaagaaacugauguccaauaacguacagaucgugagacagcagagcuauucgaucaugucuauuauaaaggaagaggucuuggcuuacgugguucaacuaccucuguacggcgugaucgacacuccaugcuggaaacuccauacauccccacuguguaccacgaauaccaaggaaggcucaaacauuugccuuacaaggacugaucgggggugguauugugacaaugccggaagugucagcuucuuuccucaggcagagaccugcaaagugcaguccaaccgcguauucugugauacaaugaauagucugacuuugccaagcgagguuaaccucugcaauguggacaucuuuaaccccaaguacgauuguaagauaaugaccucaaaaacagacgucaguuccagcgugauuaccucucugggugcuaucgucucaugcuauggcaagacuaaaugcacggccaguaacaagaaucgagggaucauuaaaacauucagcaacggaugugauuacguguccaauaagggcguugacaccgugucuguagguaacacuuuauauuacgucaauaagcaagaagggaaaucgcuguaugugaagggagagccuaucauuaacuuuuacgacccccuaguuuucccgagcgaugaauuugacgcguccauaucacaggugaaugagaaaaucaaccagagucucgccuucauuagaaagucugaugaacugcuucacaaugucaacgcaggcaaaagcaccacaaauaucaugaucaccacuauuauaaucgugauuaucguaauuuugcugucccucaucgcugugggccugcuucuguacugcaaggccaggugaggacuaguguccaccugucccuccugggcugcuggauugucucguuuuccugccaaauaaacaggaucagcgcuuuacagaucuaaaaaaaaaaaaaaaaaaaaaaaaaaaaaaaaaaaaaaaaaaaaaaaaaaaaaaaaaaaaaaaaugcaucccccccccccccccccccccccccccccccaaaggcucuuuucagagccaccagaauu

SEQ ID NO: 552 - RNA, 1931 nt, Artificial Sequence
  mRNA product Design b-2 comprising derived and/or modified sequence from HRSV(A2)__F-del (opt4)
gggagagccucugcuggaguccggggaguggcguuggcugcuagagcgaagcuuaccauggagcugcugauccugaaggccaacgccaucaccaccauccugaccgccgugaccuucugcuucgccagcggccagaacaucaccgaggaguucuaccagagcaccugcagcgccgugagcaagggcuaccugagcgcccugagaaccggcugguacaccagcgugaucaccaucgagcugagcaacaucaaggagaacaagugcaacggcaccgacgccaaggugaagcugaucaagcaggagcuggacaaguacaagaacgccgugaccgagcugcagcugcugaugcagagcacccccgccaccaacaacagagccagaagagagcugcccagauucaugaacuacacccugaacaacgccaagaagaccaacgugacccugagcaagaagagaaagagaagauuccugggcuuccugcugggcgugggcagcgccaucgccagcggcguggccgugagcaaggugcugcaccuggagggcgaggugaacaagaucaagagcgcccugcugagcaccaacaaggccguggugagccugagcaacggcgugagcgugcugaccagcaaggugcuggaccugaagaacuacaucgacaagcagcugcugcccaucgugaacaagcagagcugcagcaucagcaacaucgagaccgugaucgaguuccagcagaagaacaacagacugcuggagaucaccagagaguucagcgugaacgccggcgugaccacccccgugagcaccuacaugcugaccaacagcgagcugcugagccugaucaacgacaugcccaucaccaacgaccagaagaagcugaugagcaacaacgugcagaucgugagacagcagagcuacagcaucaugagcaucaucaaggaggaggugcuggccuacguggugcagcugccccuguacggcgugaucgacacccccugcuggaagcugcacaccagcccccugugcaccaccaacaccaaggagggcagcaacaucugccugaccagaaccgacagaggcugguacugcgacaacgccggcagcgugagcuucuucccccaggccgagaccugcaaggugcagagcaacagaguguucugcgacaccaugaacagccugacccugcccagcgaggugaaccugugcaacguggacaucuucaaccccaaguacgacugcaagaucaugaccagcaagaccgacgugagcagcagcgugaucaccagccugggcgccaucgugagcugcuacggcaagaccaagugcaccgccagcaacaagaacagaggcaucaucaagaccuucagcaacggcugcgacuacgugagcaacaagggcguggacaccgugagcgugggcaacacccuguacuacgugaacaagcaggagggcaagagccuguacgugaagggcgagcccaucaucaacuucuacgacccccugguguuccccagcgacgaguucgacgccagcaucagccaggugaacgagaagaucaaccagagccuggccuucaucagaaagagcgacgagcugcugcacaacgugaacgccggcaagagcaccaccaacaucaugaucaccaccaucaucaucgugaucaucgugauccugcugagccugaucgccgugggccugcugcuguacugcaaggccagaugaggacuaguguccaccugucccuccugggcugcuggauugucucguuuuccugccaaauaaacaggaucagcgcuuuacagaucuaaaaaaaaaaaaaaaaaaaaaaaaaaaaaaaaaaaaaaaaaaaaaaaaaaaaaaaaaaaaaaaaugcaucccccccccccccccccccccccccccccccaaaggcucuuuucagagccaccagaauu

SEQ ID NO: 553 - RNA, 1931 nt, Artificial Sequence
  mRNA product Design b-2 comprising derived and/or modified sequence from HRSV(A2)__F-del (opt5)
gggagagccucugcuggaguccggggaguggcguuggcugcuagagcgaagcuuaccauggagcugcucauccugaaggccaacgcuauuaccacaauccuuacggccgugaccuucugcuuugcgagcggccagaauauuacagaagaguucuaccaauccaccuguucugcugucagcaaaggguaucuguccgcccucagaacaggaugguacaccucuguuaucacaauugaacugagcaacaucaaggagaauaaaugcaacggcaccgacgccaaggugaaacuuaucaagcaggaacuggauaaguauaaaaaugcugugacggagcuccagcugcugaugcaguccacccccgccacaaacaaucgggcucgcagagagcucccucgguuuaugaacuacacccugaauaacgccaagaaaacaaaugucacccuuucuaagaaacgcaagagacgguuccugggguuucuccugggagugggcagcgcgauugccuccgggguugcugugagcaagguccuucaccuggaaggagaggugaacaaaaucaagucugcccuccuguccacgaauaaagcuguugugagccugucuaacggcgucuccgugcucacaagcaaggugcuggaccuuaaaaauuauauugauaagcaacugcucccgaucgucaacaaacagucuuguuccauuagcaacaucgaaaccguuauugaguuccagcagaagaauaaccgccugcuugagaucacaagagaauuuuccgugaaugccggcgugaccacccccgucucuacauacaugcugacgaacagcgagcuccugucccugaucaaugacaugccuauuaccaacgaucaaaagaaacucaugagcaauaacgugcagaucguucggcagcagucuuauuccauuaugagcaucauuaaggaagaggugcuggcguacgucgugcaacuuccccuguacgggguuaucgacacaccuugcuggaaacuccauaccucuccccuguguacaaccaauacgaaggaaggaagcaacaucugccuuacacgcaccgauagaggcugguauugugacaaugccggguccgugucuuucuuuccucaggcugagaccugcaaaguccagagcaaccggguguucugugauacaaugaacucccugacccucccgagcgaggucaaucugugcaauguggacauuuuuaaccccaaguacgauuguaagaucaugacaucuaaaacggacguuuccagcucugugauuaccucccugggagccaucgucagcugcuauggcaagacaaaaugcaccgcuuccaacaagaaucgcgggauuaucaaaacauucucuaacggaugugauuacgugagcaauaagggcguugacaccguguccgucggcaacacgcucuauuacgugaauaagcaagaagggaaaucucuguaugugaagggagagccuaucauuaacuuuuacgacccccuuguuuucccuagcgaugaauuugacgccuccaucagccaggucaaugagaaaauuaaccagucucuggccuucaucagaaaguccgaugaacuccugcacaaugugaacgcuggcaaaagcaccacaaauauuaugaucaccacaauuaucaucgugauuaucgucauucugcuuucucucaucgcgguggggcugcugcucuacugcaaggcccggugaggacuaguguccaccugucccuccugggcugcuggauugucucguuuuccugccaaauaaacaggaucagcgcuuuacagaucuaaaaaaaaaaaaaaaaaaaaaaaaaaaaaaaaaaaaaaaaaaaaaaaaaaaaaaaaaaaaaaaaugcaucccccccccccccccccccccccccccccccaaaggcucuuuucagagccaccagaauu

SEQ ID NO: 554 - RNA, 1931 nt, Artificial Sequence
  mRNA product Design b-2 comprising derived and/or modified sequence from HRSV(A2)__F-del (opt6)
gggagagccucugcuggaguccggggaguggcguuggcugcuagagcgaagcuuaccauggaauuacuaauacucaaagccaacgcaauaacaacaauacuaacagcaguaacauucugcuucgcaucaggacaaaacaucacagaagaauuuuaccaaaguacaugcagugcagucucuaaaggauaccucagugccuuacgcacaggaugguacacaucaguaauaacaaucgaacuuucaaacauaaaagaaaacaaaugcaauggaaccgacgccaaaguaaaacuaaucaaacaagaacuagacaaauauaaaaaugcaguaacagaauuacaacuccuaaugcaauccacaccagcaacaaauaacagagcaagacgagaacucccucgauucaugaauuacacauuaaacaacgcaaaaaaaacuaacguaacuuuaucaaaaaaaagaaaacguagauuucuaggauuccuacuaggcguaggguccgccauugcaucaggaguagcaguuagcaaaguauuacauuuagaaggagaaguaaauaaaaucaaaagcgcacuacucucaaccaacaaagcaguaguaucacucucaaacggaguaucaguacuaacauccaaaguacucgaccucaaaaacuacauagacaaacaauuacuacccauaguaaacaaacaaucaugcucuauaucaaauaucgaaacaguaaucgaauuucaacaaaaaaacaaucgacuacuugaaauaacaagagaguucuccgucaaugccggagucaccacaccagucucaacauacaugcuaaccaacucugaacuccuaucacuaauaaaugacaugccaauaacaaacgaccaaaaaaaacuaaugucaaauaacguacaaauaguacgacaacaaaguuauuccauaaugaguauaaucaaagaagaaguguuagcauacguaguccaacuaccauuauauggaguaauagacacaccauguuggaaauuacacaccucaccacucugcacuaccaauacaaaagaaggcucaaauauaugccuaacucgcacagacagaggcugguacugcgauaacgcaggauccguaucuuucuuuccccaagcagaaacuugcaaaguacaaucaaacagagucuucugcgacaccaugaauagucucacauuaccaucugaaguaaaccuauguaacguagauauauucaauccaaaauacgacugcaaaauaaugacaucaaaaaccgacgucucuagcaguguaaucacaucacuaggagcaauaguaagcugcuauggaaaaacaaaauguacagcaucaaacaaaaacaggggaauaauaaaaaccuucucaaacggaugugacuacguaucaaauaaaggcguagacacaguaagcguaggaaacacccuauacuacguuaacaaacaagaagggaaaucauuauacguaaaaggagaaccaauaauaaacuucuacgauccacucguauucccauccgacgaauuugacgccagcauaucccaaguuaacgaaaaaauaaaccaaucacuugcauuuauacgaaaaucugaugaacuucuccacaacguaaaugcaggaaaauccaccaccaauauaaugaucacaacuaucaucauaguaauaaucgucauuuuacuaucauuaauagcaguuggccuacuucuauacugcaaagcaagauaaggacuaguguccaccugucccuccugggcugcuggauugucucguuuuccugccaaauaaacaggaucagcgcuuuacagaucuaaaaaaaaaaaaaaaaaaaaaaaaaaaaaaaaaaaaaaaaaaaaaaaaaaaaaaaaaaaaaaaaugcaucccccccccccccccccccccccccccccccaaaggcucuuuucagagccaccagaauu

SEQ ID NO: 555 - RNA, 1931 nt, Artificial Sequence
  mRNA product Design b-2 comprising derived and/or modified sequence from HRSV(A2)__F-del (opt11)
gggagagccucugcuggaguccggggaguggcguuggcugcuagagcgaagcuuaccauggaacuacuaauccuaaaagccaacgcgaucaccaccauccuaacggcagucaccuucugcuucgcaucaggccaaaacaucacagaagaguucuaccaaagcacaugcuccgccguauccaaaggcuaccucagcgcccuacgcacaggcugguacacaucugucaucaccauagaacucuccaacaucaaagaaaacaaaugcaacggcacugacgccaaaguaaagcugaucaaacaagaacucgacaaauacaaaaacgcagucaccgaacuccaacuacucaugcaauccaccccugcaaccaacaacagggcccgccgcgaacucccccgcuucaugaacuacacuuuaaacaacgccaaaaagaccaacgucacacucagcaagaaacggaaacgacgauuccuaggguuucuccuaggcgucggcucggcaaucgccuccggcgucgccguaagcaaaguacuacaccuagaaggcgaagugaacaaaaucaaaagugcccuucucuccaccaacaaggccguagucucucuauccaacggagucucaguccucaccucaaagguccucgaccucaaaaacuacaucgacaaacaacuacuccccauugucaacaagcagucaugcuccauaucaaacaucgaaaccgucaucgaguuccaacagaaaaacaaccgacuccucgaaauaaccagagaguucucggucaacgccggcgucaccaccccagucagcaccuacaugcucacuaacuccgaacuccuaucccucaucaacgacaugccaauuaccaacgaccaaaagaaacuaaugucgaacaacguucaaaucguccgacaacaaaguuacuccaucaugagcauaaucaaagaagaaguucuagcguacgucguccaacucccacuauacggcgucaucgacacuccgugcuggaaacuccacacaucaccccuauguacaaccaacacaaaagaaggcagcaacaucugccucacccgcaccgaccgagggugguauugcgauaacgcuggcagcgucuccuucuucccccaagccgaaaccugcaaaguccaaucaaacagaguauucugcgacaccaugaacucccuuacucucccuagcgaagucaaccucugcaacguugacauauucaaccccaaauacgacugcaaaaucaugaccuccaagaccgacgucuccuccuccgucaucacaucucuaggugccauugucuccugcuacggaaaaaccaaaugcacagccuccaacaaaaaccgcggcaucauaaaaaccuucuccaacggcugcgacuacgucaguaauaaaggcgucgacacgguauccguugggaauacgcuuuacuacguaaauaaacaagaaggcaaaucccucuacgucaaaggugaacccaucauaaacuucuacgacccgcuuguguucccauccgacgaguucgacgccagcaucagccaggucaacgaaaagaucaaccaaucccuagccuucauccgcaaaagcgacgaacuacuacacaacgucaacgccggaaaauccacaaccaacaucaugaucaccaccaucaucaucgucaucaucguaauccuacucucucucaucgccgucggccuccuacuguacuguaaagcccgauagggacuaguguccaccugucccuccugggcugcuggauugucucguuuuccugccaaauaaacaggaucagcgcuuuacagaucuaaaaaaaaaaaaaaaaaaaaaaaaaaaaaaaaaaaaaaaaaaaaaaaaaaaaaaaaaaaaaaaaugcaucccccccccccccccccccccccccccccccaaaggcucuuuucagagccaccagaauu

SEQ ID NO: 556 - RNA, 1951 nt, Artificial Sequence
  mRNA product Design b-3 comprising derived and/or modified sequence from HRSV(A2)__F-del (artificial)
gggagagucccgcagucggcguccagcggcucugcuuguucgugugugugucguugcaggccuuauucaagcuuaccauggaguugcuaauccucaaagcaaaugcaauuaccacaauccucacugcagucacauuuuguuuugcuucuggucaaaacaucacugaagaauuuuaucaaucaacaugcagugcaguuagcaaaggcuaucuuagugcucugagaacugguugguauaccaguguuauaacuauagaauuaaguaauaucaaggaaaauaaguguaauggaacagaugcuaagguaaaauugauaaaacaagaauuagauaaauauaaaaaugcuguaacagaauugcaguugcucaugcaaagcacaccagcaacaaacaaucgagccagaagagaacuaccaagguuuaugaauuauacacucaacaaugccaaaaaaaccaauguaacauuaagcaagaaaaggaaaagaagauuucuugguuuuuuguuagguguuggaucugcaaucgccaguggcguugcuguaucuaagguccugcaccuagaaggggaagugaacaagaucaaaagugcucuacuauccacaaacaaggcuguagucagcuuaucaaauggaguuagugucuuaaccagcaaaguguuagaccucaaaaacuauauagauaaacaauuguuaccuauugugaacaagcaaagcugcagcauaucaaauauagaaacugugauagaguuccaacaaaagaacaacagacuacuagagauuaccagggaauuuaguguuaaugcagguguaacuacaccuguaagcacuuacauguuaacuaauagugaauuauugucauuaaucaaugauaugccuauaacaaaugaucagaaaaaguuaauguccaacaauguucaaauaguuagacagcaaaguuacucuaucauguccauaauaaaagaggaagucuuagcauauguaguacaauuaccacuauaugguguuauagauacacccuguuggaaacuacacacauccccucuauguacaaccaacacaaaagaaggguccaacaucuguuuaacaagaacugacagaggaugguacugugacaaugcaggaucaguaucuuucuucccacaagcugaaacauguaaaguucaaucaaaucgaguauuuugugacacaaugaacaguuuaacauuaccaagugaaguaaaucucugcaauguugacauauucaaccccaaauaugauuguaaaauuaugacuucaaaaacagauguaagcagcuccguuaucacaucucuaggagccauugugucaugcuauggcaaaacuaaauguacagcauccaauaaaaaucguggaaucauaaagacauuuucuaacgggugcgauuauguaucaaauaaagggguggacacugugucuguagguaacacauuauauuauguaaauaagcaagaagguaaaagucucuauguaaaaggugaaccaauaauaaauuucuaugacccauuaguauuccccucugaugaauuugaugcaucaauaucucaagucaacgagaagauuaaccagagccuagcauuuauucguaaauccgaugaauuauuacauaauguaaaugcugguaaauccaccacaaauaucaugauaacuacuauaauuauagugauuauaguaauauuguuaucauuaauugcuguuggacugcucuuauacuguaaggccagauaaggacuaguguccaccugucccuccugggcugcuggauugucucguuuuccugccaaauaaacaggaucagcgcuuuacagaucuaaaaaaaaaaaaaaaaaaaaaaaaaaaaaaaaaaaaaaaaaaaaaaaaaaaaaaaaaaaaaaaaugcaucccccccccccccccccccccccccccccccaaaggcucuuuucagagccaccagaauu

SEQ ID NO: 557 - RNA, 1951 nt, Artificial Sequence
  mRNA product Design b-3 comprising derived and/or modified sequence from HRSV(A2)__F-del (opt1)
gggagagucccgcagucggcguccagcggcucugcuuguucgugugugugucguugcaggccuuauucaagcuuaccauggagcugcucauccugaaggccaacgccaucaccaccauccugacggcggugaccuucugcuucgccagcggccagaacaucaccgaggaguucuaccaguccaccugcagcgccgucuccaagggguaccucagcgcccugcggacgggcugguacaccuccgugaucaccaucgagcugagcaacaucaaggagaacaagugcaacgggaccgacgccaaggugaagcucaucaagcaggagcuggacaaguacaagaacgcggucacggagcugcagcuccugaugcaguccaccccggcaaccaacaaccgcgcccggcgcgagcugccccgguucaugaacuacacccucaacaacgccaagaagacgaacgugacccugagcaagaagcgcaagcggcgcuuccugggcuuccuccugggggugggcuccgccaucgcgagcggcgucgccguguccaaggugcugcaccucgagggggaggucaacaagaucaagagcgcccugcuguccaccaacaaggccguggugagccucuccaacggcgucagcgugcugaccuccaaggugcuggaccucaagaacuacaucgacaagcagcugcugcccaucgucaacaagcagagcugcuccaucagcaacaucgagacggugaucgaguuccagcagaagaacaaccggcuccuggagaucacccgcgaguucagcgugaacgccggggucaccacccccguguccacguacaugcugaccaacagcgagcuccugucccugaucaacgacaugccgaucaccaacgaccagaagaagcucaugagcaacaacgugcagaucguccggcagcaguccuacagcaucauguccaucaucaaggaggaggugcuggcguacgugguccagcugccccucuacggcgugaucgacacccccugcuggaagcugcacacgagcccccugugcaccaccaacaccaaggagggguccaacaucugccucacgcgcaccgaccggggcugguacugcgacaacgccggcagcgucuccuucuucccgcaggccgagaccugcaaggugcagagcaaccgcguguucugcgacaccaugaacucccugacgcugcccagcgagguaaaccucugcaacgucgacaucuucaaccccaaguacgacugcaagaucaugaccuccaagaccgacgugagcuccagcgugaucaccucccugggggccaucgucagcugcuacggcaagacgaagugcaccgccagcaacaagaaccgggggaucaucaagaccuucuccaacggcugcgacuacgugagcaacaagggcguggacaccguguccgucgggaacacccuguacuacgugaacaagcaggagggcaagagccucuacgugaagggggagcccaucaucaacuucuacgacccgcuggucuuccccuccgacgaguucgacgcgagcaucucccaggugaacgagaagaucaaccagagccuggccuucauccgcaaguccgacgagcugcuccacaacgugaacgccggcaagagcacgaccaacaucaugaucaccaccaucaucaucgucaucaucgugauccugcugucccucaucgccguggggcugcugcucuacugcaaggcccggugaggacuaguguccaccugucccuccugggcugcuggauugucucguuuuccugccaaauaaacaggaucagcgcuuuacagaucuaaaaaaaaaaaaaaaaaaaaaaaaaaaaaaaaaaaaaaaaaaaaaaaaaaaaaaaaaaaaaaaaugcaucccccccccccccccccccccccccccccccaaaggcucuuuucagagccaccagaauu

SEQ ID NO: 558 - RNA, 1951 nt, Artificial Sequence
  mRNA product Design b-3 comprising derived and/or modified sequence from HRSV(A2)__F-del (opt1)
gggagagucccgcagucggcguccagcggcucugcuuguucgugugugugucguugcaggccuuauucaagcuuaccauggagcugcucauccugaaggccaacgccaucaccaccauccugacggcggugaccuucugcuucgccagcggccagaacaucaccgaggaguucuaccaguccacgugcagcgccgucuccaagggguaccucagcgcccugcgcaccggcugguacaccuccgugaucaccaucgagcugagcaacaucaaggagaacaagugcaacgggaccgacgccaaggugaagcucaucaagcaggagcuggacaaguacaagaacgcggucacggagcugcagcuccugaugcaguccacccccgccaccaacaaccgggcccgccgggagcugccgcgcuucaugaacuacacccucaacaacgccaagaagacgaacgugacccugagcaagaagcggaagcgccgguuccugggcuuccuccugggggugggcuccgcgaucgccagcggcgucgccguguccaaggugcugcaccucgagggggaggucaacaagaucaagagcgcccugcuguccaccaacaaggccguggugagccucuccaacggcgucagcgugcugaccuccaaggugcuggaccucaagaacuacaucgacaagcagcugcugcccaucgucaacaagcagagcugcuccaucagcaacaucgagacggugaucgaguuccagcagaagaacaaccgccuccuggagaucacccgggaguucagcgugaacgcgggggucaccacccccguguccacguacaugcugaccaacagcgagcuccugucccugaucaacgacaugcccaucaccaacgaccagaagaagcucaugagcaacaacgugcagaucguccgccagcaguccuacagcaucauguccaucaucaaggaggaggugcuggccuacgugguccagcugccgcucuacggcgugaucgacacccccugcuggaagcugcacacgagcccccugugcaccaccaacaccaaggagggguccaacaucugccucacgcggaccgaccgcggcugguacugcgacaacgccggcagcgucuccuucuucccccaggccgagaccugcaaggugcagagcaaccggguguucugcgacaccaugaacucccugacgcugccgagcgaggucaaccucugcaacguggacaucuucaaccccaaguacgacugcaagaucaugaccuccaagaccgacgugagcuccagcgucaucaccucccugggggccaucgugagcugcuacggcaagacgaagugcaccgcgagcaacaagaaccgcgggaucaucaagaccuucuccaacggcugcgacuacgugagcaacaagggcgucgacaccguguccguggggaacacccuguacuacgucaacaagcaggagggcaagagccucuacgugaagggggagcccaucaucaacuucuacgacccccugguguucccguccgacgaguucgacgccagcaucucccaggucaacgagaagaucaaccagagccuggccuucauccggaaguccgacgagcuccugcacaacgugaacgccggcaagagcacgaccaacaucaugaucaccaccaucaucaucgugaucaucgucauccugcugucccucaucgccguggggcugcugcucuacugcaaggcgcgcugaggacuaguguccaccugucccuccugggcugcuggauugucucguuuuccugccaaauaaacaggaucagcgcuuuacagaucuaaaaaaaaaaaaaaaaaaaaaaaaaaaaaaaaaaaaaaaaaaaaaaaaaaaaaaaaaaaaaaaaugcaucccccccccccccccccccccccccccccccaaaggcucuuuucagagccaccagaauu

SEQ ID NO: 559 - RNA, 1951 nt, Artificial Sequence
  mRNA product Design b-3 comprising derived and/or modified sequence from HRSV(A2)__F-del (opt2)
gggagagucccgcagucggcguccagcggcucugcuuguucgugugugugucguugcaggccuuauucaagcuuaccauggagcuccucauccucaaggccaacgccaucaccaccauccucaccgccgucaccuucugcuucgccuccggccagaacaucaccgaggaguucuaccaguccaccugcuccgccgucuccaagggcuaccucuccgcccuccgcaccggcugguacaccuccgucaucaccaucgagcucuccaacaucaaggagaacaagugcaacggcaccgacgccaaggucaagcucaucaagcaggagcucgacaaguacaagaacgccgucaccgagcuccagcuccucaugcaguccacccccgccaccaacaaccgcgcccgccgcgagcucccccgcuucaugaacuacacccucaacaacgccaagaagaccaacgucacccucuccaagaagcgcaagcgccgcuuccucggcuuccuccucggcgucggcuccgccaucgccuccggcgucgccgucuccaagguccuccaccucgagggcgaggucaacaagaucaaguccgcccuccucuccaccaacaaggccgucgucucccucuccaacggcgucuccguccucaccuccaagguccucgaccucaagaacuacaucgacaagcagcuccuccccaucgucaacaagcaguccugcuccaucuccaacaucgagaccgucaucgaguuccagcagaagaacaaccgccuccucgagaucacccgcgaguucuccgucaacgccggcgucaccacccccgucuccaccuacaugcucaccaacuccgagcuccucucccucaucaacgacaugcccaucaccaacgaccagaagaagcucauguccaacaacguccagaucguccgccagcaguccuacuccaucauguccaucaucaaggaggagguccucgccuacgucguccagcucccccucuacggcgucaucgacacccccugcuggaagcuccacaccuccccccucugcaccaccaacaccaaggagggcuccaacaucugccucacccgcaccgaccgcggcugguacugcgacaacgccggcuccgucuccuucuucccccaggccgagaccugcaagguccaguccaaccgcgucuucugcgacaccaugaacucccucacccuccccuccgaggucaaccucugcaacgucgacaucuucaaccccaaguacgacugcaagaucaugaccuccaagaccgacgucuccuccuccgucaucaccucccucggcgccaucgucuccugcuacggcaagaccaagugcaccgccuccaacaagaaccgcggcaucaucaagaccuucuccaacggcugcgacuacgucuccaacaagggcgucgacaccgucuccgucggcaacacccucuacuacgucaacaagcaggagggcaagucccucuacgucaagggcgagcccaucaucaacuucuacgacccccucgucuuccccuccgacgaguucgacgccuccaucucccaggucaacgagaagaucaaccagucccucgccuucauccgcaaguccgacgagcuccuccacaacgucaacgccggcaaguccaccaccaacaucaugaucaccaccaucaucaucgucaucaucgucauccuccucucccucaucgccgucggccuccuccucuacugcaaggcccgcugaggacuaguguccaccugucccuccugggcugcuggauugucucguuuuccugccaaauaaacaggaucagcgcuuuacagaucuaaaaaaaaaaaaaaaaaaaaaaaaaaaaaaaaaaaaaaaaaaaaaaaaaaaaaaaaaaaaaaaaugcaucccccccccccccccccccccccccccccccaaaggcucuuuucagagccaccagaauu

SEQ ID NO: 560 - RNA, 1951 nt, Artificial Sequence
  mRNA product Design b-3 comprising derived and/or modified sequence from HRSV(A2)__F-del (opt3)
gggagagucccgcagucggcguccagcggcucugcuuguucgugugugugucguugcaggccuuauucaagcuuaccauggagcugcucauccuuaaggccaacgcuauuaccacaauacugacugcagugacguucugcuuugccagcggccagaauaucaccgaagaguucuaccaauccacauguucugcggucucaaaaggguauuugagugcuuuaagaacuggaugguacaccagcguuauuacaaucgaacuguccaacauuaaggagaauaaaugcaacgguaccgacgccaaggugaaacuaaucaagcaggaacucgauaaguauaaaaaugcaguaacugagcugcagcuucugaugcagucuacacccgccaccaacaauagggcucggcgcgaguugccucgauuuaugaacuacacgcucaauaacgcaaagaaaacuaaugugacccugucgaagaaacguaagagaagguuccugggcuuucucuuaggggucggaucagccauagcuagcggcguggccguuaguaaggugcugcaccuugaaggugaggucaacaaaaucaaguccgcguugcugucuacaaauaaagcagugguaagccuauccaacgggguuucagugcucacuucuaagguccuggaccuuaaaaauuauauugauaagcaacuguugccaaucgugaacaaacagagcuguucuauuuccaacaucgaaaccgugauagaguuccagcagaagaauaaccggcuccuggagauuacacgcgaauuuucagucaaugccggaguuaccacgccggugagcacuuacauguuaacaaacagugagcugcucucucuuaucaaugacaugcccauuaccaacgaucaaaagaaacugauguccaauaacguacagaucgugagacagcagagcuauucgaucaugucuauuauaaaggaagaggucuuggcuuacgugguucaacuaccucuguacggcgugaucgacacuccaugcuggaaacuccauacauccccacuguguaccacgaauaccaaggaaggcucaaacauuugccuuacaaggacugaucgggggugguauugugacaaugccggaagugucagcuucuuuccucaggcagagaccugcaaagugcaguccaaccgcguauucugugauacaaugaauagucugacuuugccaagcgagguuaaccucugcaauguggacaucuuuaaccccaaguacgauuguaagauaaugaccucaaaaacagacgucaguuccagcgugauuaccucucugggugcuaucgucucaugcuauggcaagacuaaaugcacggccaguaacaagaaucgagggaucauuaaaacauucagcaacggaugugauuacguguccaauaagggcguugacaccgugucuguagguaacacuuuauauuacgucaauaagcaagaagggaaaucgcuguaugugaagggagagccuaucauuaacuuuuacgacccccuaguuuucccgagcgaugaauuugacgcguccauaucacaggugaaugagaaaaucaaccagagucucgccuucauuagaaagucugaugaacugcuucacaaugucaacgcaggcaaaagcaccacaaauaucaugaucaccacuauuauaaucgugauuaucguaauuuugcugucccucaucgcugugggccugcuucuguacugcaaggccaggugaggacuaguguccaccugucccuccugggcugcuggauugucucguuuuccugccaaauaaacaggaucagcgcuuuacagaucuaaaaaaaaaaaaaaaaaaaaaaaaaaaaaaaaaaaaaaaaaaaaaaaaaaaaaaaaaaaaaaaaugcaucccccccccccccccccccccccccccccccaaaggcucuuuucagagccaccagaauu

SEQ ID NO: 561 - RNA, 1951 nt, Artificial Sequence
  mRNA product Design b-3 comprising derived and/or modified sequence from HRSV(A2)__F-del (opt4)
gggagagucccgcagucggcguccagcggcucugcuuguucgugugugugucguugcaggccuuauucaagcuuaccauggagcugcugauccugaaggccaacgccaucaccaccauccugaccgccgugaccuucugcuucgccagcggccagaacaucaccgaggaguucuaccagagcaccugcagcgccgugagcaagggcuaccugagcgcccugagaaccggcugguacaccagcgugaucaccaucgagcugagcaacaucaaggagaacaagugcaacggcaccgacgccaaggugaagcugaucaagcaggagcuggacaaguacaagaacgccgugaccgagcugcagcugcugaugcagagcacccccgccaccaacaacagagccagaagagagcugcccagauucaugaacuacacccugaacaacgccaagaagaccaacgugacccugagcaagaagagaaagagaagauuccugggcuuccugcugggcgugggcagcgccaucgccagcggcguggccgugagcaaggugcugcaccuggagggcgaggugaacaagaucaagagcgcccugcugagcaccaacaaggccguggugagccugagcaacggcgugagcgugcugaccagcaaggugcuggaccugaagaacuacaucgacaagcagcugcugcccaucgugaacaagcagagcugcagcaucagcaacaucgagaccgugaucgaguuccagcagaagaacaacagacugcuggagaucaccagagaguucagcgugaacgccggcgugaccacccccgugagcaccuacaugcugaccaacagcgagcugcugagccugaucaacgacaugcccaucaccaacgaccagaagaagcugaugagcaacaacgugcagaucgugagacagcagagcuacagcaucaugagcaucaucaaggaggaggugcuggccuacguggugcagcugccccuguacggcgugaucgacacccccugcuggaagcugcacaccagcccccugugcaccaccaacaccaaggagggcagcaacaucugccugaccagaaccgacagaggcugguacugcgacaacgccggcagcgugagcuucuucccccaggccgagaccugcaaggugcagagcaacagaguguucugcgacaccaugaacagccugacccugcccagcgaggugaaccugugcaacguggacaucuucaaccccaaguacgacugcaagaucaugaccagcaagaccgacgugagcagcagcgugaucaccagccugggcgccaucgugagcugcuacggcaagaccaagugcaccgccagcaacaagaacagaggcaucaucaagaccuucagcaacggcugcgacuacgugagcaacaagggcguggacaccgugagcgugggcaacacccuguacuacgugaacaagcaggagggcaagagccuguacgugaagggcgagcccaucaucaacuucuacgacccccugguguuccccagcgacgaguucgacgccagcaucagccaggugaacgagaagaucaaccagagccuggccuucaucagaaagagcgacgagcugcugcacaacgugaacgccggcaagagcaccaccaacaucaugaucaccaccaucaucaucgugaucaucgugauccugcugagccugaucgccgugggccugcugcuguacugcaaggccagaugaggacuaguguccaccugucccuccugggcugcuggauugucucguuuuccugccaaauaaacaggaucagcgcuuuacagaucuaaaaaaaaaaaaaaaaaaaaaaaaaaaaaaaaaaaaaaaaaaaaaaaaaaaaaaaaaaaaaaaaugcaucccccccccccccccccccccccccccccccaaaggcucuuuucagagccaccagaauu

SEQ ID NO: 562 - RNA, 1951 nt, Artificial Sequence
  mRNA product Design b-3 comprising derived and/or modified sequence from HRSV(A2)__F-del (opt5)
gggagagucccgcagucggcguccagcggcucugcuuguucgugugugugucguugcaggccuuauucaagcuuaccauggagcugcucauccugaaggccaacgcuauuaccacaauccuuacggccgugaccuucugcuuugcgagcggccagaauauuacagaagaguucuaccaauccaccuguucugcugucagcaaaggguaucuguccgcccucagaacaggaugguacaccucuguuaucacaauugaacugagcaacaucaaggagaauaaaugcaacggcaccgacgccaaggugaaacuuaucaagcaggaacuggauaaguauaaaaaugcugugacggagcuccagcugcugaugcaguccacccccgccacaaacaaucgggcucgcagagagcucccucgguuuaugaacuacacccugaauaacgccaagaaaacaaaugucacccuuucuaagaaacgcaagagacgguuccugggguuucuccugggagugggcagcgcgauugccuccgggguugcugugagcaagguccuucaccuggaaggagaggugaacaaaaucaagucugcccuccuguccacgaauaaagcuguugugagccugucuaacggcgucuccgugcucacaagcaaggugcuggaccuuaaaaauuauauugauaagcaacugcucccgaucgucaacaaacagucuuguuccauuagcaacaucgaaaccguuauugaguuccagcagaagaauaaccgccugcuugagaucacaagagaauuuuccgugaaugccggcgugaccacccccgucucuacauacaugcugacgaacagcgagcuccugucccugaucaaugacaugccuauuaccaacgaucaaaagaaacucaugagcaauaacgugcagaucguucggcagcagucuuauuccauuaugagcaucauuaaggaagaggugcuggcguacgucgugcaacuuccccuguacgggguuaucgacacaccuugcuggaaacuccauaccucuccccuguguacaaccaauacgaaggaaggaagcaacaucugccuuacacgcaccgauagaggcugguauugugacaaugccggguccgugucuuucuuuccucaggcugagaccugcaaaguccagagcaaccggguguucugugauacaaugaacucccugacccucccgagcgaggucaaucugugcaauguggacauuuuuaaccccaaguacgauuguaagaucaugacaucuaaaacggacguuuccagcucugugauuaccucccugggagccaucgucagcugcuauggcaagacaaaaugcaccgcuuccaacaagaaucgcgggauuaucaaaacauucucuaacggaugugauuacgugagcaauaagggcguugacaccguguccgucggcaacacgcucuauuacgugaauaagcaagaagggaaaucucuguaugugaagggagagccuaucauuaacuuuuacgacccccuuguuuucccuagcgaugaauuugacgccuccaucagccaggucaaugagaaaauuaaccagucucuggccuucaucagaaaguccgaugaacuccugcacaaugugaacgcuggcaaaagcaccacaaauauuaugaucaccacaauuaucaucgugauuaucgucauucugcuuucucucaucgcgguggggcugcugcucuacugcaaggcccggugaggacuaguguccaccugucccuccugggcugcuggauugucucguuuuccugccaaauaaacaggaucagcgcuuuacagaucuaaaaaaaaaaaaaaaaaaaaaaaaaaaaaaaaaaaaaaaaaaaaaaaaaaaaaaaaaaaaaaaaugcaucccccccccccccccccccccccccccccccaaaggcucuuuucagagccaccagaauu

SEQ ID NO: 563 - RNA, 1951 nt, Artificial Sequence
  mRNA product Design b-3 comprising derived and/or modified sequence from HRSV(A2)__F-del (opt6)
gggagagucccgcagucggcguccagcggcucugcuuguucgugugugugucguugcaggccuuauucaagcuuaccauggaauuacuaauacucaaagccaacgcaauaacaacaauacuaacagcaguaacauucugcuucgcaucaggacaaaacaucacagaagaauuuuaccaaaguacaugcagugcagucucuaaaggauaccucagugccuuacgcacaggaugguacacaucaguaauaacaaucgaacuuucaaacauaaaagaaaacaaaugcaauggaaccgacgccaaaguaaaacuaaucaaacaagaacuagacaaauauaaaaaugcaguaacagaauuacaacuccuaaugcaauccacaccagcaacaaauaacagagcaagacgagaacucccucgauucaugaauuacacauuaaacaacgcaaaaaaaacuaacguaacuuuaucaaaaaaaagaaaacguagauuucuaggauuccuacuaggcguaggguccgccauugcaucaggaguagcaguuagcaaaguauuacauuuagaaggagaaguaaauaaaaucaaaagcgcacuacucucaaccaacaaagcaguaguaucacucucaaacggaguaucaguacuaacauccaaaguacucgaccucaaaaacuacauagacaaacaauuacuacccauaguaaacaaacaaucaugcucuauaucaaauaucgaaacaguaaucgaauuucaacaaaaaaacaaucgacuacuugaaauaacaagagaguucuccgucaaugccggagucaccacaccagucucaacauacaugcuaaccaacucugaacuccuaucacuaauaaaugacaugccaauaacaaacgaccaaaaaaaacuaaugucaaauaacguacaaauaguacgacaacaaaguuauuccauaaugaguauaaucaaagaagaaguguuagcauacguaguccaacuaccauuauauggaguaauagacacaccauguuggaaauuacacaccucaccacucugcacuaccaauacaaaagaaggcucaaauauaugccuaacucgcacagacagaggcugguacugcgauaacgcaggauccguaucuuucuuuccccaagcagaaacuugcaaaguacaaucaaacagagucuucugcgacaccaugaauagucucacauuaccaucugaaguaaaccuauguaacguagauauauucaauccaaaauacgacugcaaaauaaugacaucaaaaaccgacgucucuagcaguguaaucacaucacuaggagcaauaguaagcugcuauggaaaaacaaaauguacagcaucaaacaaaaacaggggaauaauaaaaaccuucucaaacggaugugacuacguaucaaauaaaggcguagacacaguaagcguaggaaacacccuauacuacguuaacaaacaagaagggaaaucauuauacguaaaaggagaaccaauaauaaacuucuacgauccacucguauucccauccgacgaauuugacgccagcauaucccaaguuaacgaaaaaauaaaccaaucacuugcauuuauacgaaaaucugaugaacuucuccacaacguaaaugcaggaaaauccaccaccaauauaaugaucacaacuaucaucauaguaauaaucgucauuuuacuaucauuaauagcaguuggccuacuucuauacugcaaagcaagauaaggacuaguguccaccugucccuccugggcugcuggauugucucguuuuccugccaaauaaacaggaucagcgcuuuacagaucuaaaaaaaaaaaaaaaaaaaaaaaaaaaaaaaaaaaaaaaaaaaaaaaaaaaaaaaaaaaaaaaaugcaucccccccccccccccccccccccccccccccaaaggcucuuuucagagccaccagaauu

SEQ ID NO: 564 - RNA, 1951 nt, Artificial Sequence
  mRNA product Design b-3 comprising derived and/or modified sequence from HRSV(A2)__F-del (opt11)
gggagagucccgcagucggcguccagcggcucugcuuguucgugugugugucguugcaggccuuauucaagcuuaccauggaacuacuaauccuaaaagccaacgcgaucaccaccauccuaacggcagucaccuucugcuucgcaucaggccaaaacaucacagaagaguucuaccaaagcacaugcuccgccguauccaaaggcuaccucagcgcccuacgcacaggcugguacacaucugucaucaccauagaacucuccaacaucaaagaaaacaaaugcaacggcacugacgccaaaguaaagcugaucaaacaagaacucgacaaauacaaaaacgcagucaccgaacuccaacuacucaugcaauccaccccugcaaccaacaacagggcccgccgcgaacucccccgcuucaugaacuacacuuuaaacaacgccaaaaagaccaacgucacacucagcaagaaacggaaacgacgauuccuaggguuucuccuaggcgucggcucggcaaucgccuccggcgucgccguaagcaaaguacuacaccuagaaggcgaagugaacaaaaucaaaagugcccuucucuccaccaacaaggccguagucucucuauccaacggagucucaguccucaccucaaagguccucgaccucaaaaacuacaucgacaaacaacuacuccccauugucaacaagcagucaugcuccauaucaaacaucgaaaccgucaucgaguuccaacagaaaaacaaccgacuccucgaaauaaccagagaguucucggucaacgccggcgucaccaccccagucagcaccuacaugcucacuaacuccgaacuccuaucccucaucaacgacaugccaauuaccaacgaccaaaagaaacuaaugucgaacaacguucaaaucguccgacaacaaaguuacuccaucaugagcauaaucaaagaagaaguucuagcguacgucguccaacucccacuauacggcgucaucgacacuccgugcuggaaacuccacacaucaccccuauguacaaccaacacaaaagaaggcagcaacaucugccucacccgcaccgaccgagggugguauugcgauaacgcuggcagcgucuccuucuucccccaagccgaaaccugcaaaguccaaucaaacagaguauucugcgacaccaugaacucccuuacucucccuagcgaagucaaccucugcaacguugacauauucaaccccaaauacgacugcaaaaucaugaccuccaagaccgacgucuccuccuccgucaucacaucucuaggugccauugucuccugcuacggaaaaaccaaaugcacagccuccaacaaaaaccgcggcaucauaaaaaccuucuccaacggcugcgacuacgucaguaauaaaggcgucgacacgguauccguugggaauacgcuuuacuacguaaauaaacaagaaggcaaaucccucuacgucaaaggugaacccaucauaaacuucuacgacccgcuuguguucccauccgacgaguucgacgccagcaucagccaggucaacgaaaagaucaaccaaucccuagccuucauccgcaaaagcgacgaacuacuacacaacgucaacgccggaaaauccacaaccaacaucaugaucaccaccaucaucaucgucaucaucguaauccuacucucucucaucgccgucggccuccuacuguacuguaaagcccgauagggacuaguguccaccugucccuccugggcugcuggauugucucguuuuccugccaaauaaacaggaucagcgcuuuacagaucuaaaaaaaaaaaaaaaaaaaaaaaaaaaaaaaaaaaaaaaaaaaaaaaaaaaaaaaaaaaaaaaaugcaucccccccccccccccccccccccccccccccaaaggcucuuuucagagccaccagaauu

SEQ ID NO: 565 - RNA, 2002 nt, Artificial Sequence
  mRNA product Design b-4 comprising derived and/or modified sequence from HRSV(A2)__F-del (artificial)
gggagagucccgcagucggcguccagcggcucugcuuguucgugugugugucguugcaggccuuauucaagcuuaccauggaguugcuaauccucaaagcaaaugcaauuaccacaauccucacugcagucacauuuuguuuugcuucuggucaaaacaucacugaagaauuuuaucaaucaacaugcagugcaguuagcaaaggcuaucuuagugcucugagaacugguugguauaccaguguuauaacuauagaauuaaguaauaucaaggaaaauaaguguaauggaacagaugcuaagguaaaauugauaaaacaagaauuagauaaauauaaaaaugcuguaacagaauugcaguugcucaugcaaagcacaccagcaacaaacaaucgagccagaagagaacuaccaagguuuaugaauuauacacucaacaaugccaaaaaaaccaauguaacauuaagcaagaaaaggaaaagaagauuucuugguuuuuuguuagguguuggaucugcaaucgccaguggcguugcuguaucuaagguccugcaccuagaaggggaagugaacaagaucaaaagugcucuacuauccacaaacaaggcuguagucagcuuaucaaauggaguuagugucuuaaccagcaaaguguuagaccucaaaaacuauauagauaaacaauuguuaccuauugugaacaagcaaagcugcagcauaucaaauauagaaacugugauagaguuccaacaaaagaacaacagacuacuagagauuaccagggaauuuaguguuaaugcagguguaacuacaccuguaagcacuuacauguuaacuaauagugaauuauugucauuaaucaaugauaugccuauaacaaaugaucagaaaaaguuaauguccaacaauguucaaauaguuagacagcaaaguuacucuaucauguccauaauaaaagaggaagucuuagcauauguaguacaauuaccacuauaugguguuauagauacacccuguuggaaacuacacacauccccucuauguacaaccaacacaaaagaaggguccaacaucuguuuaacaagaacugacagaggaugguacugugacaaugcaggaucaguaucuuucuucccacaagcugaaacauguaaaguucaaucaaaucgaguauuuugugacacaaugaacaguuuaacauuaccaagugaaguaaaucucugcaauguugacauauucaaccccaaauaugauuguaaaauuaugacuucaaaaacagauguaagcagcuccguuaucacaucucuaggagccauugugucaugcuauggcaaaacuaaauguacagcauccaauaaaaaucguggaaucauaaagacauuuucuaacgggugcgauuauguaucaaauaaagggguggacacugugucuguagguaacacauuauauuauguaaauaagcaagaagguaaaagucucuauguaaaaggugaaccaauaauaaauuucuaugacccauuaguauuccccucugaugaauuugaugcaucaauaucucaagucaacgagaagauuaaccagagccuagcauuuauucguaaauccgaugaauuauuacauaauguaaaugcugguaaauccaccacaaauaucaugauaacuacuauaauuauagugauuauaguaauauuguuaucauuaauugcuguuggacugcucuuauacuguaaggccagauaaggacuaguaauaaggaaacuguaugaaugucugugggcaggaagugaagagauccuucuguaaagguuuuuggaauuaugucugcugaauaauaaacuuuuuugaaauaauaaaucugguagaaaaaugagaucuaaaaaaaaaaaaaaaaaaaaaaaaaaaaaaaaaaaaaaaaaaaaaaaaaaaaaaaaaaaaaaaaugcaucccccccccccccccccccccccccccccccaaaggcucuuuucagagccaccagaauu

SEQ ID NO: 566 - RNA, 2002 nt, Artificial Sequence
  mRNA product Design b-4 comprising derived and/or modified sequence from HRSV(A2)__F-del (opt1)
gggagagucccgcagucggcguccagcggcucugcuuguucgugugugugucguugcaggccuuauucaagcuuaccauggagcugcucauccugaaggccaacgccaucaccaccauccugacggcggugaccuucugcuucgccagcggccagaacaucaccgaggaguucuaccaguccaccugcagcgccgucuccaagggguaccucagcgcccugcggacgggcugguacaccuccgugaucaccaucgagcugagcaacaucaaggagaacaagugcaacgggaccgacgccaaggugaagcucaucaagcaggagcuggacaaguacaagaacgcggucacggagcugcagcuccugaugcaguccaccccggcaaccaacaaccgcgcccggcgcgagcugccccgguucaugaacuacacccucaacaacgccaagaagacgaacgugacccugagcaagaagcgcaagcggcgcuuccugggcuuccuccugggggugggcuccgccaucgcgagcggcgucgccguguccaaggugcugcaccucgagggggaggucaacaagaucaagagcgcccugcuguccaccaacaaggccguggugagccucuccaacggcgucagcgugcugaccuccaaggugcuggaccucaagaacuacaucgacaagcagcugcugcccaucgucaacaagcagagcugcuccaucagcaacaucgagacggugaucgaguuccagcagaagaacaaccggcuccuggagaucacccgcgaguucagcgugaacgccggggucaccacccccguguccacguacaugcugaccaacagcgagcuccugucccugaucaacgacaugccgaucaccaacgaccagaagaagcucaugagcaacaacgugcagaucguccggcagcaguccuacagcaucauguccaucaucaaggaggaggugcuggcguacgugguccagcugccccucuacggcgugaucgacacccccugcuggaagcugcacacgagcccccugugcaccaccaacaccaaggagggguccaacaucugccucacgcgcaccgaccggggcugguacugcgacaacgccggcagcgucuccuucuucccgcaggccgagaccugcaaggugcagagcaaccgcguguucugcgacaccaugaacucccugacgcugcccagcgagguaaaccucugcaacgucgacaucuucaaccccaaguacgacugcaagaucaugaccuccaagaccgacgugagcuccagcgugaucaccucccugggggccaucgucagcugcuacggcaagacgaagugcaccgccagcaacaagaaccgggggaucaucaagaccuucuccaacggcugcgacuacgugagcaacaagggcguggacaccguguccgucgggaacacccuguacuacgugaacaagcaggagggcaagagccucuacgugaagggggagcccaucaucaacuucuacgacccgcuggucuuccccuccgacgaguucgacgcgagcaucucccaggugaacgagaagaucaaccagagccuggccuucauccgcaaguccgacgagcugcuccacaacgugaacgccggcaagagcacgaccaacaucaugaucaccaccaucaucaucgucaucaucgugauccugcugucccucaucgccguggggcugcugcucuacugcaaggcccggugaggacuaguaauaaggaaacuguaugaaugucugugggcaggaagugaagagauccuucuguaaagguuuuuggaauuaugucugcugaauaauaaacuuuuuugaaauaauaaaucugguagaaaaaugagaucuaaaaaaaaaaaaaaaaaaaaaaaaaaaaaaaaaaaaaaaaaaaaaaaaaaaaaaaaaaaaaaaaugcaucccccccccccccccccccccccccccccccaaaggcucuuuucagagccaccagaauu

SEQ ID NO: 567 - RNA, 2002 nt, Artificial Sequence
  mRNA product Design b-4 comprising derived and/or modified sequence from HRSV(A2)__F-del (opt1)
gggagagucccgcagucggcguccagcggcucugcuuguucgugugugugucguugcaggccuuauucaagcuuaccauggagcugcucauccugaaggccaacgccaucaccaccauccugacggcggugaccuucugcuucgccagcggccagaacaucaccgaggaguucuaccaguccacgugcagcgccgucuccaagggguaccucagcgcccugcgcaccggcugguacaccuccgugaucaccaucgagcugagcaacaucaaggagaacaagugcaacgggaccgacgccaaggugaagcucaucaagcaggagcuggacaaguacaagaacgcggucacggagcugcagcuccugaugcaguccacccccgccaccaacaaccgggcccgccgggagcugccgcgcuucaugaacuacacccucaacaacgccaagaagacgaacgugacccugagcaagaagcggaagcgccgguuccugggcuuccuccugggggugggcuccgcgaucgccagcggcgucgccguguccaaggugcugcaccucgagggggaggucaacaagaucaagagcgcccugcuguccaccaacaaggccguggugagccucuccaacggcgucagcgugcugaccuccaaggugcuggaccucaagaacuacaucgacaagcagcugcugcccaucgucaacaagcagagcugcuccaucagcaacaucgagacggugaucgaguuccagcagaagaacaaccgccuccuggagaucacccgggaguucagcgugaacgcgggggucaccacccccguguccacguacaugcugaccaacagcgagcuccugucccugaucaacgacaugcccaucaccaacgaccagaagaagcucaugagcaacaacgugcagaucguccgccagcaguccuacagcaucauguccaucaucaaggaggaggugcuggccuacgugguccagcugccgcucuacggcgugaucgacacccccugcuggaagcugcacacgagcccccugugcaccaccaacaccaaggagggguccaacaucugccucacgcggaccgaccgcggcugguacugcgacaacgccggcagcgucuccuucuucccccaggccgagaccugcaaggugcagagcaaccggguguucugcgacaccaugaacucccugacgcugccgagcgaggucaaccucugcaacguggacaucuucaaccccaaguacgacugcaagaucaugaccuccaagaccgacgugagcuccagcgucaucaccucccugggggccaucgugagcugcuacggcaagacgaagugcaccgcgagcaacaagaaccgcgggaucaucaagaccuucuccaacggcugcgacuacgugagcaacaagggcgucgacaccguguccguggggaacacccuguacuacgucaacaagcaggagggcaagagccucuacgugaagggggagcccaucaucaacuucuacgacccccugguguucccguccgacgaguucgacgccagcaucucccaggucaacgagaagaucaaccagagccuggccuucauccggaaguccgacgagcuccugcacaacgugaacgccggcaagagcacgaccaacaucaugaucaccaccaucaucaucgugaucaucgucauccugcugucccucaucgccguggggcugcugcucuacugcaaggcgcgcugaggacuaguaauaaggaaacuguaugaaugucugugggcaggaagugaagagauccuucuguaaagguuuuuggaauuaugucugcugaauaauaaacuuuuuugaaauaauaaaucugguagaaaaaugagaucuaaaaaaaaaaaaaaaaaaaaaaaaaaaaaaaaaaaaaaaaaaaaaaaaaaaaaaaaaaaaaaaaugcaucccccccccccccccccccccccccccccccaaaggcucuuuucagagccaccagaauu

SEQ ID NO: 568 - RNA, 2002 nt, Artificial Sequence
  mRNA product Design b-4 comprising derived and/or modified sequence from HRSV(A2)__F-del (opt2)
gggagagucccgcagucggcguccagcggcucugcuuguucgugugugugucguugcaggccuuauucaagcuuaccauggagcuccucauccucaaggccaacgccaucaccaccauccucaccgccgucaccuucugcuucgccuccggccagaacaucaccgaggaguucuaccaguccaccugcuccgccgucuccaagggcuaccucuccgcccuccgcaccggcugguacaccuccgucaucaccaucgagcucuccaacaucaaggagaacaagugcaacggcaccgacgccaaggucaagcucaucaagcaggagcucgacaaguacaagaacgccgucaccgagcuccagcuccucaugcaguccacccccgccaccaacaaccgcgcccgccgcgagcucccccgcuucaugaacuacacccucaacaacgccaagaagaccaacgucacccucuccaagaagcgcaagcgccgcuuccucggcuuccuccucggcgucggcuccgccaucgccuccggcgucgccgucuccaagguccuccaccucgagggcgaggucaacaagaucaaguccgcccuccucuccaccaacaaggccgucgucucccucuccaacggcgucuccguccucaccuccaagguccucgaccucaagaacuacaucgacaagcagcuccuccccaucgucaacaagcaguccugcuccaucuccaacaucgagaccgucaucgaguuccagcagaagaacaaccgccuccucgagaucacccgcgaguucuccgucaacgccggcgucaccacccccgucuccaccuacaugcucaccaacuccgagcuccucucccucaucaacgacaugcccaucaccaacgaccagaagaagcucauguccaacaacguccagaucguccgccagcaguccuacuccaucauguccaucaucaaggaggagguccucgccuacgucguccagcucccccucuacggcgucaucgacacccccugcuggaagcuccacaccuccccccucugcaccaccaacaccaaggagggcuccaacaucugccucacccgcaccgaccgcggcugguacugcgacaacgccggcuccgucuccuucuucccccaggccgagaccugcaagguccaguccaaccgcgucuucugcgacaccaugaacucccucacccuccccuccgaggucaaccucugcaacgucgacaucuucaaccccaaguacgacugcaagaucaugaccuccaagaccgacgucuccuccuccgucaucaccucccucggcgccaucgucuccugcuacggcaagaccaagugcaccgccuccaacaagaaccgcggcaucaucaagaccuucuccaacggcugcgacuacgucuccaacaagggcgucgacaccgucuccgucggcaacacccucuacuacgucaacaagcaggagggcaagucccucuacgucaagggcgagcccaucaucaacuucuacgacccccucgucuuccccuccgacgaguucgacgccuccaucucccaggucaacgagaagaucaaccagucccucgccuucauccgcaaguccgacgagcuccuccacaacgucaacgccggcaaguccaccaccaacaucaugaucaccaccaucaucaucgucaucaucgucauccuccucucccucaucgccgucggccuccuccucuacugcaaggcccgcugaggacuaguaauaaggaaacuguaugaaugucugugggcaggaagugaagagauccuucuguaaagguuuuuggaauuaugucugcugaauaauaaacuuuuuugaaauaauaaaucugguagaaaaaugagaucuaaaaaaaaaaaaaaaaaaaaaaaaaaaaaaaaaaaaaaaaaaaaaaaaaaaaaaaaaaaaaaaaugcaucccccccccccccccccccccccccccccccaaaggcucuuuucagagccaccagaauu

SEQ ID NO: 569 - RNA, 2002 nt, Artificial Sequence
  mRNA product Design b-4 comprising derived and/or modified sequence from HRSV(A2)__F-del (opt3)
gggagagucccgcagucggcguccagcggcucugcuuguucgugugugugucguugcaggccuuauucaagcuuaccauggagcugcucauccuuaaggccaacgcuauuaccacaauacugacugcagugacguucugcuuugccagcggccagaauaucaccgaagaguucuaccaauccacauguucugcggucucaaaaggguauuugagugcuuuaagaacuggaugguacaccagcguuauuacaaucgaacuguccaacauuaaggagaauaaaugcaacgguaccgacgccaaggugaaacuaaucaagcaggaacucgauaaguauaaaaaugcaguaacugagcugcagcuucugaugcagucuacacccgccaccaacaauagggcucggcgcgaguugccucgauuuaugaacuacacgcucaauaacgcaaagaaaacuaaugugacccugucgaagaaacguaagagaagguuccugggcuuucucuuaggggucggaucagccauagcuagcggcguggccguuaguaaggugcugcaccuugaaggugaggucaacaaaaucaaguccgcguugcugucuacaaauaaagcagugguaagccuauccaacgggguuucagugcucacuucuaagguccuggaccuuaaaaauuauauugauaagcaacuguugccaaucgugaacaaacagagcuguucuauuuccaacaucgaaaccgugauagaguuccagcagaagaauaaccggcuccuggagauuacacgcgaauuuucagucaaugccggaguuaccacgccggugagcacuuacauguuaacaaacagugagcugcucucucuuaucaaugacaugcccauuaccaacgaucaaaagaaacugauguccaauaacguacagaucgugagacagcagagcuauucgaucaugucuauuauaaaggaagaggucuuggcuuacgugguucaacuaccucuguacggcgugaucgacacuccaugcuggaaacuccauacauccccacuguguaccacgaauaccaaggaaggcucaaacauuugccuuacaaggacugaucgggggugguauugugacaaugccggaagugucagcuucuuuccucaggcagagaccugcaaagugcaguccaaccgcguauucugugauacaaugaauagucugacuuugccaagcgagguuaaccucugcaauguggacaucuuuaaccccaaguacgauuguaagauaaugaccucaaaaacagacgucaguuccagcgugauuaccucucugggugcuaucgucucaugcuauggcaagacuaaaugcacggccaguaacaagaaucgagggaucauuaaaacauucagcaacggaugugauuacguguccaauaagggcguugacaccgugucuguagguaacacuuuauauuacgucaauaagcaagaagggaaaucgcuguaugugaagggagagccuaucauuaacuuuuacgacccccuaguuuucccgagcgaugaauuugacgcguccauaucacaggugaaugagaaaaucaaccagagucucgccuucauuagaaagucugaugaacugcuucacaaugucaacgcaggcaaaagcaccacaaauaucaugaucaccacuauuauaaucgugauuaucguaauuuugcugucccucaucgcugugggccugcuucuguacugcaaggccaggugaggacuaguaauaaggaaacuguaugaaugucugugggcaggaagugaagagauccuucuguaaagguuuuuggaauuaugucugcugaauaauaaacuuuuuugaaauaauaaaucugguagaaaaaugagaucuaaaaaaaaaaaaaaaaaaaaaaaaaaaaaaaaaaaaaaaaaaaaaaaaaaaaaaaaaaaaaaaaugcaucccccccccccccccccccccccccccccccaaaggcucuuuucagagccaccagaauu

SEQ ID NO: 570 - RNA, 2002 nt, Artificial Sequence
  mRNA product Design b-4 comprising derived and/or modified sequence from HRSV(A2)__F-del (opt4)
gggagagucccgcagucggcguccagcggcucugcuuguucgugugugugucguugcaggccuuauucaagcuuaccauggagcugcugauccugaaggccaacgccaucaccaccauccugaccgccgugaccuucugcuucgccagcggccagaacaucaccgaggaguucuaccagagcaccugcagcgccgugagcaagggcuaccugagcgcccugagaaccggcugguacaccagcgugaucaccaucgagcugagcaacaucaaggagaacaagugcaacggcaccgacgccaaggugaagcugaucaagcaggagcuggacaaguacaagaacgccgugaccgagcugcagcugcugaugcagagcacccccgccaccaacaacagagccagaagagagcugcccagauucaugaacuacacccugaacaacgccaagaagaccaacgugacccugagcaagaagagaaagagaagauuccugggcuuccugcugggcgugggcagcgccaucgccagcggcguggccgugagcaaggugcugcaccuggagggcgaggugaacaagaucaagagcgcccugcugagcaccaacaaggccguggugagccugagcaacggcgugagcgugcugaccagcaaggugcuggaccugaagaacuacaucgacaagcagcugcugcccaucgugaacaagcagagcugcagcaucagcaacaucgagaccgugaucgaguuccagcagaagaacaacagacugcuggagaucaccagagaguucagcgugaacgccggcgugaccacccccgugagcaccuacaugcugaccaacagcgagcugcugagccugaucaacgacaugcccaucaccaacgaccagaagaagcugaugagcaacaacgugcagaucgugagacagcagagcuacagcaucaugagcaucaucaaggaggaggugcuggccuacguggugcagcugccccuguacggcgugaucgacacccccugcuggaagcugcacaccagcccccugugcaccaccaacaccaaggagggcagcaacaucugccugaccagaaccgacagaggcugguacugcgacaacgccggcagcgugagcuucuucccccaggccgagaccugcaaggugcagagcaacagaguguucugcgacaccaugaacagccugacccugcccagcgaggugaaccugugcaacguggacaucuucaaccccaaguacgacugcaagaucaugaccagcaagaccgacgugagcagcagcgugaucaccagccugggcgccaucgugagcugcuacggcaagaccaagugcaccgccagcaacaagaacagaggcaucaucaagaccuucagcaacggcugcgacuacgugagcaacaagggcguggacaccgugagcgugggcaacacccuguacuacgugaacaagcaggagggcaagagccuguacgugaagggcgagcccaucaucaacuucuacgacccccugguguuccccagcgacgaguucgacgccagcaucagccaggugaacgagaagaucaaccagagccuggccuucaucagaaagagcgacgagcugcugcacaacgugaacgccggcaagagcaccaccaacaucaugaucaccaccaucaucaucgugaucaucgugauccugcugagccugaucgccgugggccugcugcuguacugcaaggccagaugaggacuaguaauaaggaaacuguaugaaugucugugggcaggaagugaagagauccuucuguaaagguuuuuggaauuaugucugcugaauaauaaacuuuuuugaaauaauaaaucugguagaaaaaugagaucuaaaaaaaaaaaaaaaaaaaaaaaaaaaaaaaaaaaaaaaaaaaaaaaaaaaaaaaaaaaaaaaaugcaucccccccccccccccccccccccccccccccaaaggcucuuuucagagccaccagaauu

SEQ ID NO: 571 - RNA, 2002 nt, Artificial Sequence
  mRNA product Design b-4 comprising derived and/or modified sequence from HRSV(A2)__F-del (opt5)
gggagagucccgcagucggcguccagcggcucugcuuguucgugugugugucguugcaggccuuauucaagcuuaccauggagcugcucauccugaaggccaacgcuauuaccacaauccuuacggccgugaccuucugcuuugcgagcggccagaauauuacagaagaguucuaccaauccaccuguucugcugucagcaaaggguaucuguccgcccucagaacaggaugguacaccucuguuaucacaauugaacugagcaacaucaaggagaauaaaugcaacggcaccgacgccaaggugaaacuuaucaagcaggaacuggauaaguauaaaaaugcugugacggagcuccagcugcugaugcaguccacccccgccacaaacaaucgggcucgcagagagcucccucgguuuaugaacuacacccugaauaacgccaagaaaacaaaugucacccuuucuaagaaacgcaagagacgguuccugggguuucuccugggagugggcagcgcgauugccuccgggguugcugugagcaagguccuucaccuggaaggagaggugaacaaaaucaagucugcccuccuguccacgaauaaagcuguugugagccugucuaacggcgucuccgugcucacaagcaaggugcuggaccuuaaaaauuauauugauaagcaacugcucccgaucgucaacaaacagucuuguuccauuagcaacaucgaaaccguuauugaguuccagcagaagaauaaccgccugcuugagaucacaagagaauuuuccgugaaugccggcgugaccacccccgucucuacauacaugcugacgaacagcgagcuccugucccugaucaaugacaugccuauuaccaacgaucaaaagaaacucaugagcaauaacgugcagaucguucggcagcagucuuauuccauuaugagcaucauuaaggaagaggugcuggcguacgucgugcaacuuccccuguacgggguuaucgacacaccuugcuggaaacuccauaccucuccccuguguacaaccaauacgaaggaaggaagcaacaucugccuuacacgcaccgauagaggcugguauugugacaaugccggguccgugucuuucuuuccucaggcugagaccugcaaaguccagagcaaccggguguucugugauacaaugaacucccugacccucccgagcgaggucaaucugugcaauguggacauuuuuaaccccaaguacgauuguaagaucaugacaucuaaaacggacguuuccagcucugugauuaccucccugggagccaucgucagcugcuauggcaagacaaaaugcaccgcuuccaacaagaaucgcgggauuaucaaaacauucucuaacggaugugauuacgugagcaauaagggcguugacaccguguccgucggcaacacgcucuauuacgugaauaagcaagaagggaaaucucuguaugugaagggagagccuaucauuaacuuuuacgacccccuuguuuucccuagcgaugaauuugacgccuccaucagccaggucaaugagaaaauuaaccagucucuggccuucaucagaaaguccgaugaacuccugcacaaugugaacgcuggcaaaagcaccacaaauauuaugaucaccacaauuaucaucgugauuaucgucauucugcuuucucucaucgcgguggggcugcugcucuacugcaaggcccggugaggacuaguaauaaggaaacuguaugaaugucugugggcaggaagugaagagauccuucuguaaagguuuuuggaauuaugucugcugaauaauaaacuuuuuugaaauaauaaaucugguagaaaaaugagaucuaaaaaaaaaaaaaaaaaaaaaaaaaaaaaaaaaaaaaaaaaaaaaaaaaaaaaaaaaaaaaaaaugcaucccccccccccccccccccccccccccccccaaaggcucuuuucagagccaccagaauu

SEQ ID NO: 572 - RNA, 2002 nt, Artificial Sequence
  mRNA product Design b-4 comprising derived and/or modified sequence from HRSV(A2)__F-del (opt6)
gggagagucccgcagucggcguccagcggcucugcuuguucgugugugugucguugcaggccuuauucaagcuuaccauggaauuacuaauacucaaagccaacgcaauaacaacaauacuaacagcaguaacauucugcuucgcaucaggacaaaacaucacagaagaauuuuaccaaaguacaugcagugcagucucuaaaggauaccucagugccuuacgcacaggaugguacacaucaguaauaacaaucgaacuuucaaacauaaaagaaaacaaaugcaauggaaccgacgccaaaguaaaacuaaucaaacaagaacuagacaaauauaaaaaugcaguaacagaauuacaacuccuaaugcaauccacaccagcaacaaauaacagagcaagacgagaacucccucgauucaugaauuacacauuaaacaacgcaaaaaaaacuaacguaacuuuaucaaaaaaaagaaaacguagauuucuaggauuccuacuaggcguaggguccgccauugcaucaggaguagcaguuagcaaaguauuacauuuagaaggagaaguaaauaaaaucaaaagcgcacuacucucaaccaacaaagcaguaguaucacucucaaacggaguaucaguacuaacauccaaaguacucgaccucaaaaacuacauagacaaacaauuacuacccauaguaaacaaacaaucaugcucuauaucaaauaucgaaacaguaaucgaauuucaacaaaaaaacaaucgacuacuugaaauaacaagagaguucuccgucaaugccggagucaccacaccagucucaacauacaugcuaaccaacucugaacuccuaucacuaauaaaugacaugccaauaacaaacgaccaaaaaaaacuaaugucaaauaacguacaaauaguacgacaacaaaguuauuccauaaugaguauaaucaaagaagaaguguuagcauacguaguccaacuaccauuauauggaguaauagacacaccauguuggaaauuacacaccucaccacucugcacuaccaauacaaaagaaggcucaaauauaugccuaacucgcacagacagaggcugguacugcgauaacgcaggauccguaucuuucuuuccccaagcagaaacuugcaaaguacaaucaaacagagucuucugcgacaccaugaauagucucacauuaccaucugaaguaaaccuauguaacguagauauauucaauccaaaauacgacugcaaaauaaugacaucaaaaaccgacgucucuagcaguguaaucacaucacuaggagcaauaguaagcugcuauggaaaaacaaaauguacagcaucaaacaaaaacaggggaauaauaaaaaccuucucaaacggaugugacuacguaucaaauaaaggcguagacacaguaagcguaggaaacacccuauacuacguuaacaaacaagaagggaaaucauuauacguaaaaggagaaccaauaauaaacuucuacgauccacucguauucccauccgacgaauuugacgccagcauaucccaaguuaacgaaaaaauaaaccaaucacuugcauuuauacgaaaaucugaugaacuucuccacaacguaaaugcaggaaaauccaccaccaauauaaugaucacaacuaucaucauaguaauaaucgucauuuuacuaucauuaauagcaguuggccuacuucuauacugcaaagcaagauaaggacuaguaauaaggaaacuguaugaaugucugugggcaggaagugaagagauccuucuguaaagguuuuuggaauuaugucugcugaauaauaaacuuuuuugaaauaauaaaucugguagaaaaaugagaucuaaaaaaaaaaaaaaaaaaaaaaaaaaaaaaaaaaaaaaaaaaaaaaaaaaaaaaaaaaaaaaaaugcaucccccccccccccccccccccccccccccccaaaggcucuuuucagagccaccagaauu

SEQ ID NO: 573 - RNA, 2002 nt, Artificial Sequence
  mRNA product Design b-4 comprising derived and/or modified sequence from HRSV(A2)__F-del (opt11)
gggagagucccgcagucggcguccagcggcucugcuuguucgugugugugucguugcaggccuuauucaagcuuaccauggaacuacuaauccuaaaagccaacgcgaucaccaccauccuaacggcagucaccuucugcuucgcaucaggccaaaacaucacagaagaguucuaccaaagcacaugcuccgccguauccaaaggcuaccucagcgcccuacgcacaggcugguacacaucugucaucaccauagaacucuccaacaucaaagaaaacaaaugcaacggcacugacgccaaaguaaagcugaucaaacaagaacucgacaaauacaaaaacgcagucaccgaacuccaacuacucaugcaauccaccccugcaaccaacaacagggcccgccgcgaacucccccgcuucaugaacuacacuuuaaacaacgccaaaaagaccaacgucacacucagcaagaaacggaaacgacgauuccuaggguuucuccuaggcgucggcucggcaaucgccuccggcgucgccguaagcaaaguacuacaccuagaaggcgaagugaacaaaaucaaaagugcccuucucuccaccaacaaggccguagucucucuauccaacggagucucaguccucaccucaaagguccucgaccucaaaaacuacaucgacaaacaacuacuccccauugucaacaagcagucaugcuccauaucaaacaucgaaaccgucaucgaguuccaacagaaaaacaaccgacuccucgaaauaaccagagaguucucggucaacgccggcgucaccaccccagucagcaccuacaugcucacuaacuccgaacuccuaucccucaucaacgacaugccaauuaccaacgaccaaaagaaacuaaugucgaacaacguucaaaucguccgacaacaaaguuacuccaucaugagcauaaucaaagaagaaguucuagcguacgucguccaacucccacuauacggcgucaucgacacuccgugcuggaaacuccacacaucaccccuauguacaaccaacacaaaagaaggcagcaacaucugccucacccgcaccgaccgagggugguauugcgauaacgcuggcagcgucuccuucuucccccaagccgaaaccugcaaaguccaaucaaacagaguauucugcgacaccaugaacucccuuacucucccuagcgaagucaaccucugcaacguugacauauucaaccccaaauacgacugcaaaaucaugaccuccaagaccgacgucuccuccuccgucaucacaucucuaggugccauugucuccugcuacggaaaaaccaaaugcacagccuccaacaaaaaccgcggcaucauaaaaaccuucuccaacggcugcgacuacgucaguaauaaaggcgucgacacgguauccguugggaauacgcuuuacuacguaaauaaacaagaaggcaaaucccucuacgucaaaggugaacccaucauaaacuucuacgacccgcuuguguucccauccgacgaguucgacgccagcaucagccaggucaacgaaaagaucaaccaaucccuagccuucauccgcaaaagcgacgaacuacuacacaacgucaacgccggaaaauccacaaccaacaucaugaucaccaccaucaucaucgucaucaucguaauccuacucucucucaucgccgucggccuccuacuguacuguaaagcccgauagggacuaguaauaaggaaacuguaugaaugucugugggcaggaagugaagagauccuucuguaaagguuuuuggaauuaugucugcugaauaauaaacuuuuuugaaauaauaaaucugguagaaaaaugagaucuaaaaaaaaaaaaaaaaaaaaaaaaaaaaaaaaaaaaaaaaaaaaaaaaaaaaaaaaaaaaaaaaugcaucccccccccccccccccccccccccccccccaaaggcucuuuucagagccaccagaauu

SEQ ID NO: 574 - RNA, 2064 nt, Artificial Sequence
  mRNA product Design b-5 comprising derived and/or modified sequence from HRSV(A2)__F-del (artificial)
gggagacuccugucgggcggaaguaggaggaguagaguuuaaaaacaguacucuuuuuccgguucgggacguaguugaagcaacgacaagccggauaaccgcucuugagacaggaagcuuaccauggaguugcuaauccucaaagcaaaugcaauuaccacaauccucacugcagucacauuuuguuuugcuucuggucaaaacaucacugaagaauuuuaucaaucaacaugcagugcaguuagcaaaggcuaucuuagugcucugagaacugguugguauaccaguguuauaacuauagaauuaaguaauaucaaggaaaauaaguguaauggaacagaugcuaagguaaaauugauaaaacaagaauuagauaaauauaaaaaugcuguaacagaauugcaguugcucaugcaaagcacaccagcaacaaacaaucgagccagaagagaacuaccaagguuuaugaauuauacacucaacaaugccaaaaaaaccaauguaacauuaagcaagaaaaggaaaagaagauuucuugguuuuuuguuagguguuggaucugcaaucgccaguggcguugcuguaucuaagguccugcaccuagaaggggaagugaacaagaucaaaagugcucuacuauccacaaacaaggcuguagucagcuuaucaaauggaguuagugucuuaaccagcaaaguguuagaccucaaaaacuauauagauaaacaauuguuaccuauugugaacaagcaaagcugcagcauaucaaauauagaaacugugauagaguuccaacaaaagaacaacagacuacuagagauuaccagggaauuuaguguuaaugcagguguaacuacaccuguaagcacuuacauguuaacuaauagugaauuauugucauuaaucaaugauaugccuauaacaaaugaucagaaaaaguuaauguccaacaauguucaaauaguuagacagcaaaguuacucuaucauguccauaauaaaagaggaagucuuagcauauguaguacaauuaccacuauaugguguuauagauacacccuguuggaaacuacacacauccccucuauguacaaccaacacaaaagaaggguccaacaucuguuuaacaagaacugacagaggaugguacugugacaaugcaggaucaguaucuuucuucccacaagcugaaacauguaaaguucaaucaaaucgaguauuuugugacacaaugaacaguuuaacauuaccaagugaaguaaaucucugcaauguugacauauucaaccccaaauaugauuguaaaauuaugacuucaaaaacagauguaagcagcuccguuaucacaucucuaggagccauugugucaugcuauggcaaaacuaaauguacagcauccaauaaaaaucguggaaucauaaagacauuuucuaacgggugcgauuauguaucaaauaaagggguggacacugugucuguagguaacacauuauauuauguaaauaagcaagaagguaaaagucucuauguaaaaggugaaccaauaauaaauuucuaugacccauuaguauuccccucugaugaauuugaugcaucaauaucucaagucaacgagaagauuaaccagagccuagcauuuauucguaaauccgaugaauuauuacauaauguaaaugcugguaaauccaccacaaauaucaugauaacuacuauaauuauagugauuauaguaauauuguuaucauuaauugcuguuggacugcucuuauacuguaaggccagauaaggacuaguacuggcugcaucucccuuuccucuguccuccauccuucucccaggauggugaagggggaccugguacccagugauccccaccccaggauccuaaaucaugacuuaccugcuaauaaaaacucauuggaaaagugagaagaucuaaaaaaaaaaaaaaaaaaaaaaaaaaaaaaaaaaaaaaaaaaaaaaaaaaaaaaaaaaaaaaaaugcaucccccccccccccccccccccccccccccccaaaggcucuuuucagagccaccagaauu

SEQ ID NO: 575 - RNA, 2064 nt, Artificial Sequence
  mRNA product Design b-5 comprising derived and/or modified sequence from HRSV(A2)__F-del (opt1)
gggagacuccugucgggcggaaguaggaggaguagaguuuaaaaacaguacucuuuuuccgguucgggacguaguugaagcaacgacaagccggauaaccgcucuugagacaggaagcuuaccauggagcugcucauccugaaggccaacgccaucaccaccauccugacggcggugaccuucugcuucgccagcggccagaacaucaccgaggaguucuaccaguccaccugcagcgccgucuccaagggguaccucagcgcccugcggacgggcugguacaccuccgugaucaccaucgagcugagcaacaucaaggagaacaagugcaacgggaccgacgccaaggugaagcucaucaagcaggagcuggacaaguacaagaacgcggucacggagcugcagcuccugaugcaguccaccccggcaaccaacaaccgcgcccggcgcgagcugccccgguucaugaacuacacccucaacaacgccaagaagacgaacgugacccugagcaagaagcgcaagcggcgcuuccugggcuuccuccugggggugggcuccgccaucgcgagcggcgucgccguguccaaggugcugcaccucgagggggaggucaacaagaucaagagcgcccugcuguccaccaacaaggccguggugagccucuccaacggcgucagcgugcugaccuccaaggugcuggaccucaagaacuacaucgacaagcagcugcugcccaucgucaacaagcagagcugcuccaucagcaacaucgagacggugaucgaguuccagcagaagaacaaccggcuccuggagaucacccgcgaguucagcgugaacgccggggucaccacccccguguccacguacaugcugaccaacagcgagcuccugucccugaucaacgacaugccgaucaccaacgaccagaagaagcucaugagcaacaacgugcagaucguccggcagcaguccuacagcaucauguccaucaucaaggaggaggugcuggcguacgugguccagcugccccucuacggcgugaucgacacccccugcuggaagcugcacacgagcccccugugcaccaccaacaccaaggagggguccaacaucugccucacgcgcaccgaccggggcugguacugcgacaacgccggcagcgucuccuucuucccgcaggccgagaccugcaaggugcagagcaaccgcguguucugcgacaccaugaacucccugacgcugcccagcgagguaaaccucugcaacgucgacaucuucaaccccaaguacgacugcaagaucaugaccuccaagaccgacgugagcuccagcgugaucaccucccugggggccaucgucagcugcuacggcaagacgaagugcaccgccagcaacaagaaccgggggaucaucaagaccuucuccaacggcugcgacuacgugagcaacaagggcguggacaccguguccgucgggaacacccuguacuacgugaacaagcaggagggcaagagccucuacgugaagggggagcccaucaucaacuucuacgacccgcuggucuuccccuccgacgaguucgacgcgagcaucucccaggugaacgagaagaucaaccagagccuggccuucauccgcaaguccgacgagcugcuccacaacgugaacgccggcaagagcacgaccaacaucaugaucaccaccaucaucaucgucaucaucgugauccugcugucccucaucgccguggggcugcugcucuacugcaaggcccggugaggacuaguacuggcugcaucucccuuuccucuguccuccauccuucucccaggauggugaagggggaccugguacccagugauccccaccccaggauccuaaaucaugacuuaccugcuaauaaaaacucauuggaaaagugagaagaucuaaaaaaaaaaaaaaaaaaaaaaaaaaaaaaaaaaaaaaaaaaaaaaaaaaaaaaaaaaaaaaaaugcaucccccccccccccccccccccccccccccccaaaggcucuuuucagagccaccagaauu

SEQ ID NO: 576 - RNA, 2064 nt, Artificial Sequence
  mRNA product Design b-5 comprising derived and/or modified sequence from HRSV(A2)__F-del (opt1)
gggagacuccugucgggcggaaguaggaggaguagaguuuaaaaacaguacucuuuuuccgguucgggacguaguugaagcaacgacaagccggauaaccgcucuugagacaggaagcuuaccauggagcugcucauccugaaggccaacgccaucaccaccauccugacggcggugaccuucugcuucgccagcggccagaacaucaccgaggaguucuaccaguccacgugcagcgccgucuccaagggguaccucagcgcccugcgcaccggcugguacaccuccgugaucaccaucgagcugagcaacaucaaggagaacaagugcaacgggaccgacgccaaggugaagcucaucaagcaggagcuggacaaguacaagaacgcggucacggagcugcagcuccugaugcaguccacccccgccaccaacaaccgggcccgccgggagcugccgcgcuucaugaacuacacccucaacaacgccaagaagacgaacgugacccugagcaagaagcggaagcgccgguuccugggcuuccuccugggggugggcuccgcgaucgccagcggcgucgccguguccaaggugcugcaccucgagggggaggucaacaagaucaagagcgcccugcuguccaccaacaaggccguggugagccucuccaacggcgucagcgugcugaccuccaaggugcuggaccucaagaacuacaucgacaagcagcugcugcccaucgucaacaagcagagcugcuccaucagcaacaucgagacggugaucgaguuccagcagaagaacaaccgccuccuggagaucacccgggaguucagcgugaacgcgggggucaccacccccguguccacguacaugcugaccaacagcgagcuccugucccugaucaacgacaugcccaucaccaacgaccagaagaagcucaugagcaacaacgugcagaucguccgccagcaguccuacagcaucauguccaucaucaaggaggaggugcuggccuacgugguccagcugccgcucuacggcgugaucgacacccccugcuggaagcugcacacgagcccccugugcaccaccaacaccaaggagggguccaacaucugccucacgcggaccgaccgcggcugguacugcgacaacgccggcagcgucuccuucuucccccaggccgagaccugcaaggugcagagcaaccggguguucugcgacaccaugaacucccugacgcugccgagcgaggucaaccucugcaacguggacaucuucaaccccaaguacgacugcaagaucaugaccuccaagaccgacgugagcuccagcgucaucaccucccugggggccaucgugagcugcuacggcaagacgaagugcaccgcgagcaacaagaaccgcgggaucaucaagaccuucuccaacggcugcgacuacgugagcaacaagggcgucgacaccguguccguggggaacacccuguacuacgucaacaagcaggagggcaagagccucuacgugaagggggagcccaucaucaacuucuacgacccccugguguucccguccgacgaguucgacgccagcaucucccaggucaacgagaagaucaaccagagccuggccuucauccggaaguccgacgagcuccugcacaacgugaacgccggcaagagcacgaccaacaucaugaucaccaccaucaucaucgugaucaucgucauccugcugucccucaucgccguggggcugcugcucuacugcaaggcgcgcugaggacuaguacuggcugcaucucccuuuccucuguccuccauccuucucccaggauggugaagggggaccugguacccagugauccccaccccaggauccuaaaucaugacuuaccugcuaauaaaaacucauuggaaaagugagaagaucuaaaaaaaaaaaaaaaaaaaaaaaaaaaaaaaaaaaaaaaaaaaaaaaaaaaaaaaaaaaaaaaaugcaucccccccccccccccccccccccccccccccaaaggcucuuuucagagccaccagaauu

SEQ ID NO: 577 - RNA, 2064 nt, Artificial Sequence
  mRNA product Design b-5 comprising derived and/or modified sequence from HRSV(A2)__F-del (opt2)
gggagacuccugucgggcggaaguaggaggaguagaguuuaaaaacaguacucuuuuuccgguucgggacguaguugaagcaacgacaagccggauaaccgcucuugagacaggaagcuuaccauggagcuccucauccucaaggccaacgccaucaccaccauccucaccgccgucaccuucugcuucgccuccggccagaacaucaccgaggaguucuaccaguccaccugcuccgccgucuccaagggcuaccucuccgcccuccgcaccggcugguacaccuccgucaucaccaucgagcucuccaacaucaaggagaacaagugcaacggcaccgacgccaaggucaagcucaucaagcaggagcucgacaaguacaagaacgccgucaccgagcuccagcuccucaugcaguccacccccgccaccaacaaccgcgcccgccgcgagcucccccgcuucaugaacuacacccucaacaacgccaagaagaccaacgucacccucuccaagaagcgcaagcgccgcuuccucggcuuccuccucggcgucggcuccgccaucgccuccggcgucgccgucuccaagguccuccaccucgagggcgaggucaacaagaucaaguccgcccuccucuccaccaacaaggccgucgucucccucuccaacggcgucuccguccucaccuccaagguccucgaccucaagaacuacaucgacaagcagcuccuccccaucgucaacaagcaguccugcuccaucuccaacaucgagaccgucaucgaguuccagcagaagaacaaccgccuccucgagaucacccgcgaguucuccgucaacgccggcgucaccacccccgucuccaccuacaugcucaccaacuccgagcuccucucccucaucaacgacaugcccaucaccaacgaccagaagaagcucauguccaacaacguccagaucguccgccagcaguccuacuccaucauguccaucaucaaggaggagguccucgccuacgucguccagcucccccucuacggcgucaucgacacccccugcuggaagcuccacaccuccccccucugcaccaccaacaccaaggagggcuccaacaucugccucacccgcaccgaccgcggcugguacugcgacaacgccggcuccgucuccuucuucccccaggccgagaccugcaagguccaguccaaccgcgucuucugcgacaccaugaacucccucacccuccccuccgaggucaaccucugcaacgucgacaucuucaaccccaaguacgacugcaagaucaugaccuccaagaccgacgucuccuccuccgucaucaccucccucggcgccaucgucuccugcuacggcaagaccaagugcaccgccuccaacaagaaccgcggcaucaucaagaccuucuccaacggcugcgacuacgucuccaacaagggcgucgacaccgucuccgucggcaacacccucuacuacgucaacaagcaggagggcaagucccucuacgucaagggcgagcccaucaucaacuucuacgacccccucgucuuccccuccgacgaguucgacgccuccaucucccaggucaacgagaagaucaaccagucccucgccuucauccgcaaguccgacgagcuccuccacaacgucaacgccggcaaguccaccaccaacaucaugaucaccaccaucaucaucgucaucaucgucauccuccucucccucaucgccgucggccuccuccucuacugcaaggcccgcugaggacuaguacuggcugcaucucccuuuccucuguccuccauccuucucccaggauggugaagggggaccugguacccagugauccccaccccaggauccuaaaucaugacuuaccugcuaauaaaaacucauuggaaaagugagaagaucuaaaaaaaaaaaaaaaaaaaaaaaaaaaaaaaaaaaaaaaaaaaaaaaaaaaaaaaaaaaaaaaaugcaucccccccccccccccccccccccccccccccaaaggcucuuuucagagccaccagaauu

SEQ ID NO: 578 - RNA, 2064 nt, Artificial Sequence
  mRNA product Design b-5 comprising derived and/or modified sequence from HRSV(A2)__F-del (opt3)
gggagacuccugucgggcggaaguaggaggaguagaguuuaaaaacaguacucuuuuuccgguucgggacguaguugaagcaacgacaagccggauaaccgcucuugagacaggaagcuuaccauggagcugcucauccuuaaggccaacgcuauuaccacaauacugacugcagugacguucugcuuugccagcggccagaauaucaccgaagaguucuaccaauccacauguucugcggucucaaaaggguauuugagugcuuuaagaacuggaugguacaccagcguuauuacaaucgaacuguccaacauuaaggagaauaaaugcaacgguaccgacgccaaggugaaacuaaucaagcaggaacucgauaaguauaaaaaugcaguaacugagcugcagcuucugaugcagucuacacccgccaccaacaauagggcucggcgcgaguugccucgauuuaugaacuacacgcucaauaacgcaaagaaaacuaaugugacccugucgaagaaacguaagagaagguuccugggcuuucucuuaggggucggaucagccauagcuagcggcguggccguuaguaaggugcugcaccuugaaggugaggucaacaaaaucaaguccgcguugcugucuacaaauaaagcagugguaagccuauccaacgggguuucagugcucacuucuaagguccuggaccuuaaaaauuauauugauaagcaacuguugccaaucgugaacaaacagagcuguucuauuuccaacaucgaaaccgugauagaguuccagcagaagaauaaccggcuccuggagauuacacgcgaauuuucagucaaugccggaguuaccacgccggugagcacuuacauguuaacaaacagugagcugcucucucuuaucaaugacaugcccauuaccaacgaucaaaagaaacugauguccaauaacguacagaucgugagacagcagagcuauucgaucaugucuauuauaaaggaagaggucuuggcuuacgugguucaacuaccucuguacggcgugaucgacacuccaugcuggaaacuccauacauccccacuguguaccacgaauaccaaggaaggcucaaacauuugccuuacaaggacugaucgggggugguauugugacaaugccggaagugucagcuucuuuccucaggcagagaccugcaaagugcaguccaaccgcguauucugugauacaaugaauagucugacuuugccaagcgagguuaaccucugcaauguggacaucuuuaaccccaaguacgauuguaagauaaugaccucaaaaacagacgucaguuccagcgugauuaccucucugggugcuaucgucucaugcuauggcaagacuaaaugcacggccaguaacaagaaucgagggaucauuaaaacauucagcaacggaugugauuacguguccaauaagggcguugacaccgugucuguagguaacacuuuauauuacgucaauaagcaagaagggaaaucgcuguaugugaagggagagccuaucauuaacuuuuacgacccccuaguuuucccgagcgaugaauuugacgcguccauaucacaggugaaugagaaaaucaaccagagucucgccuucauuagaaagucugaugaacugcuucacaaugucaacgcaggcaaaagcaccacaaauaucaugaucaccacuauuauaaucgugauuaucguaauuuugcugucccucaucgcugugggccugcuucuguacugcaaggccaggugaggacuaguacuggcugcaucucccuuuccucuguccuccauccuucucccaggauggugaagggggaccugguacccagugauccccaccccaggauccuaaaucaugacuuaccugcuaauaaaaacucauuggaaaagugagaagaucuaaaaaaaaaaaaaaaaaaaaaaaaaaaaaaaaaaaaaaaaaaaaaaaaaaaaaaaaaaaaaaaaugcaucccccccccccccccccccccccccccccccaaaggcucuuuucagagccaccagaauu

SEQ ID NO: 579 - RNA, 2064 nt, Artificial Sequence
  mRNA product Design b-5 comprising derived and/or modified sequence from HRSV(A2)__F-del (opt4)
gggagacuccugucgggcggaaguaggaggaguagaguuuaaaaacaguacucuuuuuccgguucgggacguaguugaagcaacgacaagccggauaaccgcucuugagacaggaagcuuaccauggagcugcugauccugaaggccaacgccaucaccaccauccugaccgccgugaccuucugcuucgccagcggccagaacaucaccgaggaguucuaccagagcaccugcagcgccgugagcaagggcuaccugagcgcccugagaaccggcugguacaccagcgugaucaccaucgagcugagcaacaucaaggagaacaagugcaacggcaccgacgccaaggugaagcugaucaagcaggagcuggacaaguacaagaacgccgugaccgagcugcagcugcugaugcagagcacccccgccaccaacaacagagccagaagagagcugcccagauucaugaacuacacccugaacaacgccaagaagaccaacgugacccugagcaagaagagaaagagaagauuccugggcuuccugcugggcgugggcagcgccaucgccagcggcguggccgugagcaaggugcugcaccuggagggcgaggugaacaagaucaagagcgcccugcugagcaccaacaaggccguggugagccugagcaacggcgugagcgugcugaccagcaaggugcuggaccugaagaacuacaucgacaagcagcugcugcccaucgugaacaagcagagcugcagcaucagcaacaucgagaccgugaucgaguuccagcagaagaacaacagacugcuggagaucaccagagaguucagcgugaacgccggcgugaccacccccgugagcaccuacaugcugaccaacagcgagcugcugagccugaucaacgacaugcccaucaccaacgaccagaagaagcugaugagcaacaacgugcagaucgugagacagcagagcuacagcaucaugagcaucaucaaggaggaggugcuggccuacguggugcagcugccccuguacggcgugaucgacacccccugcuggaagcugcacaccagcccccugugcaccaccaacaccaaggagggcagcaacaucugccugaccagaaccgacagaggcugguacugcgacaacgccggcagcgugagcuucuucccccaggccgagaccugcaaggugcagagcaacagaguguucugcgacaccaugaacagccugacccugcccagcgaggugaaccugugcaacguggacaucuucaaccccaaguacgacugcaagaucaugaccagcaagaccgacgugagcagcagcgugaucaccagccugggcgccaucgugagcugcuacggcaagaccaagugcaccgccagcaacaagaacagaggcaucaucaagaccuucagcaacggcugcgacuacgugagcaacaagggcguggacaccgugagcgugggcaacacccuguacuacgugaacaagcaggagggcaagagccuguacgugaagggcgagcccaucaucaacuucuacgacccccugguguuccccagcgacgaguucgacgccagcaucagccaggugaacgagaagaucaaccagagccuggccuucaucagaaagagcgacgagcugcugcacaacgugaacgccggcaagagcaccaccaacaucaugaucaccaccaucaucaucgugaucaucgugauccugcugagccugaucgccgugggccugcugcuguacugcaaggccagaugaggacuaguacuggcugcaucucccuuuccucuguccuccauccuucucccaggauggugaagggggaccugguacccagugauccccaccccaggauccuaaaucaugacuuaccugcuaauaaaaacucauuggaaaagugagaagaucuaaaaaaaaaaaaaaaaaaaaaaaaaaaaaaaaaaaaaaaaaaaaaaaaaaaaaaaaaaaaaaaaugcaucccccccccccccccccccccccccccccccaaaggcucuuuucagagccaccagaauu

SEQ ID NO: 580 - RNA, 2064 nt, Artificial Sequence
  mRNA product Design b-5 comprising derived and/or modified sequence from HRSV(A2)__F-del (opt5)
gggagacuccugucgggcggaaguaggaggaguagaguuuaaaaacaguacucuuuuuccgguucgggacguaguugaagcaacgacaagccggauaaccgcucuugagacaggaagcuuaccauggagcugcucauccugaaggccaacgcuauuaccacaauccuuacggccgugaccuucugcuuugcgagcggccagaauauuacagaagaguucuaccaauccaccuguucugcugucagcaaaggguaucuguccgcccucagaacaggaugguacaccucuguuaucacaauugaacugagcaacaucaaggagaauaaaugcaacggcaccgacgccaaggugaaacuuaucaagcaggaacuggauaaguauaaaaaugcugugacggagcuccagcugcugaugcaguccacccccgccacaaacaaucgggcucgcagagagcucccucgguuuaugaacuacacccugaauaacgccaagaaaacaaaugucacccuuucuaagaaacgcaagagacgguuccugggguuucuccugggagugggcagcgcgauugccuccgggguugcugugagcaagguccuucaccuggaaggagaggugaacaaaaucaagucugcccuccuguccacgaauaaagcuguugugagccugucuaacggcgucuccgugcucacaagcaaggugcuggaccuuaaaaauuauauugauaagcaacugcucccgaucgucaacaaacagucuuguuccauuagcaacaucgaaaccguuauugaguuccagcagaagaauaaccgccugcuugagaucacaagagaauuuuccgugaaugccggcgugaccacccccgucucuacauacaugcugacgaacagcgagcuccugucccugaucaaugacaugccuauuaccaacgaucaaaagaaacucaugagcaauaacgugcagaucguucggcagcagucuuauuccauuaugagcaucauuaaggaagaggugcuggcguacgucgugcaacuuccccuguacgggguuaucgacacaccuugcuggaaacuccauaccucuccccuguguacaaccaauacgaaggaaggaagcaacaucugccuuacacgcaccgauagaggcugguauugugacaaugccggguccgugucuuucuuuccucaggcugagaccugcaaaguccagagcaaccggguguucugugauacaaugaacucccugacccucccgagcgaggucaaucugugcaauguggacauuuuuaaccccaaguacgauuguaagaucaugacaucuaaaacggacguuuccagcucugugauuaccucccugggagccaucgucagcugcuauggcaagacaaaaugcaccgcuuccaacaagaaucgcgggauuaucaaaacauucucuaacggaugugauuacgugagcaauaagggcguugacaccguguccgucggcaacacgcucuauuacgugaauaagcaagaagggaaaucucuguaugugaagggagagccuaucauuaacuuuuacgacccccuuguuuucccuagcgaugaauuugacgccuccaucagccaggucaaugagaaaauuaaccagucucuggccuucaucagaaaguccgaugaacuccugcacaaugugaacgcuggcaaaagcaccacaaauauuaugaucaccacaauuaucaucgugauuaucgucauucugcuuucucucaucgcgguggggcugcugcucuacugcaaggcccggugaggacuaguacuggcugcaucucccuuuccucuguccuccauccuucucccaggauggugaagggggaccugguacccagugauccccaccccaggauccuaaaucaugacuuaccugcuaauaaaaacucauuggaaaagugagaagaucuaaaaaaaaaaaaaaaaaaaaaaaaaaaaaaaaaaaaaaaaaaaaaaaaaaaaaaaaaaaaaaaaugcaucccccccccccccccccccccccccccccccaaaggcucuuuucagagccaccagaauu

SEQ ID NO: 581 - RNA, 2064 nt, Artificial Sequence
  mRNA product Design b-5 comprising derived and/or modified sequence from HRSV(A2)__F-del (opt6)
gggagacuccugucgggcggaaguaggaggaguagaguuuaaaaacaguacucuuuuuccgguucgggacguaguugaagcaacgacaagccggauaaccgcucuugagacaggaagcuuaccauggaauuacuaauacucaaagccaacgcaauaacaacaauacuaacagcaguaacauucugcuucgcaucaggacaaaacaucacagaagaauuuuaccaaaguacaugcagugcagucucuaaaggauaccucagugccuuacgcacaggaugguacacaucaguaauaacaaucgaacuuucaaacauaaaagaaaacaaaugcaauggaaccgacgccaaaguaaaacuaaucaaacaagaacuagacaaauauaaaaaugcaguaacagaauuacaacuccuaaugcaauccacaccagcaacaaauaacagagcaagacgagaacucccucgauucaugaauuacacauuaaacaacgcaaaaaaaacuaacguaacuuuaucaaaaaaaagaaaacguagauuucuaggauuccuacuaggcguaggguccgccauugcaucaggaguagcaguuagcaaaguauuacauuuagaaggagaaguaaauaaaaucaaaagcgcacuacucucaaccaacaaagcaguaguaucacucucaaacggaguaucaguacuaacauccaaaguacucgaccucaaaaacuacauagacaaacaauuacuacccauaguaaacaaacaaucaugcucuauaucaaauaucgaaacaguaaucgaauuucaacaaaaaaacaaucgacuacuugaaauaacaagagaguucuccgucaaugccggagucaccacaccagucucaacauacaugcuaaccaacucugaacuccuaucacuaauaaaugacaugccaauaacaaacgaccaaaaaaaacuaaugucaaauaacguacaaauaguacgacaacaaaguuauuccauaaugaguauaaucaaagaagaaguguuagcauacguaguccaacuaccauuauauggaguaauagacacaccauguuggaaauuacacaccucaccacucugcacuaccaauacaaaagaaggcucaaauauaugccuaacucgcacagacagaggcugguacugcgauaacgcaggauccguaucuuucuuuccccaagcagaaacuugcaaaguacaaucaaacagagucuucugcgacaccaugaauagucucacauuaccaucugaaguaaaccuauguaacguagauauauucaauccaaaauacgacugcaaaauaaugacaucaaaaaccgacgucucuagcaguguaaucacaucacuaggagcaauaguaagcugcuauggaaaaacaaaauguacagcaucaaacaaaaacaggggaauaauaaaaaccuucucaaacggaugugacuacguaucaaauaaaggcguagacacaguaagcguaggaaacacccuauacuacguuaacaaacaagaagggaaaucauuauacguaaaaggagaaccaauaauaaacuucuacgauccacucguauucccauccgacgaauuugacgccagcauaucccaaguuaacgaaaaaauaaaccaaucacuugcauuuauacgaaaaucugaugaacuucuccacaacguaaaugcaggaaaauccaccaccaauauaaugaucacaacuaucaucauaguaauaaucgucauuuuacuaucauuaauagcaguuggccuacuucuauacugcaaagcaagauaaggacuaguacuggcugcaucucccuuuccucuguccuccauccuucucccaggauggugaagggggaccugguacccagugauccccaccccaggauccuaaaucaugacuuaccugcuaauaaaaacucauuggaaaagugagaagaucuaaaaaaaaaaaaaaaaaaaaaaaaaaaaaaaaaaaaaaaaaaaaaaaaaaaaaaaaaaaaaaaaugcaucccccccccccccccccccccccccccccccaaaggcucuuuucagagccaccagaauu

SEQ ID NO: 582 - RNA, 2064 nt, Artificial Sequence
  mRNA product Design b-5 comprising derived and/or modified sequence from HRSV(A2)__F-del (opt11)
gggagacuccugucgggcggaaguaggaggaguagaguuuaaaaacaguacucuuuuuccgguucgggacguaguugaagcaacgacaagccggauaaccgcucuugagacaggaagcuuaccauggaacuacuaauccuaaaagccaacgcgaucaccaccauccuaacggcagucaccuucugcuucgcaucaggccaaaacaucacagaagaguucuaccaaagcacaugcuccgccguauccaaaggcuaccucagcgcccuacgcacaggcugguacacaucugucaucaccauagaacucuccaacaucaaagaaaacaaaugcaacggcacugacgccaaaguaaagcugaucaaacaagaacucgacaaauacaaaaacgcagucaccgaacuccaacuacucaugcaauccaccccugcaaccaacaacagggcccgccgcgaacucccccgcuucaugaacuacacuuuaaacaacgccaaaaagaccaacgucacacucagcaagaaacggaaacgacgauuccuaggguuucuccuaggcgucggcucggcaaucgccuccggcgucgccguaagcaaaguacuacaccuagaaggcgaagugaacaaaaucaaaagugcccuucucuccaccaacaaggccguagucucucuauccaacggagucucaguccucaccucaaagguccucgaccucaaaaacuacaucgacaaacaacuacuccccauugucaacaagcagucaugcuccauaucaaacaucgaaaccgucaucgaguuccaacagaaaaacaaccgacuccucgaaauaaccagagaguucucggucaacgccggcgucaccaccccagucagcaccuacaugcucacuaacuccgaacuccuaucccucaucaacgacaugccaauuaccaacgaccaaaagaaacuaaugucgaacaacguucaaaucguccgacaacaaaguuacuccaucaugagcauaaucaaagaagaaguucuagcguacgucguccaacucccacuauacggcgucaucgacacuccgugcuggaaacuccacacaucaccccuauguacaaccaacacaaaagaaggcagcaacaucugccucacccgcaccgaccgagggugguauugcgauaacgcuggcagcgucuccuucuucccccaagccgaaaccugcaaaguccaaucaaacagaguauucugcgacaccaugaacucccuuacucucccuagcgaagucaaccucugcaacguugacauauucaaccccaaauacgacugcaaaaucaugaccuccaagaccgacgucuccuccuccgucaucacaucucuaggugccauugucuccugcuacggaaaaaccaaaugcacagccuccaacaaaaaccgcggcaucauaaaaaccuucuccaacggcugcgacuacgucaguaauaaaggcgucgacacgguauccguugggaauacgcuuuacuacguaaauaaacaagaaggcaaaucccucuacgucaaaggugaacccaucauaaacuucuacgacccgcuuguguucccauccgacgaguucgacgccagcaucagccaggucaacgaaaagaucaaccaaucccuagccuucauccgcaaaagcgacgaacuacuacacaacgucaacgccggaaaauccacaaccaacaucaugaucaccaccaucaucaucgucaucaucguaauccuacucucucucaucgccgucggccuccuacuguacuguaaagcccgauagggacuaguacuggcugcaucucccuuuccucuguccuccauccuucucccaggauggugaagggggaccugguacccagugauccccaccccaggauccuaaaucaugacuuaccugcuaauaaaaacucauuggaaaagugagaagaucuaaaaaaaaaaaaaaaaaaaaaaaaaaaaaaaaaaaaaaaaaaaaaaaaaaaaaaaaaaaaaaaaugcaucccccccccccccccccccccccccccccccaaaggcucuuuucagagccaccagaauu

SEQ ID NO: 583 - RNA, 1970 nt, Artificial Sequence
  mRNA product Design c-1 comprising derived and/or modified sequence from HRSV(A2)__F-del (artificial)
gggagaguccgcucagccagguugcagaagcggcuuagcguguguccuaaucuucucucugcguguagguaggccugugccgcaaacaagcuuaccauggaguugcuaauccucaaagcaaaugcaauuaccacaauccucacugcagucacauuuuguuuugcuucuggucaaaacaucacugaagaauuuuaucaaucaacaugcagugcaguuagcaaaggcuaucuuagugcucugagaacugguugguauaccaguguuauaacuauagaauuaaguaauaucaaggaaaauaaguguaauggaacagaugcuaagguaaaauugauaaaacaagaauuagauaaauauaaaaaugcuguaacagaauugcaguugcucaugcaaagcacaccagcaacaaacaaucgagccagaagagaacuaccaagguuuaugaauuauacacucaacaaugccaaaaaaaccaauguaacauuaagcaagaaaaggaaaagaagauuucuugguuuuuuguuagguguuggaucugcaaucgccaguggcguugcuguaucuaagguccugcaccuagaaggggaagugaacaagaucaaaagugcucuacuauccacaaacaaggcuguagucagcuuaucaaauggaguuagugucuuaaccagcaaaguguuagaccucaaaaacuauauagauaaacaauuguuaccuauugugaacaagcaaagcugcagcauaucaaauauagaaacugugauagaguuccaacaaaagaacaacagacuacuagagauuaccagggaauuuaguguuaaugcagguguaacuacaccuguaagcacuuacauguuaacuaauagugaauuauugucauuaaucaaugauaugccuauaacaaaugaucagaaaaaguuaauguccaacaauguucaaauaguuagacagcaaaguuacucuaucauguccauaauaaaagaggaagucuuagcauauguaguacaauuaccacuauaugguguuauagauacacccuguuggaaacuacacacauccccucuauguacaaccaacacaaaagaaggguccaacaucuguuuaacaagaacugacagaggaugguacugugacaaugcaggaucaguaucuuucuucccacaagcugaaacauguaaaguucaaucaaaucgaguauuuugugacacaaugaacaguuuaacauuaccaagugaaguaaaucucugcaauguugacauauucaaccccaaauaugauuguaaaauuaugacuucaaaaacagauguaagcagcuccguuaucacaucucuaggagccauugugucaugcuauggcaaaacuaaauguacagcauccaauaaaaaucguggaaucauaaagacauuuucuaacgggugcgauuauguaucaaauaaagggguggacacugugucuguagguaacacauuauauuauguaaauaagcaagaagguaaaagucucuauguaaaaggugaaccaauaauaaauuucuaugacccauuaguauuccccucugaugaauuugaugcaucaauaucucaagucaacgagaagauuaaccagagccuagcauuuauucguaaauccgaugaauuauuacauaauguaaaugcugguaaauccaccacaaauaucaugauaacuacuauaauuauagugauuauaguaauauuguuaucauuaauugcuguuggacugcucuuauacuguaaggccagauaaggacuaguguccaccugucccuccugggcugcuggauugucucguuuuccugccaaauaaacaggaucagcgcuuuacagaucuaaaaaaaaaaaaaaaaaaaaaaaaaaaaaaaaaaaaaaaaaaaaaaaaaaaaaaaaaaaaaaaaugcaucccccccccccccccccccccccccccccccaaaggcucuuuucagagccaccagaauu

SEQ ID NO: 584 - RNA, 1970 nt, Artificial Sequence
  mRNA product Design c-1 comprising derived and/or modified sequence from HRSV(A2)__F-del (opt1)
gggagaguccgcucagccagguugcagaagcggcuuagcguguguccuaaucuucucucugcguguagguaggccugugccgcaaacaagcuuaccauggagcugcucauccugaaggccaacgccaucaccaccauccugacggcggugaccuucugcuucgccagcggccagaacaucaccgaggaguucuaccaguccaccugcagcgccgucuccaagggguaccucagcgcccugcggacgggcugguacaccuccgugaucaccaucgagcugagcaacaucaaggagaacaagugcaacgggaccgacgccaaggugaagcucaucaagcaggagcuggacaaguacaagaacgcggucacggagcugcagcuccugaugcaguccaccccggcaaccaacaaccgcgcccggcgcgagcugccccgguucaugaacuacacccucaacaacgccaagaagacgaacgugacccugagcaagaagcgcaagcggcgcuuccugggcuuccuccugggggugggcuccgccaucgcgagcggcgucgccguguccaaggugcugcaccucgagggggaggucaacaagaucaagagcgcccugcuguccaccaacaaggccguggugagccucuccaacggcgucagcgugcugaccuccaaggugcuggaccucaagaacuacaucgacaagcagcugcugcccaucgucaacaagcagagcugcuccaucagcaacaucgagacggugaucgaguuccagcagaagaacaaccggcuccuggagaucacccgcgaguucagcgugaacgccggggucaccacccccguguccacguacaugcugaccaacagcgagcuccugucccugaucaacgacaugccgaucaccaacgaccagaagaagcucaugagcaacaacgugcagaucguccggcagcaguccuacagcaucauguccaucaucaaggaggaggugcuggcguacgugguccagcugccccucuacggcgugaucgacacccccugcuggaagcugcacacgagcccccugugcaccaccaacaccaaggagggguccaacaucugccucacgcgcaccgaccggggcugguacugcgacaacgccggcagcgucuccuucuucccgcaggccgagaccugcaaggugcagagcaaccgcguguucugcgacaccaugaacucccugacgcugcccagcgagguaaaccucugcaacgucgacaucuucaaccccaaguacgacugcaagaucaugaccuccaagaccgacgugagcuccagcgugaucaccucccugggggccaucgucagcugcuacggcaagacgaagugcaccgccagcaacaagaaccgggggaucaucaagaccuucuccaacggcugcgacuacgugagcaacaagggcguggacaccguguccgucgggaacacccuguacuacgugaacaagcaggagggcaagagccucuacgugaagggggagcccaucaucaacuucuacgacccgcuggucuuccccuccgacgaguucgacgcgagcaucucccaggugaacgagaagaucaaccagagccuggccuucauccgcaaguccgacgagcugcuccacaacgugaacgccggcaagagcacgaccaacaucaugaucaccaccaucaucaucgucaucaucgugauccugcugucccucaucgccguggggcugcugcucuacugcaaggcccggugaggacuaguguccaccugucccuccugggcugcuggauugucucguuuuccugccaaauaaacaggaucagcgcuuuacagaucuaaaaaaaaaaaaaaaaaaaaaaaaaaaaaaaaaaaaaaaaaaaaaaaaaaaaaaaaaaaaaaaaugcaucccccccccccccccccccccccccccccccaaaggcucuuuucagagccaccagaauu

SEQ ID NO: 585 - RNA, 1970 nt, Artificial Sequence
  mRNA product Design c-1 comprising derived and/or modified sequence from HRSV(A2)__F-del (opt1)
gggagaguccgcucagccagguugcagaagcggcuuagcguguguccuaaucuucucucugcguguagguaggccugugccgcaaacaagcuuaccauggagcugcucauccugaaggccaacgccaucaccaccauccugacggcggugaccuucugcuucgccagcggccagaacaucaccgaggaguucuaccaguccacgugcagcgccgucuccaagggguaccucagcgcccugcgcaccggcugguacaccuccgugaucaccaucgagcugagcaacaucaaggagaacaagugcaacgggaccgacgccaaggugaagcucaucaagcaggagcuggacaaguacaagaacgcggucacggagcugcagcuccugaugcaguccacccccgccaccaacaaccgggcccgccgggagcugccgcgcuucaugaacuacacccucaacaacgccaagaagacgaacgugacccugagcaagaagcggaagcgccgguuccugggcuuccuccugggggugggcuccgcgaucgccagcggcgucgccguguccaaggugcugcaccucgagggggaggucaacaagaucaagagcgcccugcuguccaccaacaaggccguggugagccucuccaacggcgucagcgugcugaccuccaaggugcuggaccucaagaacuacaucgacaagcagcugcugcccaucgucaacaagcagagcugcuccaucagcaacaucgagacggugaucgaguuccagcagaagaacaaccgccuccuggagaucacccgggaguucagcgugaacgcgggggucaccacccccguguccacguacaugcugaccaacagcgagcuccugucccugaucaacgacaugcccaucaccaacgaccagaagaagcucaugagcaacaacgugcagaucguccgccagcaguccuacagcaucauguccaucaucaaggaggaggugcuggccuacgugguccagcugccgcucuacggcgugaucgacacccccugcuggaagcugcacacgagcccccugugcaccaccaacaccaaggagggguccaacaucugccucacgcggaccgaccgcggcugguacugcgacaacgccggcagcgucuccuucuucccccaggccgagaccugcaaggugcagagcaaccggguguucugcgacaccaugaacucccugacgcugccgagcgaggucaaccucugcaacguggacaucuucaaccccaaguacgacugcaagaucaugaccuccaagaccgacgugagcuccagcgucaucaccucccugggggccaucgugagcugcuacggcaagacgaagugcaccgcgagcaacaagaaccgcgggaucaucaagaccuucuccaacggcugcgacuacgugagcaacaagggcgucgacaccguguccguggggaacacccuguacuacgucaacaagcaggagggcaagagccucuacgugaagggggagcccaucaucaacuucuacgacccccugguguucccguccgacgaguucgacgccagcaucucccaggucaacgagaagaucaaccagagccuggccuucauccggaaguccgacgagcuccugcacaacgugaacgccggcaagagcacgaccaacaucaugaucaccaccaucaucaucgugaucaucgucauccugcugucccucaucgccguggggcugcugcucuacugcaaggcgcgcugaggacuaguguccaccugucccuccugggcugcuggauugucucguuuuccugccaaauaaacaggaucagcgcuuuacagaucuaaaaaaaaaaaaaaaaaaaaaaaaaaaaaaaaaaaaaaaaaaaaaaaaaaaaaaaaaaaaaaaaugcaucccccccccccccccccccccccccccccccaaaggcucuuuucagagccaccagaauu

SEQ ID NO: 586 - RNA, 1970 nt, Artificial Sequence
  mRNA product Design c-1 comprising derived and/or modified sequence from HRSV(A2)__F-del (opt2)
gggagaguccgcucagccagguugcagaagcggcuuagcguguguccuaaucuucucucugcguguagguaggccugugccgcaaacaagcuuaccauggagcuccucauccucaaggccaacgccaucaccaccauccucaccgccgucaccuucugcuucgccuccggccagaacaucaccgaggaguucuaccaguccaccugcuccgccgucuccaagggcuaccucuccgcccuccgcaccggcugguacaccuccgucaucaccaucgagcucuccaacaucaaggagaacaagugcaacggcaccgacgccaaggucaagcucaucaagcaggagcucgacaaguacaagaacgccgucaccgagcuccagcuccucaugcaguccacccccgccaccaacaaccgcgcccgccgcgagcucccccgcuucaugaacuacacccucaacaacgccaagaagaccaacgucacccucuccaagaagcgcaagcgccgcuuccucggcuuccuccucggcgucggcuccgccaucgccuccggcgucgccgucuccaagguccuccaccucgagggcgaggucaacaagaucaaguccgcccuccucuccaccaacaaggccgucgucucccucuccaacggcgucuccguccucaccuccaagguccucgaccucaagaacuacaucgacaagcagcuccuccccaucgucaacaagcaguccugcuccaucuccaacaucgagaccgucaucgaguuccagcagaagaacaaccgccuccucgagaucacccgcgaguucuccgucaacgccggcgucaccacccccgucuccaccuacaugcucaccaacuccgagcuccucucccucaucaacgacaugcccaucaccaacgaccagaagaagcucauguccaacaacguccagaucguccgccagcaguccuacuccaucauguccaucaucaaggaggagguccucgccuacgucguccagcucccccucuacggcgucaucgacacccccugcuggaagcuccacaccuccccccucugcaccaccaacaccaaggagggcuccaacaucugccucacccgcaccgaccgcggcugguacugcgacaacgccggcuccgucuccuucuucccccaggccgagaccugcaagguccaguccaaccgcgucuucugcgacaccaugaacucccucacccuccccuccgaggucaaccucugcaacgucgacaucuucaaccccaaguacgacugcaagaucaugaccuccaagaccgacgucuccuccuccgucaucaccucccucggcgccaucgucuccugcuacggcaagaccaagugcaccgccuccaacaagaaccgcggcaucaucaagaccuucuccaacggcugcgacuacgucuccaacaagggcgucgacaccgucuccgucggcaacacccucuacuacgucaacaagcaggagggcaagucccucuacgucaagggcgagcccaucaucaacuucuacgacccccucgucuuccccuccgacgaguucgacgccuccaucucccaggucaacgagaagaucaaccagucccucgccuucauccgcaaguccgacgagcuccuccacaacgucaacgccggcaaguccaccaccaacaucaugaucaccaccaucaucaucgucaucaucgucauccuccucucccucaucgccgucggccuccuccucuacugcaaggcccgcugaggacuaguguccaccugucccuccugggcugcuggauugucucguuuuccugccaaauaaacaggaucagcgcuuuacagaucuaaaaaaaaaaaaaaaaaaaaaaaaaaaaaaaaaaaaaaaaaaaaaaaaaaaaaaaaaaaaaaaaugcaucccccccccccccccccccccccccccccccaaaggcucuuuucagagccaccagaauu

SEQ ID NO: 587 - RNA, 1970 nt, Artificial Sequence
  mRNA product Design c-1 comprising derived and/or modified sequence from HRSV(A2)__F-del (opt3)
gggagaguccgcucagccagguugcagaagcggcuuagcguguguccuaaucuucucucugcguguagguaggccugugccgcaaacaagcuuaccauggagcugcucauccuuaaggccaacgcuauuaccacaauacugacugcagugacguucugcuuugccagcggccagaauaucaccgaagaguucuaccaauccacauguucugcggucucaaaaggguauuugagugcuuuaagaacuggaugguacaccagcguuauuacaaucgaacuguccaacauuaaggagaauaaaugcaacgguaccgacgccaaggugaaacuaaucaagcaggaacucgauaaguauaaaaaugcaguaacugagcugcagcuucugaugcagucuacacccgccaccaacaauagggcucggcgcgaguugccucgauuuaugaacuacacgcucaauaacgcaaagaaaacuaaugugacccugucgaagaaacguaagagaagguuccugggcuuucucuuaggggucggaucagccauagcuagcggcguggccguuaguaaggugcugcaccuugaaggugaggucaacaaaaucaaguccgcguugcugucuacaaauaaagcagugguaagccuauccaacgggguuucagugcucacuucuaagguccuggaccuuaaaaauuauauugauaagcaacuguugccaaucgugaacaaacagagcuguucuauuuccaacaucgaaaccgugauagaguuccagcagaagaauaaccggcuccuggagauuacacgcgaauuuucagucaaugccggaguuaccacgccggugagcacuuacauguuaacaaacagugagcugcucucucuuaucaaugacaugcccauuaccaacgaucaaaagaaacugauguccaauaacguacagaucgugagacagcagagcuauucgaucaugucuauuauaaaggaagaggucuuggcuuacgugguucaacuaccucuguacggcgugaucgacacuccaugcuggaaacuccauacauccccacuguguaccacgaauaccaaggaaggcucaaacauuugccuuacaaggacugaucgggggugguauugugacaaugccggaagugucagcuucuuuccucaggcagagaccugcaaagugcaguccaaccgcguauucugugauacaaugaauagucugacuuugccaagcgagguuaaccucugcaauguggacaucuuuaaccccaaguacgauuguaagauaaugaccucaaaaacagacgucaguuccagcgugauuaccucucugggugcuaucgucucaugcuauggcaagacuaaaugcacggccaguaacaagaaucgagggaucauuaaaacauucagcaacggaugugauuacguguccaauaagggcguugacaccgugucuguagguaacacuuuauauuacgucaauaagcaagaagggaaaucgcuguaugugaagggagagccuaucauuaacuuuuacgacccccuaguuuucccgagcgaugaauuugacgcguccauaucacaggugaaugagaaaaucaaccagagucucgccuucauuagaaagucugaugaacugcuucacaaugucaacgcaggcaaaagcaccacaaauaucaugaucaccacuauuauaaucgugauuaucguaauuuugcugucccucaucgcugugggccugcuucuguacugcaaggccaggugaggacuaguguccaccugucccuccugggcugcuggauugucucguuuuccugccaaauaaacaggaucagcgcuuuacagaucuaaaaaaaaaaaaaaaaaaaaaaaaaaaaaaaaaaaaaaaaaaaaaaaaaaaaaaaaaaaaaaaaugcaucccccccccccccccccccccccccccccccaaaggcucuuuucagagccaccagaauu

SEQ ID NO: 588 - RNA, 1970 nt, Artificial Sequence
  mRNA product Design c-1 comprising derived and/or modified sequence from HRSV(A2)__F-del (opt4)
gggagaguccgcucagccagguugcagaagcggcuuagcguguguccuaaucuucucucugcguguagguaggccugugccgcaaacaagcuuaccauggagcugcugauccugaaggccaacgccaucaccaccauccugaccgccgugaccuucugcuucgccagcggccagaacaucaccgaggaguucuaccagagcaccugcagcgccgugagcaagggcuaccugagcgcccugagaaccggcugguacaccagcgugaucaccaucgagcugagcaacaucaaggagaacaagugcaacggcaccgacgccaaggugaagcugaucaagcaggagcuggacaaguacaagaacgccgugaccgagcugcagcugcugaugcagagcacccccgccaccaacaacagagccagaagagagcugcccagauucaugaacuacacccugaacaacgccaagaagaccaacgugacccugagcaagaagagaaagagaagauuccugggcuuccugcugggcgugggcagcgccaucgccagcggcguggccgugagcaaggugcugcaccuggagggcgaggugaacaagaucaagagcgcccugcugagcaccaacaaggccguggugagccugagcaacggcgugagcgugcugaccagcaaggugcuggaccugaagaacuacaucgacaagcagcugcugcccaucgugaacaagcagagcugcagcaucagcaacaucgagaccgugaucgaguuccagcagaagaacaacagacugcuggagaucaccagagaguucagcgugaacgccggcgugaccacccccgugagcaccuacaugcugaccaacagcgagcugcugagccugaucaacgacaugcccaucaccaacgaccagaagaagcugaugagcaacaacgugcagaucgugagacagcagagcuacagcaucaugagcaucaucaaggaggaggugcuggccuacguggugcagcugccccuguacggcgugaucgacacccccugcuggaagcugcacaccagcccccugugcaccaccaacaccaaggagggcagcaacaucugccugaccagaaccgacagaggcugguacugcgacaacgccggcagcgugagcuucuucccccaggccgagaccugcaaggugcagagcaacagaguguucugcgacaccaugaacagccugacccugcccagcgaggugaaccugugcaacguggacaucuucaaccccaaguacgacugcaagaucaugaccagcaagaccgacgugagcagcagcgugaucaccagccugggcgccaucgugagcugcuacggcaagaccaagugcaccgccagcaacaagaacagaggcaucaucaagaccuucagcaacggcugcgacuacgugagcaacaagggcguggacaccgugagcgugggcaacacccuguacuacgugaacaagcaggagggcaagagccuguacgugaagggcgagcccaucaucaacuucuacgacccccugguguuccccagcgacgaguucgacgccagcaucagccaggugaacgagaagaucaaccagagccuggccuucaucagaaagagcgacgagcugcugcacaacgugaacgccggcaagagcaccaccaacaucaugaucaccaccaucaucaucgugaucaucgugauccugcugagccugaucgccgugggccugcugcuguacugcaaggccagaugaggacuaguguccaccugucccuccugggcugcuggauugucucguuuuccugccaaauaaacaggaucagcgcuuuacagaucuaaaaaaaaaaaaaaaaaaaaaaaaaaaaaaaaaaaaaaaaaaaaaaaaaaaaaaaaaaaaaaaaugcaucccccccccccccccccccccccccccccccaaaggcucuuuucagagccaccagaauu

SEQ ID NO: 589 - RNA, 1970 nt, Artificial Sequence
  mRNA product Design c-1 comprising derived and/or modified sequence from HRSV(A2)__F-del (opt5)
gggagaguccgcucagccagguugcagaagcggcuuagcguguguccuaaucuucucucugcguguagguaggccugugccgcaaacaagcuuaccauggagcugcucauccugaaggccaacgcuauuaccacaauccuuacggccgugaccuucugcuuugcgagcggccagaauauuacagaagaguucuaccaauccaccuguucugcugucagcaaaggguaucuguccgcccucagaacaggaugguacaccucuguuaucacaauugaacugagcaacaucaaggagaauaaaugcaacggcaccgacgccaaggugaaacuuaucaagcaggaacuggauaaguauaaaaaugcugugacggagcuccagcugcugaugcaguccacccccgccacaaacaaucgggcucgcagagagcucccucgguuuaugaacuacacccugaauaacgccaagaaaacaaaugucacccuuucuaagaaacgcaagagacgguuccugggguuucuccugggagugggcagcgcgauugccuccgggguugcugugagcaagguccuucaccuggaaggagaggugaacaaaaucaagucugcccuccuguccacgaauaaagcuguugugagccugucuaacggcgucuccgugcucacaagcaaggugcuggaccuuaaaaauuauauugauaagcaacugcucccgaucgucaacaaacagucuuguuccauuagcaacaucgaaaccguuauugaguuccagcagaagaauaaccgccugcuugagaucacaagagaauuuuccgugaaugccggcgugaccacccccgucucuacauacaugcugacgaacagcgagcuccugucccugaucaaugacaugccuauuaccaacgaucaaaagaaacucaugagcaauaacgugcagaucguucggcagcagucuuauuccauuaugagcaucauuaaggaagaggugcuggcguacgucgugcaacuuccccuguacgggguuaucgacacaccuugcuggaaacuccauaccucuccccuguguacaaccaauacgaaggaaggaagcaacaucugccuuacacgcaccgauagaggcugguauugugacaaugccggguccgugucuuucuuuccucaggcugagaccugcaaaguccagagcaaccggguguucugugauacaaugaacucccugacccucccgagcgaggucaaucugugcaauguggacauuuuuaaccccaaguacgauuguaagaucaugacaucuaaaacggacguuuccagcucugugauuaccucccugggagccaucgucagcugcuauggcaagacaaaaugcaccgcuuccaacaagaaucgcgggauuaucaaaacauucucuaacggaugugauuacgugagcaauaagggcguugacaccguguccgucggcaacacgcucuauuacgugaauaagcaagaagggaaaucucuguaugugaagggagagccuaucauuaacuuuuacgacccccuuguuuucccuagcgaugaauuugacgccuccaucagccaggucaaugagaaaauuaaccagucucuggccuucaucagaaaguccgaugaacuccugcacaaugugaacgcuggcaaaagcaccacaaauauuaugaucaccacaauuaucaucgugauuaucgucauucugcuuucucucaucgcgguggggcugcugcucuacugcaaggcccggugaggacuaguguccaccugucccuccugggcugcuggauugucucguuuuccugccaaauaaacaggaucagcgcuuuacagaucuaaaaaaaaaaaaaaaaaaaaaaaaaaaaaaaaaaaaaaaaaaaaaaaaaaaaaaaaaaaaaaaaugcaucccccccccccccccccccccccccccccccaaaggcucuuuucagagccaccagaauu

SEQ ID NO: 590 - RNA, 1970 nt, Artificial Sequence
  mRNA product Design c-1 comprising derived and/or modified sequence from HRSV(A2)__F-del (opt6)
gggagaguccgcucagccagguugcagaagcggcuuagcguguguccuaaucuucucucugcguguagguaggccugugccgcaaacaagcuuaccauggaauuacuaauacucaaagccaacgcaauaacaacaauacuaacagcaguaacauucugcuucgcaucaggacaaaacaucacagaagaauuuuaccaaaguacaugcagugcagucucuaaaggauaccucagugccuuacgcacaggaugguacacaucaguaauaacaaucgaacuuucaaacauaaaagaaaacaaaugcaauggaaccgacgccaaaguaaaacuaaucaaacaagaacuagacaaauauaaaaaugcaguaacagaauuacaacuccuaaugcaauccacaccagcaacaaauaacagagcaagacgagaacucccucgauucaugaauuacacauuaaacaacgcaaaaaaaacuaacguaacuuuaucaaaaaaaagaaaacguagauuucuaggauuccuacuaggcguaggguccgccauugcaucaggaguagcaguuagcaaaguauuacauuuagaaggagaaguaaauaaaaucaaaagcgcacuacucucaaccaacaaagcaguaguaucacucucaaacggaguaucaguacuaacauccaaaguacucgaccucaaaaacuacauagacaaacaauuacuacccauaguaaacaaacaaucaugcucuauaucaaauaucgaaacaguaaucgaauuucaacaaaaaaacaaucgacuacuugaaauaacaagagaguucuccgucaaugccggagucaccacaccagucucaacauacaugcuaaccaacucugaacuccuaucacuaauaaaugacaugccaauaacaaacgaccaaaaaaaacuaaugucaaauaacguacaaauaguacgacaacaaaguuauuccauaaugaguauaaucaaagaagaaguguuagcauacguaguccaacuaccauuauauggaguaauagacacaccauguuggaaauuacacaccucaccacucugcacuaccaauacaaaagaaggcucaaauauaugccuaacucgcacagacagaggcugguacugcgauaacgcaggauccguaucuuucuuuccccaagcagaaacuugcaaaguacaaucaaacagagucuucugcgacaccaugaauagucucacauuaccaucugaaguaaaccuauguaacguagauauauucaauccaaaauacgacugcaaaauaaugacaucaaaaaccgacgucucuagcaguguaaucacaucacuaggagcaauaguaagcugcuauggaaaaacaaaauguacagcaucaaacaaaaacaggggaauaauaaaaaccuucucaaacggaugugacuacguaucaaauaaaggcguagacacaguaagcguaggaaacacccuauacuacguuaacaaacaagaagggaaaucauuauacguaaaaggagaaccaauaauaaacuucuacgauccacucguauucccauccgacgaauuugacgccagcauaucccaaguuaacgaaaaaauaaaccaaucacuugcauuuauacgaaaaucugaugaacuucuccacaacguaaaugcaggaaaauccaccaccaauauaaugaucacaacuaucaucauaguaauaaucgucauuuuacuaucauuaauagcaguuggccuacuucuauacugcaaagcaagauaaggacuaguguccaccugucccuccugggcugcuggauugucucguuuuccugccaaauaaacaggaucagcgcuuuacagaucuaaaaaaaaaaaaaaaaaaaaaaaaaaaaaaaaaaaaaaaaaaaaaaaaaaaaaaaaaaaaaaaaugcaucccccccccccccccccccccccccccccccaaaggcucuuuucagagccaccagaauu

SEQ ID NO: 591 - RNA, 1970 nt, Artificial Sequence
  mRNA product Design c-1 comprising derived and/or modified sequence from HRSV(A2)__F-del (opt11)
gggagaguccgcucagccagguugcagaagcggcuuagcguguguccuaaucuucucucugcguguagguaggccugugccgcaaacaagcuuaccauggaacuacuaauccuaaaagccaacgcgaucaccaccauccuaacggcagucaccuucugcuucgcaucaggccaaaacaucacagaagaguucuaccaaagcacaugcuccgccguauccaaaggcuaccucagcgcccuacgcacaggcugguacacaucugucaucaccauagaacucuccaacaucaaagaaaacaaaugcaacggcacugacgccaaaguaaagcugaucaaacaagaacucgacaaauacaaaaacgcagucaccgaacuccaacuacucaugcaauccaccccugcaaccaacaacagggcccgccgcgaacucccccgcuucaugaacuacacuuuaaacaacgccaaaaagaccaacgucacacucagcaagaaacggaaacgacgauuccuaggguuucuccuaggcgucggcucggcaaucgccuccggcgucgccguaagcaaaguacuacaccuagaaggcgaagugaacaaaaucaaaagugcccuucucuccaccaacaaggccguagucucucuauccaacggagucucaguccucaccucaaagguccucgaccucaaaaacuacaucgacaaacaacuacuccccauugucaacaagcagucaugcuccauaucaaacaucgaaaccgucaucgaguuccaacagaaaaacaaccgacuccucgaaauaaccagagaguucucggucaacgccggcgucaccaccccagucagcaccuacaugcucacuaacuccgaacuccuaucccucaucaacgacaugccaauuaccaacgaccaaaagaaacuaaugucgaacaacguucaaaucguccgacaacaaaguuacuccaucaugagcauaaucaaagaagaaguucuagcguacgucguccaacucccacuauacggcgucaucgacacuccgugcuggaaacuccacacaucaccccuauguacaaccaacacaaaagaaggcagcaacaucugccucacccgcaccgaccgagggugguauugcgauaacgcuggcagcgucuccuucuucccccaagccgaaaccugcaaaguccaaucaaacagaguauucugcgacaccaugaacucccuuacucucccuagcgaagucaaccucugcaacguugacauauucaaccccaaauacgacugcaaaaucaugaccuccaagaccgacgucuccuccuccgucaucacaucucuaggugccauugucuccugcuacggaaaaaccaaaugcacagccuccaacaaaaaccgcggcaucauaaaaaccuucuccaacggcugcgacuacgucaguaauaaaggcgucgacacgguauccguugggaauacgcuuuacuacguaaauaaacaagaaggcaaaucccucuacgucaaaggugaacccaucauaaacuucuacgacccgcuuguguucccauccgacgaguucgacgccagcaucagccaggucaacgaaaagaucaaccaaucccuagccuucauccgcaaaagcgacgaacuacuacacaacgucaacgccggaaaauccacaaccaacaucaugaucaccaccaucaucaucgucaucaucguaauccuacucucucucaucgccgucggccuccuacuguacuguaaagcccgauagggacuaguguccaccugucccuccugggcugcuggauugucucguuuuccugccaaauaaacaggaucagcgcuuuacagaucuaaaaaaaaaaaaaaaaaaaaaaaaaaaaaaaaaaaaaaaaaaaaaaaaaaaaaaaaaaaaaaaaugcaucccccccccccccccccccccccccccccccaaaggcucuuuucagagccaccagaauu

SEQ ID NO: 592 - RNA, 2060 nt, Artificial Sequence
  mRNA product Design c-2 comprising derived and/or modified sequence from HRSV(A2)__F-del (artificial)
gggagacuccugucgggcggaaguaggaggaguagaguuuaaaaacaguacucuuuuuccgguucgggacguaguugaagcaacgacaagccggauaaccgcucuugagacaggaagcuuaccauggaguugcuaauccucaaagcaaaugcaauuaccacaauccucacugcagucacauuuuguuuugcuucuggucaaaacaucacugaagaauuuuaucaaucaacaugcagugcaguuagcaaaggcuaucuuagugcucugagaacugguugguauaccaguguuauaacuauagaauuaaguaauaucaaggaaaauaaguguaauggaacagaugcuaagguaaaauugauaaaacaagaauuagauaaauauaaaaaugcuguaacagaauugcaguugcucaugcaaagcacaccagcaacaaacaaucgagccagaagagaacuaccaagguuuaugaauuauacacucaacaaugccaaaaaaaccaauguaacauuaagcaagaaaaggaaaagaagauuucuugguuuuuuguuagguguuggaucugcaaucgccaguggcguugcuguaucuaagguccugcaccuagaaggggaagugaacaagaucaaaagugcucuacuauccacaaacaaggcuguagucagcuuaucaaauggaguuagugucuuaaccagcaaaguguuagaccucaaaaacuauauagauaaacaauuguuaccuauugugaacaagcaaagcugcagcauaucaaauauagaaacugugauagaguuccaacaaaagaacaacagacuacuagagauuaccagggaauuuaguguuaaugcagguguaacuacaccuguaagcacuuacauguuaacuaauagugaauuauugucauuaaucaaugauaugccuauaacaaaugaucagaaaaaguuaauguccaacaauguucaaauaguuagacagcaaaguuacucuaucauguccauaauaaaagaggaagucuuagcauauguaguacaauuaccacuauaugguguuauagauacacccuguuggaaacuacacacauccccucuauguacaaccaacacaaaagaaggguccaacaucuguuuaacaagaacugacagaggaugguacugugacaaugcaggaucaguaucuuucuucccacaagcugaaacauguaaaguucaaucaaaucgaguauuuugugacacaaugaacaguuuaacauuaccaagugaaguaaaucucugcaauguugacauauucaaccccaaauaugauuguaaaauuaugacuucaaaaacagauguaagcagcuccguuaucacaucucuaggagccauugugucaugcuauggcaaaacuaaauguacagcauccaauaaaaaucguggaaucauaaagacauuuucuaacgggugcgauuauguaucaaauaaagggguggacacugugucuguagguaacacauuauauuauguaaauaagcaagaagguaaaagucucuauguaaaaggugaaccaauaauaaauuucuaugacccauuaguauuccccucugaugaauuugaugcaucaauaucucaagucaacgagaagauuaaccagagccuagcauuuauucguaaauccgaugaauuauuacauaauguaaaugcugguaaauccaccacaaauaucaugauaacuacuauaauuauagugauuauaguaauauuguuaucauuaauugcuguuggacugcucuuauacuguaaggccagauaaggacuaguggaagcauuuuccuggcugauuaaaagaaauuacucagcuauggucaucuguuccuguuagaaggcuaugcagcauauuauauacuaugcgcauguuaugaaaugcauaauaaaaaauuuuaaaaaaucuaaaagaucuaaaaaaaaaaaaaaaaaaaaaaaaaaaaaaaaaaaaaaaaaaaaaaaaaaaaaaaaaaaaaaaaugcaucccccccccccccccccccccccccccccccaaaggcucuuuucagagccaccagaauu

SEQ ID NO: 593 - RNA, 2060 nt, Artificial Sequence
  mRNA product Design c-2 comprising derived and/or modified sequence from HRSV(A2)__F-del (opt1)
gggagacuccugucgggcggaaguaggaggaguagaguuuaaaaacaguacucuuuuuccgguucgggacguaguugaagcaacgacaagccggauaaccgcucuugagacaggaagcuuaccauggagcugcucauccugaaggccaacgccaucaccaccauccugacggcggugaccuucugcuucgccagcggccagaacaucaccgaggaguucuaccaguccaccugcagcgccgucuccaagggguaccucagcgcccugcggacgggcugguacaccuccgugaucaccaucgagcugagcaacaucaaggagaacaagugcaacgggaccgacgccaaggugaagcucaucaagcaggagcuggacaaguacaagaacgcggucacggagcugcagcuccugaugcaguccaccccggcaaccaacaaccgcgcccggcgcgagcugccccgguucaugaacuacacccucaacaacgccaagaagacgaacgugacccugagcaagaagcgcaagcggcgcuuccugggcuuccuccugggggugggcuccgccaucgcgagcggcgucgccguguccaaggugcugcaccucgagggggaggucaacaagaucaagagcgcccugcuguccaccaacaaggccguggugagccucuccaacggcgucagcgugcugaccuccaaggugcuggaccucaagaacuacaucgacaagcagcugcugcccaucgucaacaagcagagcugcuccaucagcaacaucgagacggugaucgaguuccagcagaagaacaaccggcuccuggagaucacccgcgaguucagcgugaacgccggggucaccacccccguguccacguacaugcugaccaacagcgagcuccugucccugaucaacgacaugccgaucaccaacgaccagaagaagcucaugagcaacaacgugcagaucguccggcagcaguccuacagcaucauguccaucaucaaggaggaggugcuggcguacgugguccagcugccccucuacggcgugaucgacacccccugcuggaagcugcacacgagcccccugugcaccaccaacaccaaggagggguccaacaucugccucacgcgcaccgaccggggcugguacugcgacaacgccggcagcgucuccuucuucccgcaggccgagaccugcaaggugcagagcaaccgcguguucugcgacaccaugaacucccugacgcugcccagcgagguaaaccucugcaacgucgacaucuucaaccccaaguacgacugcaagaucaugaccuccaagaccgacgugagcuccagcgugaucaccucccugggggccaucgucagcugcuacggcaagacgaagugcaccgccagcaacaagaaccgggggaucaucaagaccuucuccaacggcugcgacuacgugagcaacaagggcguggacaccguguccgucgggaacacccuguacuacgugaacaagcaggagggcaagagccucuacgugaagggggagcccaucaucaacuucuacgacccgcuggucuuccccuccgacgaguucgacgcgagcaucucccaggugaacgagaagaucaaccagagccuggccuucauccgcaaguccgacgagcugcuccacaacgugaacgccggcaagagcacgaccaacaucaugaucaccaccaucaucaucgucaucaucgugauccugcugucccucaucgccguggggcugcugcucuacugcaaggcccggugaggacuaguggaagcauuuuccuggcugauuaaaagaaauuacucagcuauggucaucuguuccuguuagaaggcuaugcagcauauuauauacuaugcgcauguuaugaaaugcauaauaaaaaauuuuaaaaaaucuaaaagaucuaaaaaaaaaaaaaaaaaaaaaaaaaaaaaaaaaaaaaaaaaaaaaaaaaaaaaaaaaaaaaaaaugcaucccccccccccccccccccccccccccccccaaaggcucuuuucagagccaccagaauu

SEQ ID NO: 594 - RNA, 2060 nt, Artificial Sequence
  mRNA product Design c-2 comprising derived and/or modified sequence from HRSV(A2)__F-del (opt1)
gggagacuccugucgggcggaaguaggaggaguagaguuuaaaaacaguacucuuuuuccgguucgggacguaguugaagcaacgacaagccggauaaccgcucuugagacaggaagcuuaccauggagcugcucauccugaaggccaacgccaucaccaccauccugacggcggugaccuucugcuucgccagcggccagaacaucaccgaggaguucuaccaguccacgugcagcgccgucuccaagggguaccucagcgcccugcgcaccggcugguacaccuccgugaucaccaucgagcugagcaacaucaaggagaacaagugcaacgggaccgacgccaaggugaagcucaucaagcaggagcuggacaaguacaagaacgcggucacggagcugcagcuccugaugcaguccacccccgccaccaacaaccgggcccgccgggagcugccgcgcuucaugaacuacacccucaacaacgccaagaagacgaacgugacccugagcaagaagcggaagcgccgguuccugggcuuccuccugggggugggcuccgcgaucgccagcggcgucgccguguccaaggugcugcaccucgagggggaggucaacaagaucaagagcgcccugcuguccaccaacaaggccguggugagccucuccaacggcgucagcgugcugaccuccaaggugcuggaccucaagaacuacaucgacaagcagcugcugcccaucgucaacaagcagagcugcuccaucagcaacaucgagacggugaucgaguuccagcagaagaacaaccgccuccuggagaucacccgggaguucagcgugaacgcgggggucaccacccccguguccacguacaugcugaccaacagcgagcuccugucccugaucaacgacaugcccaucaccaacgaccagaagaagcucaugagcaacaacgugcagaucguccgccagcaguccuacagcaucauguccaucaucaaggaggaggugcuggccuacgugguccagcugccgcucuacggcgugaucgacacccccugcuggaagcugcacacgagcccccugugcaccaccaacaccaaggagggguccaacaucugccucacgcggaccgaccgcggcugguacugcgacaacgccggcagcgucuccuucuucccccaggccgagaccugcaaggugcagagcaaccggguguucugcgacaccaugaacucccugacgcugccgagcgaggucaaccucugcaacguggacaucuucaaccccaaguacgacugcaagaucaugaccuccaagaccgacgugagcuccagcgucaucaccucccugggggccaucgugagcugcuacggcaagacgaagugcaccgcgagcaacaagaaccgcgggaucaucaagaccuucuccaacggcugcgacuacgugagcaacaagggcgucgacaccguguccguggggaacacccuguacuacgucaacaagcaggagggcaagagccucuacgugaagggggagcccaucaucaacuucuacgacccccugguguucccguccgacgaguucgacgccagcaucucccaggucaacgagaagaucaaccagagccuggccuucauccggaaguccgacgagcuccugcacaacgugaacgccggcaagagcacgaccaacaucaugaucaccaccaucaucaucgugaucaucgucauccugcugucccucaucgccguggggcugcugcucuacugcaaggcgcgcugaggacuaguggaagcauuuuccuggcugauuaaaagaaauuacucagcuauggucaucuguuccuguuagaaggcuaugcagcauauuauauacuaugcgcauguuaugaaaugcauaauaaaaaauuuuaaaaaaucuaaaagaucuaaaaaaaaaaaaaaaaaaaaaaaaaaaaaaaaaaaaaaaaaaaaaaaaaaaaaaaaaaaaaaaaugcaucccccccccccccccccccccccccccccccaaaggcucuuuucagagccaccagaauu

SEQ ID NO: 595 - RNA, 2060 nt, Artificial Sequence
  mRNA product Design c-2 comprising derived and/or modified sequence from HRSV(A2)__F-del (opt2)
gggagacuccugucgggcggaaguaggaggaguagaguuuaaaaacaguacucuuuuuccgguucgggacguaguugaagcaacgacaagccggauaaccgcucuugagacaggaagcuuaccauggagcuccucauccucaaggccaacgccaucaccaccauccucaccgccgucaccuucugcuucgccuccggccagaacaucaccgaggaguucuaccaguccaccugcuccgccgucuccaagggcuaccucuccgcccuccgcaccggcugguacaccuccgucaucaccaucgagcucuccaacaucaaggagaacaagugcaacggcaccgacgccaaggucaagcucaucaagcaggagcucgacaaguacaagaacgccgucaccgagcuccagcuccucaugcaguccacccccgccaccaacaaccgcgcccgccgcgagcucccccgcuucaugaacuacacccucaacaacgccaagaagaccaacgucacccucuccaagaagcgcaagcgccgcuuccucggcuuccuccucggcgucggcuccgccaucgccuccggcgucgccgucuccaagguccuccaccucgagggcgaggucaacaagaucaaguccgcccuccucuccaccaacaaggccgucgucucccucuccaacggcgucuccguccucaccuccaagguccucgaccucaagaacuacaucgacaagcagcuccuccccaucgucaacaagcaguccugcuccaucuccaacaucgagaccgucaucgaguuccagcagaagaacaaccgccuccucgagaucacccgcgaguucuccgucaacgccggcgucaccacccccgucuccaccuacaugcucaccaacuccgagcuccucucccucaucaacgacaugcccaucaccaacgaccagaagaagcucauguccaacaacguccagaucguccgccagcaguccuacuccaucauguccaucaucaaggaggagguccucgccuacgucguccagcucccccucuacggcgucaucgacacccccugcuggaagcuccacaccuccccccucugcaccaccaacaccaaggagggcuccaacaucugccucacccgcaccgaccgcggcugguacugcgacaacgccggcuccgucuccuucuucccccaggccgagaccugcaagguccaguccaaccgcgucuucugcgacaccaugaacucccucacccuccccuccgaggucaaccucugcaacgucgacaucuucaaccccaaguacgacugcaagaucaugaccuccaagaccgacgucuccuccuccgucaucaccucccucggcgccaucgucuccugcuacggcaagaccaagugcaccgccuccaacaagaaccgcggcaucaucaagaccuucuccaacggcugcgacuacgucuccaacaagggcgucgacaccgucuccgucggcaacacccucuacuacgucaacaagcaggagggcaagucccucuacgucaagggcgagcccaucaucaacuucuacgacccccucgucuuccccuccgacgaguucgacgccuccaucucccaggucaacgagaagaucaaccagucccucgccuucauccgcaaguccgacgagcuccuccacaacgucaacgccggcaaguccaccaccaacaucaugaucaccaccaucaucaucgucaucaucgucauccuccucucccucaucgccgucggccuccuccucuacugcaaggcccgcugaggacuaguggaagcauuuuccuggcugauuaaaagaaauuacucagcuauggucaucuguuccuguuagaaggcuaugcagcauauuauauacuaugcgcauguuaugaaaugcauaauaaaaaauuuuaaaaaaucuaaaagaucuaaaaaaaaaaaaaaaaaaaaaaaaaaaaaaaaaaaaaaaaaaaaaaaaaaaaaaaaaaaaaaaaugcaucccccccccccccccccccccccccccccccaaaggcucuuuucagagccaccagaauu

SEQ ID NO: 596 - RNA, 2060 nt, Artificial Sequence
  mRNA product Design c-2 comprising derived and/or modified sequence from HRSV(A2)__F-del (opt3)
gggagacuccugucgggcggaaguaggaggaguagaguuuaaaaacaguacucuuuuuccgguucgggacguaguugaagcaacgacaagccggauaaccgcucuugagacaggaagcuuaccauggagcugcucauccuuaaggccaacgcuauuaccacaauacugacugcagugacguucugcuuugccagcggccagaauaucaccgaagaguucuaccaauccacauguucugcggucucaaaaggguauuugagugcuuuaagaacuggaugguacaccagcguuauuacaaucgaacuguccaacauuaaggagaauaaaugcaacgguaccgacgccaaggugaaacuaaucaagcaggaacucgauaaguauaaaaaugcaguaacugagcugcagcuucugaugcagucuacacccgccaccaacaauagggcucggcgcgaguugccucgauuuaugaacuacacgcucaauaacgcaaagaaaacuaaugugacccugucgaagaaacguaagagaagguuccugggcuuucucuuaggggucggaucagccauagcuagcggcguggccguuaguaaggugcugcaccuugaaggugaggucaacaaaaucaaguccgcguugcugucuacaaauaaagcagugguaagccuauccaacgggguuucagugcucacuucuaagguccuggaccuuaaaaauuauauugauaagcaacuguugccaaucgugaacaaacagagcuguucuauuuccaacaucgaaaccgugauagaguuccagcagaagaauaaccggcuccuggagauuacacgcgaauuuucagucaaugccggaguuaccacgccggugagcacuuacauguuaacaaacagugagcugcucucucuuaucaaugacaugcccauuaccaacgaucaaaagaaacugauguccaauaacguacagaucgugagacagcagagcuauucgaucaugucuauuauaaaggaagaggucuuggcuuacgugguucaacuaccucuguacggcgugaucgacacuccaugcuggaaacuccauacauccccacuguguaccacgaauaccaaggaaggcucaaacauuugccuuacaaggacugaucgggggugguauugugacaaugccggaagugucagcuucuuuccucaggcagagaccugcaaagugcaguccaaccgcguauucugugauacaaugaauagucugacuuugccaagcgagguuaaccucugcaauguggacaucuuuaaccccaaguacgauuguaagauaaugaccucaaaaacagacgucaguuccagcgugauuaccucucugggugcuaucgucucaugcuauggcaagacuaaaugcacggccaguaacaagaaucgagggaucauuaaaacauucagcaacggaugugauuacguguccaauaagggcguugacaccgugucuguagguaacacuuuauauuacgucaauaagcaagaagggaaaucgcuguaugugaagggagagccuaucauuaacuuuuacgacccccuaguuuucccgagcgaugaauuugacgcguccauaucacaggugaaugagaaaaucaaccagagucucgccuucauuagaaagucugaugaacugcuucacaaugucaacgcaggcaaaagcaccacaaauaucaugaucaccacuauuauaaucgugauuaucguaauuuugcugucccucaucgcugugggccugcuucuguacugcaaggccaggugaggacuaguggaagcauuuuccuggcugauuaaaagaaauuacucagcuauggucaucuguuccuguuagaaggcuaugcagcauauuauauacuaugcgcauguuaugaaaugcauaauaaaaaauuuuaaaaaaucuaaaagaucuaaaaaaaaaaaaaaaaaaaaaaaaaaaaaaaaaaaaaaaaaaaaaaaaaaaaaaaaaaaaaaaaugcaucccccccccccccccccccccccccccccccaaaggcucuuuucagagccaccagaauu

SEQ ID NO: 597 - RNA, 2060 nt, Artificial Sequence
  mRNA product Design c-2 comprising derived and/or modified sequence from HRSV(A2)__F-del (opt4)
gggagacuccugucgggcggaaguaggaggaguagaguuuaaaaacaguacucuuuuuccgguucgggacguaguugaagcaacgacaagccggauaaccgcucuugagacaggaagcuuaccauggagcugcugauccugaaggccaacgccaucaccaccauccugaccgccgugaccuucugcuucgccagcggccagaacaucaccgaggaguucuaccagagcaccugcagcgccgugagcaagggcuaccugagcgcccugagaaccggcugguacaccagcgugaucaccaucgagcugagcaacaucaaggagaacaagugcaacggcaccgacgccaaggugaagcugaucaagcaggagcuggacaaguacaagaacgccgugaccgagcugcagcugcugaugcagagcacccccgccaccaacaacagagccagaagagagcugcccagauucaugaacuacacccugaacaacgccaagaagaccaacgugacccugagcaagaagagaaagagaagauuccugggcuuccugcugggcgugggcagcgccaucgccagcggcguggccgugagcaaggugcugcaccuggagggcgaggugaacaagaucaagagcgcccugcugagcaccaacaaggccguggugagccugagcaacggcgugagcgugcugaccagcaaggugcuggaccugaagaacuacaucgacaagcagcugcugcccaucgugaacaagcagagcugcagcaucagcaacaucgagaccgugaucgaguuccagcagaagaacaacagacugcuggagaucaccagagaguucagcgugaacgccggcgugaccacccccgugagcaccuacaugcugaccaacagcgagcugcugagccugaucaacgacaugcccaucaccaacgaccagaagaagcugaugagcaacaacgugcagaucgugagacagcagagcuacagcaucaugagcaucaucaaggaggaggugcuggccuacguggugcagcugccccuguacggcgugaucgacacccccugcuggaagcugcacaccagcccccugugcaccaccaacaccaaggagggcagcaacaucugccugaccagaaccgacagaggcugguacugcgacaacgccggcagcgugagcuucuucccccaggccgagaccugcaaggugcagagcaacagaguguucugcgacaccaugaacagccugacccugcccagcgaggugaaccugugcaacguggacaucuucaaccccaaguacgacugcaagaucaugaccagcaagaccgacgugagcagcagcgugaucaccagccugggcgccaucgugagcugcuacggcaagaccaagugcaccgccagcaacaagaacagaggcaucaucaagaccuucagcaacggcugcgacuacgugagcaacaagggcguggacaccgugagcgugggcaacacccuguacuacgugaacaagcaggagggcaagagccuguacgugaagggcgagcccaucaucaacuucuacgacccccugguguuccccagcgacgaguucgacgccagcaucagccaggugaacgagaagaucaaccagagccuggccuucaucagaaagagcgacgagcugcugcacaacgugaacgccggcaagagcaccaccaacaucaugaucaccaccaucaucaucgugaucaucgugauccugcugagccugaucgccgugggccugcugcuguacugcaaggccagaugaggacuaguggaagcauuuuccuggcugauuaaaagaaauuacucagcuauggucaucuguuccuguuagaaggcuaugcagcauauuauauacuaugcgcauguuaugaaaugcauaauaaaaaauuuuaaaaaaucuaaaagaucuaaaaaaaaaaaaaaaaaaaaaaaaaaaaaaaaaaaaaaaaaaaaaaaaaaaaaaaaaaaaaaaaugcaucccccccccccccccccccccccccccccccaaaggcucuuuucagagccaccagaauu

SEQ ID NO: 598 - RNA, 2060 nt, Artificial Sequence
  mRNA product Design c-2 comprising derived and/or modified sequence from HRSV(A2)__F-del (opt5)
gggagacuccugucgggcggaaguaggaggaguagaguuuaaaaacaguacucuuuuuccgguucgggacguaguugaagcaacgacaagccggauaaccgcucuugagacaggaagcuuaccauggagcugcucauccugaaggccaacgcuauuaccacaauccuuacggccgugaccuucugcuuugcgagcggccagaauauuacagaagaguucuaccaauccaccuguucugcugucagcaaaggguaucuguccgcccucagaacaggaugguacaccucuguuaucacaauugaacugagcaacaucaaggagaauaaaugcaacggcaccgacgccaaggugaaacuuaucaagcaggaacuggauaaguauaaaaaugcugugacggagcuccagcugcugaugcaguccacccccgccacaaacaaucgggcucgcagagagcucccucgguuuaugaacuacacccugaauaacgccaagaaaacaaaugucacccuuucuaagaaacgcaagagacgguuccugggguuucuccugggagugggcagcgcgauugccuccgggguugcugugagcaagguccuucaccuggaaggagaggugaacaaaaucaagucugcccuccuguccacgaauaaagcuguugugagccugucuaacggcgucuccgugcucacaagcaaggugcuggaccuuaaaaauuauauugauaagcaacugcucccgaucgucaacaaacagucuuguuccauuagcaacaucgaaaccguuauugaguuccagcagaagaauaaccgccugcuugagaucacaagagaauuuuccgugaaugccggcgugaccacccccgucucuacauacaugcugacgaacagcgagcuccugucccugaucaaugacaugccuauuaccaacgaucaaaagaaacucaugagcaauaacgugcagaucguucggcagcagucuuauuccauuaugagcaucauuaaggaagaggugcuggcguacgucgugcaacuuccccuguacgggguuaucgacacaccuugcuggaaacuccauaccucuccccuguguacaaccaauacgaaggaaggaagcaacaucugccuuacacgcaccgauagaggcugguauugugacaaugccggguccgugucuuucuuuccucaggcugagaccugcaaaguccagagcaaccggguguucugugauacaaugaacucccugacccucccgagcgaggucaaucugugcaauguggacauuuuuaaccccaaguacgauuguaagaucaugacaucuaaaacggacguuuccagcucugugauuaccucccugggagccaucgucagcugcuauggcaagacaaaaugcaccgcuuccaacaagaaucgcgggauuaucaaaacauucucuaacggaugugauuacgugagcaauaagggcguugacaccguguccgucggcaacacgcucuauuacgugaauaagcaagaagggaaaucucuguaugugaagggagagccuaucauuaacuuuuacgacccccuuguuuucccuagcgaugaauuugacgccuccaucagccaggucaaugagaaaauuaaccagucucuggccuucaucagaaaguccgaugaacuccugcacaaugugaacgcuggcaaaagcaccacaaauauuaugaucaccacaauuaucaucgugauuaucgucauucugcuuucucucaucgcgguggggcugcugcucuacugcaaggcccggugaggacuaguggaagcauuuuccuggcugauuaaaagaaauuacucagcuauggucaucuguuccuguuagaaggcuaugcagcauauuauauacuaugcgcauguuaugaaaugcauaauaaaaaauuuuaaaaaaucuaaaagaucuaaaaaaaaaaaaaaaaaaaaaaaaaaaaaaaaaaaaaaaaaaaaaaaaaaaaaaaaaaaaaaaaugcaucccccccccccccccccccccccccccccccaaaggcucuuuucagagccaccagaauu

SEQ ID NO: 599 - RNA, 2060 nt, Artificial Sequence
  mRNA product Design c-2 comprising derived and/or modified sequence from HRSV(A2)__F-del (opt6)
gggagacuccugucgggcggaaguaggaggaguagaguuuaaaaacaguacucuuuuuccgguucgggacguaguugaagcaacgacaagccggauaaccgcucuugagacaggaagcuuaccauggaauuacuaauacucaaagccaacgcaauaacaacaauacuaacagcaguaacauucugcuucgcaucaggacaaaacaucacagaagaauuuuaccaaaguacaugcagugcagucucuaaaggauaccucagugccuuacgcacaggaugguacacaucaguaauaacaaucgaacuuucaaacauaaaagaaaacaaaugcaauggaaccgacgccaaaguaaaacuaaucaaacaagaacuagacaaauauaaaaaugcaguaacagaauuacaacuccuaaugcaauccacaccagcaacaaauaacagagcaagacgagaacucccucgauucaugaauuacacauuaaacaacgcaaaaaaaacuaacguaacuuuaucaaaaaaaagaaaacguagauuucuaggauuccuacuaggcguaggguccgccauugcaucaggaguagcaguuagcaaaguauuacauuuagaaggagaaguaaauaaaaucaaaagcgcacuacucucaaccaacaaagcaguaguaucacucucaaacggaguaucaguacuaacauccaaaguacucgaccucaaaaacuacauagacaaacaauuacuacccauaguaaacaaacaaucaugcucuauaucaaauaucgaaacaguaaucgaauuucaacaaaaaaacaaucgacuacuugaaauaacaagagaguucuccgucaaugccggagucaccacaccagucucaacauacaugcuaaccaacucugaacuccuaucacuaauaaaugacaugccaauaacaaacgaccaaaaaaaacuaaugucaaauaacguacaaauaguacgacaacaaaguuauuccauaaugaguauaaucaaagaagaaguguuagcauacguaguccaacuaccauuauauggaguaauagacacaccauguuggaaauuacacaccucaccacucugcacuaccaauacaaaagaaggcucaaauauaugccuaacucgcacagacagaggcugguacugcgauaacgcaggauccguaucuuucuuuccccaagcagaaacuugcaaaguacaaucaaacagagucuucugcgacaccaugaauagucucacauuaccaucugaaguaaaccuauguaacguagauauauucaauccaaaauacgacugcaaaauaaugacaucaaaaaccgacgucucuagcaguguaaucacaucacuaggagcaauaguaagcugcuauggaaaaacaaaauguacagcaucaaacaaaaacaggggaauaauaaaaaccuucucaaacggaugugacuacguaucaaauaaaggcguagacacaguaagcguaggaaacacccuauacuacguuaacaaacaagaagggaaaucauuauacguaaaaggagaaccaauaauaaacuucuacgauccacucguauucccauccgacgaauuugacgccagcauaucccaaguuaacgaaaaaauaaaccaaucacuugcauuuauacgaaaaucugaugaacuucuccacaacguaaaugcaggaaaauccaccaccaauauaaugaucacaacuaucaucauaguaauaaucgucauuuuacuaucauuaauagcaguuggccuacuucuauacugcaaagcaagauaaggacuaguggaagcauuuuccuggcugauuaaaagaaauuacucagcuauggucaucuguuccuguuagaaggcuaugcagcauauuauauacuaugcgcauguuaugaaaugcauaauaaaaaauuuuaaaaaaucuaaaagaucuaaaaaaaaaaaaaaaaaaaaaaaaaaaaaaaaaaaaaaaaaaaaaaaaaaaaaaaaaaaaaaaaugcaucccccccccccccccccccccccccccccccaaaggcucuuuucagagccaccagaauu

SEQ ID NO: 600 - RNA, 2060 nt, Artificial Sequence
  mRNA product Design c-2 comprising derived and/or modified sequence from HRSV(A2)__F-del (opt11)
gggagacuccugucgggcggaaguaggaggaguagaguuuaaaaacaguacucuuuuuccgguucgggacguaguugaagcaacgacaagccggauaaccgcucuugagacaggaagcuuaccauggaacuacuaauccuaaaagccaacgcgaucaccaccauccuaacggcagucaccuucugcuucgcaucaggccaaaacaucacagaagaguucuaccaaagcacaugcuccgccguauccaaaggcuaccucagcgcccuacgcacaggcugguacacaucugucaucaccauagaacucuccaacaucaaagaaaacaaaugcaacggcacugacgccaaaguaaagcugaucaaacaagaacucgacaaauacaaaaacgcagucaccgaacuccaacuacucaugcaauccaccccugcaaccaacaacagggcccgccgcgaacucccccgcuucaugaacuacacuuuaaacaacgccaaaaagaccaacgucacacucagcaagaaacggaaacgacgauuccuaggguuucuccuaggcgucggcucggcaaucgccuccggcgucgccguaagcaaaguacuacaccuagaaggcgaagugaacaaaaucaaaagugcccuucucuccaccaacaaggccguagucucucuauccaacggagucucaguccucaccucaaagguccucgaccucaaaaacuacaucgacaaacaacuacuccccauugucaacaagcagucaugcuccauaucaaacaucgaaaccgucaucgaguuccaacagaaaaacaaccgacuccucgaaauaaccagagaguucucggucaacgccggcgucaccaccccagucagcaccuacaugcucacuaacuccgaacuccuaucccucaucaacgacaugccaauuaccaacgaccaaaagaaacuaaugucgaacaacguucaaaucguccgacaacaaaguuacuccaucaugagcauaaucaaagaagaaguucuagcguacgucguccaacucccacuauacggcgucaucgacacuccgugcuggaaacuccacacaucaccccuauguacaaccaacacaaaagaaggcagcaacaucugccucacccgcaccgaccgagggugguauugcgauaacgcuggcagcgucuccuucuucccccaagccgaaaccugcaaaguccaaucaaacagaguauucugcgacaccaugaacucccuuacucucccuagcgaagucaaccucugcaacguugacauauucaaccccaaauacgacugcaaaaucaugaccuccaagaccgacgucuccuccuccgucaucacaucucuaggugccauugucuccugcuacggaaaaaccaaaugcacagccuccaacaaaaaccgcggcaucauaaaaaccuucuccaacggcugcgacuacgucaguaauaaaggcgucgacacgguauccguugggaauacgcuuuacuacguaaauaaacaagaaggcaaaucccucuacgucaaaggugaacccaucauaaacuucuacgacccgcuuguguucccauccgacgaguucgacgccagcaucagccaggucaacgaaaagaucaaccaaucccuagccuucauccgcaaaagcgacgaacuacuacacaacgucaacgccggaaaauccacaaccaacaucaugaucaccaccaucaucaucgucaucaucguaauccuacucucucucaucgccgucggccuccuacuguacuguaaagcccgauagggacuaguggaagcauuuuccuggcugauuaaaagaaauuacucagcuauggucaucuguuccuguuagaaggcuaugcagcauauuauauacuaugcgcauguuaugaaaugcauaauaaaaaauuuuaaaaaaucuaaaagaucuaaaaaaaaaaaaaaaaaaaaaaaaaaaaaaaaaaaaaaaaaaaaaaaaaaaaaaaaaaaaaaaaugcaucccccccccccccccccccccccccccccccaaaggcucuuuucagagccaccagaauu

SEQ ID NO: 601 - RNA, 2037 nt, Artificial Sequence
  mRNA product Design c-3 comprising derived and/or modified sequence from HRSV(A2)__F-del (artificial)
gggagaguccgcucagccagguugcagaagcggcuuagcguguguccuaaucuucucucugcguguagguaggccugugccgcaaacaagcuuaccauggaguugcuaauccucaaagcaaaugcaauuaccacaauccucacugcagucacauuuuguuuugcuucuggucaaaacaucacugaagaauuuuaucaaucaacaugcagugcaguuagcaaaggcuaucuuagugcucugagaacugguugguauaccaguguuauaacuauagaauuaaguaauaucaaggaaaauaaguguaauggaacagaugcuaagguaaaauugauaaaacaagaauuagauaaauauaaaaaugcuguaacagaauugcaguugcucaugcaaagcacaccagcaacaaacaaucgagccagaagagaacuaccaagguuuaugaauuauacacucaacaaugccaaaaaaaccaauguaacauuaagcaagaaaaggaaaagaagauuucuugguuuuuuguuagguguuggaucugcaaucgccaguggcguugcuguaucuaagguccugcaccuagaaggggaagugaacaagaucaaaagugcucuacuauccacaaacaaggcuguagucagcuuaucaaauggaguuagugucuuaaccagcaaaguguuagaccucaaaaacuauauagauaaacaauuguuaccuauugugaacaagcaaagcugcagcauaucaaauauagaaacugugauagaguuccaacaaaagaacaacagacuacuagagauuaccagggaauuuaguguuaaugcagguguaacuacaccuguaagcacuuacauguuaacuaauagugaauuauugucauuaaucaaugauaugccuauaacaaaugaucagaaaaaguuaauguccaacaauguucaaauaguuagacagcaaaguuacucuaucauguccauaauaaaagaggaagucuuagcauauguaguacaauuaccacuauaugguguuauagauacacccuguuggaaacuacacacauccccucuauguacaaccaacacaaaagaaggguccaacaucuguuuaacaagaacugacagaggaugguacugugacaaugcaggaucaguaucuuucuucccacaagcugaaacauguaaaguucaaucaaaucgaguauuuugugacacaaugaacaguuuaacauuaccaagugaaguaaaucucugcaauguugacauauucaaccccaaauaugauuguaaaauuaugacuucaaaaacagauguaagcagcuccguuaucacaucucuaggagccauugugucaugcuauggcaaaacuaaauguacagcauccaauaaaaaucguggaaucauaaagacauuuucuaacgggugcgauuauguaucaaauaaagggguggacacugugucuguagguaacacauuauauuauguaaauaagcaagaagguaaaagucucuauguaaaaggugaaccaauaauaaauuucuaugacccauuaguauuccccucugaugaauuugaugcaucaauaucucaagucaacgagaagauuaaccagagccuagcauuuauucguaaauccgaugaauuauuacauaauguaaaugcugguaaauccaccacaaauaucaugauaacuacuauaauuauagugauuauaguaauauuguuaucauuaauugcuguuggacugcucuuauacuguaaggccagauaaggacuaguacuggcugcaucucccuuuccucuguccuccauccuucucccaggauggugaagggggaccugguacccagugauccccaccccaggauccuaaaucaugacuuaccugcuaauaaaaacucauuggaaaagugagaagaucuaaaaaaaaaaaaaaaaaaaaaaaaaaaaaaaaaaaaaaaaaaaaaaaaaaaaaaaaaaaaaaaaugcaucccccccccccccccccccccccccccccccaaaggcucuuuucagagccaccagaauu

SEQ ID NO: 602 - RNA, 2037 nt, Artificial Sequence
  mRNA product Design c-3 comprising derived and/or modified sequence from HRSV(A2)__F-del (opt1)
gggagaguccgcucagccagguugcagaagcggcuuagcguguguccuaaucuucucucugcguguagguaggccugugccgcaaacaagcuuaccauggagcugcucauccugaaggccaacgccaucaccaccauccugacggcggugaccuucugcuucgccagcggccagaacaucaccgaggaguucuaccaguccaccugcagcgccgucuccaagggguaccucagcgcccugcggacgggcugguacaccuccgugaucaccaucgagcugagcaacaucaaggagaacaagugcaacgggaccgacgccaaggugaagcucaucaagcaggagcuggacaaguacaagaacgcggucacggagcugcagcuccugaugcaguccaccccggcaaccaacaaccgcgcccggcgcgagcugccccgguucaugaacuacacccucaacaacgccaagaagacgaacgugacccugagcaagaagcgcaagcggcgcuuccugggcuuccuccugggggugggcuccgccaucgcgagcggcgucgccguguccaaggugcugcaccucgagggggaggucaacaagaucaagagcgcccugcuguccaccaacaaggccguggugagccucuccaacggcgucagcgugcugaccuccaaggugcuggaccucaagaacuacaucgacaagcagcugcugcccaucgucaacaagcagagcugcuccaucagcaacaucgagacggugaucgaguuccagcagaagaacaaccggcuccuggagaucacccgcgaguucagcgugaacgccggggucaccacccccguguccacguacaugcugaccaacagcgagcuccugucccugaucaacgacaugccgaucaccaacgaccagaagaagcucaugagcaacaacgugcagaucguccggcagcaguccuacagcaucauguccaucaucaaggaggaggugcuggcguacgugguccagcugccccucuacggcgugaucgacacccccugcuggaagcugcacacgagcccccugugcaccaccaacaccaaggagggguccaacaucugccucacgcgcaccgaccggggcugguacugcgacaacgccggcagcgucuccuucuucccgcaggccgagaccugcaaggugcagagcaaccgcguguucugcgacaccaugaacucccugacgcugcccagcgagguaaaccucugcaacgucgacaucuucaaccccaaguacgacugcaagaucaugaccuccaagaccgacgugagcuccagcgugaucaccucccugggggccaucgucagcugcuacggcaagacgaagugcaccgccagcaacaagaaccgggggaucaucaagaccuucuccaacggcugcgacuacgugagcaacaagggcguggacaccguguccgucgggaacacccuguacuacgugaacaagcaggagggcaagagccucuacgugaagggggagcccaucaucaacuucuacgacccgcuggucuuccccuccgacgaguucgacgcgagcaucucccaggugaacgagaagaucaaccagagccuggccuucauccgcaaguccgacgagcugcuccacaacgugaacgccggcaagagcacgaccaacaucaugaucaccaccaucaucaucgucaucaucgugauccugcugucccucaucgccguggggcugcugcucuacugcaaggcccggugaggacuaguacuggcugcaucucccuuuccucuguccuccauccuucucccaggauggugaagggggaccugguacccagugauccccaccccaggauccuaaaucaugacuuaccugcuaauaaaaacucauuggaaaagugagaagaucuaaaaaaaaaaaaaaaaaaaaaaaaaaaaaaaaaaaaaaaaaaaaaaaaaaaaaaaaaaaaaaaaugcaucccccccccccccccccccccccccccccccaaaggcucuuuucagagccaccagaauu

SEQ ID NO: 603 - RNA, 2037 nt, Artificial Sequence
  mRNA product Design c-3 comprising derived and/or modified sequence from HRSV(A2)__F-del (opt1)
gggagaguccgcucagccagguugcagaagcggcuuagcguguguccuaaucuucucucugcguguagguaggccugugccgcaaacaagcuuaccauggagcugcucauccugaaggccaacgccaucaccaccauccugacggcggugaccuucugcuucgccagcggccagaacaucaccgaggaguucuaccaguccacgugcagcgccgucuccaagggguaccucagcgcccugcgcaccggcugguacaccuccgugaucaccaucgagcugagcaacaucaaggagaacaagugcaacgggaccgacgccaaggugaagcucaucaagcaggagcuggacaaguacaagaacgcggucacggagcugcagcuccugaugcaguccacccccgccaccaacaaccgggcccgccgggagcugccgcgcuucaugaacuacacccucaacaacgccaagaagacgaacgugacccugagcaagaagcggaagcgccgguuccugggcuuccuccugggggugggcuccgcgaucgccagcggcgucgccguguccaaggugcugcaccucgagggggaggucaacaagaucaagagcgcccugcuguccaccaacaaggccguggugagccucuccaacggcgucagcgugcugaccuccaaggugcuggaccucaagaacuacaucgacaagcagcugcugcccaucgucaacaagcagagcugcuccaucagcaacaucgagacggugaucgaguuccagcagaagaacaaccgccuccuggagaucacccgggaguucagcgugaacgcgggggucaccacccccguguccacguacaugcugaccaacagcgagcuccugucccugaucaacgacaugcccaucaccaacgaccagaagaagcucaugagcaacaacgugcagaucguccgccagcaguccuacagcaucauguccaucaucaaggaggaggugcuggccuacgugguccagcugccgcucuacggcgugaucgacacccccugcuggaagcugcacacgagcccccugugcaccaccaacaccaaggagggguccaacaucugccucacgcggaccgaccgcggcugguacugcgacaacgccggcagcgucuccuucuucccccaggccgagaccugcaaggugcagagcaaccggguguucugcgacaccaugaacucccugacgcugccgagcgaggucaaccucugcaacguggacaucuucaaccccaaguacgacugcaagaucaugaccuccaagaccgacgugagcuccagcgucaucaccucccugggggccaucgugagcugcuacggcaagacgaagugcaccgcgagcaacaagaaccgcgggaucaucaagaccuucuccaacggcugcgacuacgugagcaacaagggcgucgacaccguguccguggggaacacccuguacuacgucaacaagcaggagggcaagagccucuacgugaagggggagcccaucaucaacuucuacgacccccugguguucccguccgacgaguucgacgccagcaucucccaggucaacgagaagaucaaccagagccuggccuucauccggaaguccgacgagcuccugcacaacgugaacgccggcaagagcacgaccaacaucaugaucaccaccaucaucaucgugaucaucgucauccugcugucccucaucgccguggggcugcugcucuacugcaaggcgcgcugaggacuaguacuggcugcaucucccuuuccucuguccuccauccuucucccaggauggugaagggggaccugguacccagugauccccaccccaggauccuaaaucaugacuuaccugcuaauaaaaacucauuggaaaagugagaagaucuaaaaaaaaaaaaaaaaaaaaaaaaaaaaaaaaaaaaaaaaaaaaaaaaaaaaaaaaaaaaaaaaugcaucccccccccccccccccccccccccccccccaaaggcucuuuucagagccaccagaauu

SEQ ID NO: 604 - RNA, 2037 nt, Artificial Sequence
  mRNA product Design c-3 comprising derived and/or modified sequence from HRSV(A2)__F-del (opt2)
gggagaguccgcucagccagguugcagaagcggcuuagcguguguccuaaucuucucucugcguguagguaggccugugccgcaaacaagcuuaccauggagcuccucauccucaaggccaacgccaucaccaccauccucaccgccgucaccuucugcuucgccuccggccagaacaucaccgaggaguucuaccaguccaccugcuccgccgucuccaagggcuaccucuccgcccuccgcaccggcugguacaccuccgucaucaccaucgagcucuccaacaucaaggagaacaagugcaacggcaccgacgccaaggucaagcucaucaagcaggagcucgacaaguacaagaacgccgucaccgagcuccagcuccucaugcaguccacccccgccaccaacaaccgcgcccgccgcgagcucccccgcuucaugaacuacacccucaacaacgccaagaagaccaacgucacccucuccaagaagcgcaagcgccgcuuccucggcuuccuccucggcgucggcuccgccaucgccuccggcgucgccgucuccaagguccuccaccucgagggcgaggucaacaagaucaaguccgcccuccucuccaccaacaaggccgucgucucccucuccaacggcgucuccguccucaccuccaagguccucgaccucaagaacuacaucgacaagcagcuccuccccaucgucaacaagcaguccugcuccaucuccaacaucgagaccgucaucgaguuccagcagaagaacaaccgccuccucgagaucacccgcgaguucuccgucaacgccggcgucaccacccccgucuccaccuacaugcucaccaacuccgagcuccucucccucaucaacgacaugcccaucaccaacgaccagaagaagcucauguccaacaacguccagaucguccgccagcaguccuacuccaucauguccaucaucaaggaggagguccucgccuacgucguccagcucccccucuacggcgucaucgacacccccugcuggaagcuccacaccuccccccucugcaccaccaacaccaaggagggcuccaacaucugccucacccgcaccgaccgcggcugguacugcgacaacgccggcuccgucuccuucuucccccaggccgagaccugcaagguccaguccaaccgcgucuucugcgacaccaugaacucccucacccuccccuccgaggucaaccucugcaacgucgacaucuucaaccccaaguacgacugcaagaucaugaccuccaagaccgacgucuccuccuccgucaucaccucccucggcgccaucgucuccugcuacggcaagaccaagugcaccgccuccaacaagaaccgcggcaucaucaagaccuucuccaacggcugcgacuacgucuccaacaagggcgucgacaccgucuccgucggcaacacccucuacuacgucaacaagcaggagggcaagucccucuacgucaagggcgagcccaucaucaacuucuacgacccccucgucuuccccuccgacgaguucgacgccuccaucucccaggucaacgagaagaucaaccagucccucgccuucauccgcaaguccgacgagcuccuccacaacgucaacgccggcaaguccaccaccaacaucaugaucaccaccaucaucaucgucaucaucgucauccuccucucccucaucgccgucggccuccuccucuacugcaaggcccgcugaggacuaguacuggcugcaucucccuuuccucuguccuccauccuucucccaggauggugaagggggaccugguacccagugauccccaccccaggauccuaaaucaugacuuaccugcuaauaaaaacucauuggaaaagugagaagaucuaaaaaaaaaaaaaaaaaaaaaaaaaaaaaaaaaaaaaaaaaaaaaaaaaaaaaaaaaaaaaaaaugcaucccccccccccccccccccccccccccccccaaaggcucuuuucagagccaccagaauu

SEQ ID NO: 605 - RNA, 2037 nt, Artificial Sequence
  mRNA product Design c-3 comprising derived and/or modified sequence from HRSV(A2)__F-del (opt3)
gggagaguccgcucagccagguugcagaagcggcuuagcguguguccuaaucuucucucugcguguagguaggccugugccgcaaacaagcuuaccauggagcugcucauccuuaaggccaacgcuauuaccacaauacugacugcagugacguucugcuuugccagcggccagaauaucaccgaagaguucuaccaauccacauguucugcggucucaaaaggguauuugagugcuuuaagaacuggaugguacaccagcguuauuacaaucgaacuguccaacauuaaggagaauaaaugcaacgguaccgacgccaaggugaaacuaaucaagcaggaacucgauaaguauaaaaaugcaguaacugagcugcagcuucugaugcagucuacacccgccaccaacaauagggcucggcgcgaguugccucgauuuaugaacuacacgcucaauaacgcaaagaaaacuaaugugacccugucgaagaaacguaagagaagguuccugggcuuucucuuaggggucggaucagccauagcuagcggcguggccguuaguaaggugcugcaccuugaaggugaggucaacaaaaucaaguccgcguugcugucuacaaauaaagcagugguaagccuauccaacgggguuucagugcucacuucuaagguccuggaccuuaaaaauuauauugauaagcaacuguugccaaucgugaacaaacagagcuguucuauuuccaacaucgaaaccgugauagaguuccagcagaagaauaaccggcuccuggagauuacacgcgaauuuucagucaaugccggaguuaccacgccggugagcacuuacauguuaacaaacagugagcugcucucucuuaucaaugacaugcccauuaccaacgaucaaaagaaacugauguccaauaacguacagaucgugagacagcagagcuauucgaucaugucuauuauaaaggaagaggucuuggcuuacgugguucaacuaccucuguacggcgugaucgacacuccaugcuggaaacuccauacauccccacuguguaccacgaauaccaaggaaggcucaaacauuugccuuacaaggacugaucgggggugguauugugacaaugccggaagugucagcuucuuuccucaggcagagaccugcaaagugcaguccaaccgcguauucugugauacaaugaauagucugacuuugccaagcgagguuaaccucugcaauguggacaucuuuaaccccaaguacgauuguaagauaaugaccucaaaaacagacgucaguuccagcgugauuaccucucugggugcuaucgucucaugcuauggcaagacuaaaugcacggccaguaacaagaaucgagggaucauuaaaacauucagcaacggaugugauuacguguccaauaagggcguugacaccgugucuguagguaacacuuuauauuacgucaauaagcaagaagggaaaucgcuguaugugaagggagagccuaucauuaacuuuuacgacccccuaguuuucccgagcgaugaauuugacgcguccauaucacaggugaaugagaaaaucaaccagagucucgccuucauuagaaagucugaugaacugcuucacaaugucaacgcaggcaaaagcaccacaaauaucaugaucaccacuauuauaaucgugauuaucguaauuuugcugucccucaucgcugugggccugcuucuguacugcaaggccaggugaggacuaguacuggcugcaucucccuuuccucuguccuccauccuucucccaggauggugaagggggaccugguacccagugauccccaccccaggauccuaaaucaugacuuaccugcuaauaaaaacucauuggaaaagugagaagaucuaaaaaaaaaaaaaaaaaaaaaaaaaaaaaaaaaaaaaaaaaaaaaaaaaaaaaaaaaaaaaaaaugcaucccccccccccccccccccccccccccccccaaaggcucuuuucagagccaccagaauu

SEQ ID NO: 606 - RNA, 2037 nt, Artificial Sequence
  mRNA product Design c-3 comprising derived and/or modified sequence from HRSV(A2)__F-del (opt4)
gggagaguccgcucagccagguugcagaagcggcuuagcguguguccuaaucuucucucugcguguagguaggccugugccgcaaacaagcuuaccauggagcugcugauccugaaggccaacgccaucaccaccauccugaccgccgugaccuucugcuucgccagcggccagaacaucaccgaggaguucuaccagagcaccugcagcgccgugagcaagggcuaccugagcgcccugagaaccggcugguacaccagcgugaucaccaucgagcugagcaacaucaaggagaacaagugcaacggcaccgacgccaaggugaagcugaucaagcaggagcuggacaaguacaagaacgccgugaccgagcugcagcugcugaugcagagcacccccgccaccaacaacagagccagaagagagcugcccagauucaugaacuacacccugaacaacgccaagaagaccaacgugacccugagcaagaagagaaagagaagauuccugggcuuccugcugggcgugggcagcgccaucgccagcggcguggccgugagcaaggugcugcaccuggagggcgaggugaacaagaucaagagcgcccugcugagcaccaacaaggccguggugagccugagcaacggcgugagcgugcugaccagcaaggugcuggaccugaagaacuacaucgacaagcagcugcugcccaucgugaacaagcagagcugcagcaucagcaacaucgagaccgugaucgaguuccagcagaagaacaacagacugcuggagaucaccagagaguucagcgugaacgccggcgugaccacccccgugagcaccuacaugcugaccaacagcgagcugcugagccugaucaacgacaugcccaucaccaacgaccagaagaagcugaugagcaacaacgugcagaucgugagacagcagagcuacagcaucaugagcaucaucaaggaggaggugcuggccuacguggugcagcugccccuguacggcgugaucgacacccccugcuggaagcugcacaccagcccccugugcaccaccaacaccaaggagggcagcaacaucugccugaccagaaccgacagaggcugguacugcgacaacgccggcagcgugagcuucuucccccaggccgagaccugcaaggugcagagcaacagaguguucugcgacaccaugaacagccugacccugcccagcgaggugaaccugugcaacguggacaucuucaaccccaaguacgacugcaagaucaugaccagcaagaccgacgugagcagcagcgugaucaccagccugggcgccaucgugagcugcuacggcaagaccaagugcaccgccagcaacaagaacagaggcaucaucaagaccuucagcaacggcugcgacuacgugagcaacaagggcguggacaccgugagcgugggcaacacccuguacuacgugaacaagcaggagggcaagagccuguacgugaagggcgagcccaucaucaacuucuacgacccccugguguuccccagcgacgaguucgacgccagcaucagccaggugaacgagaagaucaaccagagccuggccuucaucagaaagagcgacgagcugcugcacaacgugaacgccggcaagagcaccaccaacaucaugaucaccaccaucaucaucgugaucaucgugauccugcugagccugaucgccgugggccugcugcuguacugcaaggccagaugaggacuaguacuggcugcaucucccuuuccucuguccuccauccuucucccaggauggugaagggggaccugguacccagugauccccaccccaggauccuaaaucaugacuuaccugcuaauaaaaacucauuggaaaagugagaagaucuaaaaaaaaaaaaaaaaaaaaaaaaaaaaaaaaaaaaaaaaaaaaaaaaaaaaaaaaaaaaaaaaugcaucccccccccccccccccccccccccccccccaaaggcucuuuucagagccaccagaauu

SEQ ID NO: 607 - RNA, 2037 nt, Artificial Sequence
  mRNA product Design c-3 comprising derived and/or modified sequence from HRSV(A2)__F-del (opt5)
gggagaguccgcucagccagguugcagaagcggcuuagcguguguccuaaucuucucucugcguguagguaggccugugccgcaaacaagcuuaccauggagcugcucauccugaaggccaacgcuauuaccacaauccuuacggccgugaccuucugcuuugcgagcggccagaauauuacagaagaguucuaccaauccaccuguucugcugucagcaaaggguaucuguccgcccucagaacaggaugguacaccucuguuaucacaauugaacugagcaacaucaaggagaauaaaugcaacggcaccgacgccaaggugaaacuuaucaagcaggaacuggauaaguauaaaaaugcugugacggagcuccagcugcugaugcaguccacccccgccacaaacaaucgggcucgcagagagcucccucgguuuaugaacuacacccugaauaacgccaagaaaacaaaugucacccuuucuaagaaacgcaagagacgguuccugggguuucuccugggagugggcagcgcgauugccuccgggguugcugugagcaagguccuucaccuggaaggagaggugaacaaaaucaagucugcccuccuguccacgaauaaagcuguugugagccugucuaacggcgucuccgugcucacaagcaaggugcuggaccuuaaaaauuauauugauaagcaacugcucccgaucgucaacaaacagucuuguuccauuagcaacaucgaaaccguuauugaguuccagcagaagaauaaccgccugcuugagaucacaagagaauuuuccgugaaugccggcgugaccacccccgucucuacauacaugcugacgaacagcgagcuccugucccugaucaaugacaugccuauuaccaacgaucaaaagaaacucaugagcaauaacgugcagaucguucggcagcagucuuauuccauuaugagcaucauuaaggaagaggugcuggcguacgucgugcaacuuccccuguacgggguuaucgacacaccuugcuggaaacuccauaccucuccccuguguacaaccaauacgaaggaaggaagcaacaucugccuuacacgcaccgauagaggcugguauugugacaaugccggguccgugucuuucuuuccucaggcugagaccugcaaaguccagagcaaccggguguucugugauacaaugaacucccugacccucccgagcgaggucaaucugugcaauguggacauuuuuaaccccaaguacgauuguaagaucaugacaucuaaaacggacguuuccagcucugugauuaccucccugggagccaucgucagcugcuauggcaagacaaaaugcaccgcuuccaacaagaaucgcgggauuaucaaaacauucucuaacggaugugauuacgugagcaauaagggcguugacaccguguccgucggcaacacgcucuauuacgugaauaagcaagaagggaaaucucuguaugugaagggagagccuaucauuaacuuuuacgacccccuuguuuucccuagcgaugaauuugacgccuccaucagccaggucaaugagaaaauuaaccagucucuggccuucaucagaaaguccgaugaacuccugcacaaugugaacgcuggcaaaagcaccacaaauauuaugaucaccacaauuaucaucgugauuaucgucauucugcuuucucucaucgcgguggggcugcugcucuacugcaaggcccggugaggacuaguacuggcugcaucucccuuuccucuguccuccauccuucucccaggauggugaagggggaccugguacccagugauccccaccccaggauccuaaaucaugacuuaccugcuaauaaaaacucauuggaaaagugagaagaucuaaaaaaaaaaaaaaaaaaaaaaaaaaaaaaaaaaaaaaaaaaaaaaaaaaaaaaaaaaaaaaaaugcaucccccccccccccccccccccccccccccccaaaggcucuuuucagagccaccagaauu

SEQ ID NO: 608 - RNA, 2037 nt, Artificial Sequence
  mRNA product Design c-3 comprising derived and/or modified sequence from HRSV(A2)__F-del (opt6)
gggagaguccgcucagccagguugcagaagcggcuuagcguguguccuaaucuucucucugcguguagguaggccugugccgcaaacaagcuuaccauggaauuacuaauacucaaagccaacgcaauaacaacaauacuaacagcaguaacauucugcuucgcaucaggacaaaacaucacagaagaauuuuaccaaaguacaugcagugcagucucuaaaggauaccucagugccuuacgcacaggaugguacacaucaguaauaacaaucgaacuuucaaacauaaaagaaaacaaaugcaauggaaccgacgccaaaguaaaacuaaucaaacaagaacuagacaaauauaaaaaugcaguaacagaauuacaacuccuaaugcaauccacaccagcaacaaauaacagagcaagacgagaacucccucgauucaugaauuacacauuaaacaacgcaaaaaaaacuaacguaacuuuaucaaaaaaaagaaaacguagauuucuaggauuccuacuaggcguaggguccgccauugcaucaggaguagcaguuagcaaaguauuacauuuagaaggagaaguaaauaaaaucaaaagcgcacuacucucaaccaacaaagcaguaguaucacucucaaacggaguaucaguacuaacauccaaaguacucgaccucaaaaacuacauagacaaacaauuacuacccauaguaaacaaacaaucaugcucuauaucaaauaucgaaacaguaaucgaauuucaacaaaaaaacaaucgacuacuugaaauaacaagagaguucuccgucaaugccggagucaccacaccagucucaacauacaugcuaaccaacucugaacuccuaucacuaauaaaugacaugccaauaacaaacgaccaaaaaaaacuaaugucaaauaacguacaaauaguacgacaacaaaguuauuccauaaugaguauaaucaaagaagaaguguuagcauacguaguccaacuaccauuauauggaguaauagacacaccauguuggaaauuacacaccucaccacucugcacuaccaauacaaaagaaggcucaaauauaugccuaacucgcacagacagaggcugguacugcgauaacgcaggauccguaucuuucuuuccccaagcagaaacuugcaaaguacaaucaaacagagucuucugcgacaccaugaauagucucacauuaccaucugaaguaaaccuauguaacguagauauauucaauccaaaauacgacugcaaaauaaugacaucaaaaaccgacgucucuagcaguguaaucacaucacuaggagcaauaguaagcugcuauggaaaaacaaaauguacagcaucaaacaaaaacaggggaauaauaaaaaccuucucaaacggaugugacuacguaucaaauaaaggcguagacacaguaagcguaggaaacacccuauacuacguuaacaaacaagaagggaaaucauuauacguaaaaggagaaccaauaauaaacuucuacgauccacucguauucccauccgacgaauuugacgccagcauaucccaaguuaacgaaaaaauaaaccaaucacuugcauuuauacgaaaaucugaugaacuucuccacaacguaaaugcaggaaaauccaccaccaauauaaugaucacaacuaucaucauaguaauaaucgucauuuuacuaucauuaauagcaguuggccuacuucuauacugcaaagcaagauaaggacuaguacuggcugcaucucccuuuccucuguccuccauccuucucccaggauggugaagggggaccugguacccagugauccccaccccaggauccuaaaucaugacuuaccugcuaauaaaaacucauuggaaaagugagaagaucuaaaaaaaaaaaaaaaaaaaaaaaaaaaaaaaaaaaaaaaaaaaaaaaaaaaaaaaaaaaaaaaaugcaucccccccccccccccccccccccccccccccaaaggcucuuuucagagccaccagaauu

SEQ ID NO: 609 - RNA, 2037 nt, Artificial Sequence
  mRNA product Design c-3 comprising derived and/or modified sequence from HRSV(A2)__F-del (opt11)
gggagaguccgcucagccagguugcagaagcggcuuagcguguguccuaaucuucucucugcguguagguaggccugugccgcaaacaagcuuaccauggaacuacuaauccuaaaagccaacgcgaucaccaccauccuaacggcagucaccuucugcuucgcaucaggccaaaacaucacagaagaguucuaccaaagcacaugcuccgccguauccaaaggcuaccucagcgcccuacgcacaggcugguacacaucugucaucaccauagaacucuccaacaucaaagaaaacaaaugcaacggcacugacgccaaaguaaagcugaucaaacaagaacucgacaaauacaaaaacgcagucaccgaacuccaacuacucaugcaauccaccccugcaaccaacaacagggcccgccgcgaacucccccgcuucaugaacuacacuuuaaacaacgccaaaaagaccaacgucacacucagcaagaaacggaaacgacgauuccuaggguuucuccuaggcgucggcucggcaaucgccuccggcgucgccguaagcaaaguacuacaccuagaaggcgaagugaacaaaaucaaaagugcccuucucuccaccaacaaggccguagucucucuauccaacggagucucaguccucaccucaaagguccucgaccucaaaaacuacaucgacaaacaacuacuccccauugucaacaagcagucaugcuccauaucaaacaucgaaaccgucaucgaguuccaacagaaaaacaaccgacuccucgaaauaaccagagaguucucggucaacgccggcgucaccaccccagucagcaccuacaugcucacuaacuccgaacuccuaucccucaucaacgacaugccaauuaccaacgaccaaaagaaacuaaugucgaacaacguucaaaucguccgacaacaaaguuacuccaucaugagcauaaucaaagaagaaguucuagcguacgucguccaacucccacuauacggcgucaucgacacuccgugcuggaaacuccacacaucaccccuauguacaaccaacacaaaagaaggcagcaacaucugccucacccgcaccgaccgagggugguauugcgauaacgcuggcagcgucuccuucuucccccaagccgaaaccugcaaaguccaaucaaacagaguauucugcgacaccaugaacucccuuacucucccuagcgaagucaaccucugcaacguugacauauucaaccccaaauacgacugcaaaaucaugaccuccaagaccgacgucuccuccuccgucaucacaucucuaggugccauugucuccugcuacggaaaaaccaaaugcacagccuccaacaaaaaccgcggcaucauaaaaaccuucuccaacggcugcgacuacgucaguaauaaaggcgucgacacgguauccguugggaauacgcuuuacuacguaaauaaacaagaaggcaaaucccucuacgucaaaggugaacccaucauaaacuucuacgacccgcuuguguucccauccgacgaguucgacgccagcaucagccaggucaacgaaaagaucaaccaaucccuagccuucauccgcaaaagcgacgaacuacuacacaacgucaacgccggaaaauccacaaccaacaucaugaucaccaccaucaucaucgucaucaucguaauccuacucucucucaucgccgucggccuccuacuguacuguaaagcccgauagggacuaguacuggcugcaucucccuuuccucuguccuccauccuucucccaggauggugaagggggaccugguacccagugauccccaccccaggauccuaaaucaugacuuaccugcuaauaaaaacucauuggaaaagugagaagaucuaaaaaaaaaaaaaaaaaaaaaaaaaaaaaaaaaaaaaaaaaaaaaaaaaaaaaaaaaaaaaaaaugcaucccccccccccccccccccccccccccccccaaaggcucuuuucagagccaccagaauu

SEQ ID NO: 610 - RNA, 2033 nt, Artificial Sequence
  mRNA product Design c-4 comprising derived and/or modified sequence from HRSV(A2)__F-del (artificial)
gggagaguccgcucagccagguugcagaagcggcuuagcguguguccuaaucuucucucugcguguagguaggccugugccgcaaacaagcuuaccauggaguugcuaauccucaaagcaaaugcaauuaccacaauccucacugcagucacauuuuguuuugcuucuggucaaaacaucacugaagaauuuuaucaaucaacaugcagugcaguuagcaaaggcuaucuuagugcucugagaacugguugguauaccaguguuauaacuauagaauuaaguaauaucaaggaaaauaaguguaauggaacagaugcuaagguaaaauugauaaaacaagaauuagauaaauauaaaaaugcuguaacagaauugcaguugcucaugcaaagcacaccagcaacaaacaaucgagccagaagagaacuaccaagguuuaugaauuauacacucaacaaugccaaaaaaaccaauguaacauuaagcaagaaaaggaaaagaagauuucuugguuuuuuguuagguguuggaucugcaaucgccaguggcguugcuguaucuaagguccugcaccuagaaggggaagugaacaagaucaaaagugcucuacuauccacaaacaaggcuguagucagcuuaucaaauggaguuagugucuuaaccagcaaaguguuagaccucaaaaacuauauagauaaacaauuguuaccuauugugaacaagcaaagcugcagcauaucaaauauagaaacugugauagaguuccaacaaaagaacaacagacuacuagagauuaccagggaauuuaguguuaaugcagguguaacuacaccuguaagcacuuacauguuaacuaauagugaauuauugucauuaaucaaugauaugccuauaacaaaugaucagaaaaaguuaauguccaacaauguucaaauaguuagacagcaaaguuacucuaucauguccauaauaaaagaggaagucuuagcauauguaguacaauuaccacuauaugguguuauagauacacccuguuggaaacuacacacauccccucuauguacaaccaacacaaaagaaggguccaacaucuguuuaacaagaacugacagaggaugguacugugacaaugcaggaucaguaucuuucuucccacaagcugaaacauguaaaguucaaucaaaucgaguauuuugugacacaaugaacaguuuaacauuaccaagugaaguaaaucucugcaauguugacauauucaaccccaaauaugauuguaaaauuaugacuucaaaaacagauguaagcagcuccguuaucacaucucuaggagccauugugucaugcuauggcaaaacuaaauguacagcauccaauaaaaaucguggaaucauaaagacauuuucuaacgggugcgauuauguaucaaauaaagggguggacacugugucuguagguaacacauuauauuauguaaauaagcaagaagguaaaagucucuauguaaaaggugaaccaauaauaaauuucuaugacccauuaguauuccccucugaugaauuugaugcaucaauaucucaagucaacgagaagauuaaccagagccuagcauuuauucguaaauccgaugaauuauuacauaauguaaaugcugguaaauccaccacaaauaucaugauaacuacuauaauuauagugauuauaguaauauuguuaucauuaauugcuguuggacugcucuuauacuguaaggccagauaaggacuaguggaagcauuuuccuggcugauuaaaagaaauuacucagcuauggucaucuguuccuguuagaaggcuaugcagcauauuauauacuaugcgcauguuaugaaaugcauaauaaaaaauuuuaaaaaaucuaaaagaucuaaaaaaaaaaaaaaaaaaaaaaaaaaaaaaaaaaaaaaaaaaaaaaaaaaaaaaaaaaaaaaaaugcaucccccccccccccccccccccccccccccccaaaggcucuuuucagagccaccagaauu

SEQ ID NO: 611 - RNA, 2033 nt, Artificial Sequence
  mRNA product Design c-4 comprising derived and/or modified sequence from HRSV(A2)__F-del (opt1)
gggagaguccgcucagccagguugcagaagcggcuuagcguguguccuaaucuucucucugcguguagguaggccugugccgcaaacaagcuuaccauggagcugcucauccugaaggccaacgccaucaccaccauccugacggcggugaccuucugcuucgccagcggccagaacaucaccgaggaguucuaccaguccaccugcagcgccgucuccaagggguaccucagcgcccugcggacgggcugguacaccuccgugaucaccaucgagcugagcaacaucaaggagaacaagugcaacgggaccgacgccaaggugaagcucaucaagcaggagcuggacaaguacaagaacgcggucacggagcugcagcuccugaugcaguccaccccggcaaccaacaaccgcgcccggcgcgagcugccccgguucaugaacuacacccucaacaacgccaagaagacgaacgugacccugagcaagaagcgcaagcggcgcuuccugggcuuccuccugggggugggcuccgccaucgcgagcggcgucgccguguccaaggugcugcaccucgagggggaggucaacaagaucaagagcgcccugcuguccaccaacaaggccguggugagccucuccaacggcgucagcgugcugaccuccaaggugcuggaccucaagaacuacaucgacaagcagcugcugcccaucgucaacaagcagagcugcuccaucagcaacaucgagacggugaucgaguuccagcagaagaacaaccggcuccuggagaucacccgcgaguucagcgugaacgccggggucaccacccccguguccacguacaugcugaccaacagcgagcuccugucccugaucaacgacaugccgaucaccaacgaccagaagaagcucaugagcaacaacgugcagaucguccggcagcaguccuacagcaucauguccaucaucaaggaggaggugcuggcguacgugguccagcugccccucuacggcgugaucgacacccccugcuggaagcugcacacgagcccccugugcaccaccaacaccaaggagggguccaacaucugccucacgcgcaccgaccggggcugguacugcgacaacgccggcagcgucuccuucuucccgcaggccgagaccugcaaggugcagagcaaccgcguguucugcgacaccaugaacucccugacgcugcccagcgagguaaaccucugcaacgucgacaucuucaaccccaaguacgacugcaagaucaugaccuccaagaccgacgugagcuccagcgugaucaccucccugggggccaucgucagcugcuacggcaagacgaagugcaccgccagcaacaagaaccgggggaucaucaagaccuucuccaacggcugcgacuacgugagcaacaagggcguggacaccguguccgucgggaacacccuguacuacgugaacaagcaggagggcaagagccucuacgugaagggggagcccaucaucaacuucuacgacccgcuggucuuccccuccgacgaguucgacgcgagcaucucccaggugaacgagaagaucaaccagagccuggccuucauccgcaaguccgacgagcugcuccacaacgugaacgccggcaagagcacgaccaacaucaugaucaccaccaucaucaucgucaucaucgugauccugcugucccucaucgccguggggcugcugcucuacugcaaggcccggugaggacuaguggaagcauuuuccuggcugauuaaaagaaauuacucagcuauggucaucuguuccuguuagaaggcuaugcagcauauuauauacuaugcgcauguuaugaaaugcauaauaaaaaauuuuaaaaaaucuaaaagaucuaaaaaaaaaaaaaaaaaaaaaaaaaaaaaaaaaaaaaaaaaaaaaaaaaaaaaaaaaaaaaaaaugcaucccccccccccccccccccccccccccccccaaaggcucuuuucagagccaccagaauu

SEQ ID NO: 612 - RNA, 2033 nt, Artificial Sequence
  mRNA product Design c-4 comprising derived and/or modified sequence from HRSV(A2)__F-del (opt1)
gggagaguccgcucagccagguugcagaagcggcuuagcguguguccuaaucuucucucugcguguagguaggccugugccgcaaacaagcuuaccauggagcugcucauccugaaggccaacgccaucaccaccauccugacggcggugaccuucugcuucgccagcggccagaacaucaccgaggaguucuaccaguccacgugcagcgccgucuccaagggguaccucagcgcccugcgcaccggcugguacaccuccgugaucaccaucgagcugagcaacaucaaggagaacaagugcaacgggaccgacgccaaggugaagcucaucaagcaggagcuggacaaguacaagaacgcggucacggagcugcagcuccugaugcaguccacccccgccaccaacaaccgggcccgccgggagcugccgcgcuucaugaacuacacccucaacaacgccaagaagacgaacgugacccugagcaagaagcggaagcgccgguuccugggcuuccuccugggggugggcuccgcgaucgccagcggcgucgccguguccaaggugcugcaccucgagggggaggucaacaagaucaagagcgcccugcuguccaccaacaaggccguggugagccucuccaacggcgucagcgugcugaccuccaaggugcuggaccucaagaacuacaucgacaagcagcugcugcccaucgucaacaagcagagcugcuccaucagcaacaucgagacggugaucgaguuccagcagaagaacaaccgccuccuggagaucacccgggaguucagcgugaacgcgggggucaccacccccguguccacguacaugcugaccaacagcgagcuccugucccugaucaacgacaugcccaucaccaacgaccagaagaagcucaugagcaacaacgugcagaucguccgccagcaguccuacagcaucauguccaucaucaaggaggaggugcuggccuacgugguccagcugccgcucuacggcgugaucgacacccccugcuggaagcugcacacgagcccccugugcaccaccaacaccaaggagggguccaacaucugccucacgcggaccgaccgcggcugguacugcgacaacgccggcagcgucuccuucuucccccaggccgagaccugcaaggugcagagcaaccggguguucugcgacaccaugaacucccugacgcugccgagcgaggucaaccucugcaacguggacaucuucaaccccaaguacgacugcaagaucaugaccuccaagaccgacgugagcuccagcgucaucaccucccugggggccaucgugagcugcuacggcaagacgaagugcaccgcgagcaacaagaaccgcgggaucaucaagaccuucuccaacggcugcgacuacgugagcaacaagggcgucgacaccguguccguggggaacacccuguacuacgucaacaagcaggagggcaagagccucuacgugaagggggagcccaucaucaacuucuacgacccccugguguucccguccgacgaguucgacgccagcaucucccaggucaacgagaagaucaaccagagccuggccuucauccggaaguccgacgagcuccugcacaacgugaacgccggcaagagcacgaccaacaucaugaucaccaccaucaucaucgugaucaucgucauccugcugucccucaucgccguggggcugcugcucuacugcaaggcgcgcugaggacuaguggaagcauuuuccuggcugauuaaaagaaauuacucagcuauggucaucuguuccuguuagaaggcuaugcagcauauuauauacuaugcgcauguuaugaaaugcauaauaaaaaauuuuaaaaaaucuaaaagaucuaaaaaaaaaaaaaaaaaaaaaaaaaaaaaaaaaaaaaaaaaaaaaaaaaaaaaaaaaaaaaaaaugcaucccccccccccccccccccccccccccccccaaaggcucuuuucagagccaccagaauu

SEQ ID NO: 613 - RNA, 2033 nt, Artificial Sequence
  mRNA product Design c-4 comprising derived and/or modified sequence from HRSV(A2)__F-del (opt2)
gggagaguccgcucagccagguugcagaagcggcuuagcguguguccuaaucuucucucugcguguagguaggccugugccgcaaacaagcuuaccauggagcuccucauccucaaggccaacgccaucaccaccauccucaccgccgucaccuucugcuucgccuccggccagaacaucaccgaggaguucuaccaguccaccugcuccgccgucuccaagggcuaccucuccgcccuccgcaccggcugguacaccuccgucaucaccaucgagcucuccaacaucaaggagaacaagugcaacggcaccgacgccaaggucaagcucaucaagcaggagcucgacaaguacaagaacgccgucaccgagcuccagcuccucaugcaguccacccccgccaccaacaaccgcgcccgccgcgagcucccccgcuucaugaacuacacccucaacaacgccaagaagaccaacgucacccucuccaagaagcgcaagcgccgcuuccucggcuuccuccucggcgucggcuccgccaucgccuccggcgucgccgucuccaagguccuccaccucgagggcgaggucaacaagaucaaguccgcccuccucuccaccaacaaggccgucgucucccucuccaacggcgucuccguccucaccuccaagguccucgaccucaagaacuacaucgacaagcagcuccuccccaucgucaacaagcaguccugcuccaucuccaacaucgagaccgucaucgaguuccagcagaagaacaaccgccuccucgagaucacccgcgaguucuccgucaacgccggcgucaccacccccgucuccaccuacaugcucaccaacuccgagcuccucucccucaucaacgacaugcccaucaccaacgaccagaagaagcucauguccaacaacguccagaucguccgccagcaguccuacuccaucauguccaucaucaaggaggagguccucgccuacgucguccagcucccccucuacggcgucaucgacacccccugcuggaagcuccacaccuccccccucugcaccaccaacaccaaggagggcuccaacaucugccucacccgcaccgaccgcggcugguacugcgacaacgccggcuccgucuccuucuucccccaggccgagaccugcaagguccaguccaaccgcgucuucugcgacaccaugaacucccucacccuccccuccgaggucaaccucugcaacgucgacaucuucaaccccaaguacgacugcaagaucaugaccuccaagaccgacgucuccuccuccgucaucaccucccucggcgccaucgucuccugcuacggcaagaccaagugcaccgccuccaacaagaaccgcggcaucaucaagaccuucuccaacggcugcgacuacgucuccaacaagggcgucgacaccgucuccgucggcaacacccucuacuacgucaacaagcaggagggcaagucccucuacgucaagggcgagcccaucaucaacuucuacgacccccucgucuuccccuccgacgaguucgacgccuccaucucccaggucaacgagaagaucaaccagucccucgccuucauccgcaaguccgacgagcuccuccacaacgucaacgccggcaaguccaccaccaacaucaugaucaccaccaucaucaucgucaucaucgucauccuccucucccucaucgccgucggccuccuccucuacugcaaggcccgcugaggacuaguggaagcauuuuccuggcugauuaaaagaaauuacucagcuauggucaucuguuccuguuagaaggcuaugcagcauauuauauacuaugcgcauguuaugaaaugcauaauaaaaaauuuuaaaaaaucuaaaagaucuaaaaaaaaaaaaaaaaaaaaaaaaaaaaaaaaaaaaaaaaaaaaaaaaaaaaaaaaaaaaaaaaugcaucccccccccccccccccccccccccccccccaaaggcucuuuucagagccaccagaauu

SEQ ID NO: 614 - RNA, 2033 nt, Artificial Sequence
  mRNA product Design c-4 comprising derived and/or modified sequence from HRSV(A2)__F-del (opt3)
gggagaguccgcucagccagguugcagaagcggcuuagcguguguccuaaucuucucucugcguguagguaggccugugccgcaaacaagcuuaccauggagcugcucauccuuaaggccaacgcuauuaccacaauacugacugcagugacguucugcuuugccagcggccagaauaucaccgaagaguucuaccaauccacauguucugcggucucaaaaggguauuugagugcuuuaagaacuggaugguacaccagcguuauuacaaucgaacuguccaacauuaaggagaauaaaugcaacgguaccgacgccaaggugaaacuaaucaagcaggaacucgauaaguauaaaaaugcaguaacugagcugcagcuucugaugcagucuacacccgccaccaacaauagggcucggcgcgaguugccucgauuuaugaacuacacgcucaauaacgcaaagaaaacuaaugugacccugucgaagaaacguaagagaagguuccugggcuuucucuuaggggucggaucagccauagcuagcggcguggccguuaguaaggugcugcaccuugaaggugaggucaacaaaaucaaguccgcguugcugucuacaaauaaagcagugguaagccuauccaacgggguuucagugcucacuucuaagguccuggaccuuaaaaauuauauugauaagcaacuguugccaaucgugaacaaacagagcuguucuauuuccaacaucgaaaccgugauagaguuccagcagaagaauaaccggcuccuggagauuacacgcgaauuuucagucaaugccggaguuaccacgccggugagcacuuacauguuaacaaacagugagcugcucucucuuaucaaugacaugcccauuaccaacgaucaaaagaaacugauguccaauaacguacagaucgugagacagcagagcuauucgaucaugucuauuauaaaggaagaggucuuggcuuacgugguucaacuaccucuguacggcgugaucgacacuccaugcuggaaacuccauacauccccacuguguaccacgaauaccaaggaaggcucaaacauuugccuuacaaggacugaucgggggugguauugugacaaugccggaagugucagcuucuuuccucaggcagagaccugcaaagugcaguccaaccgcguauucugugauacaaugaauagucugacuuugccaagcgagguuaaccucugcaauguggacaucuuuaaccccaaguacgauuguaagauaaugaccucaaaaacagacgucaguuccagcgugauuaccucucugggugcuaucgucucaugcuauggcaagacuaaaugcacggccaguaacaagaaucgagggaucauuaaaacauucagcaacggaugugauuacguguccaauaagggcguugacaccgugucuguagguaacacuuuauauuacgucaauaagcaagaagggaaaucgcuguaugugaagggagagccuaucauuaacuuuuacgacccccuaguuuucccgagcgaugaauuugacgcguccauaucacaggugaaugagaaaaucaaccagagucucgccuucauuagaaagucugaugaacugcuucacaaugucaacgcaggcaaaagcaccacaaauaucaugaucaccacuauuauaaucgugauuaucguaauuuugcugucccucaucgcugugggccugcuucuguacugcaaggccaggugaggacuaguggaagcauuuuccuggcugauuaaaagaaauuacucagcuauggucaucuguuccuguuagaaggcuaugcagcauauuauauacuaugcgcauguuaugaaaugcauaauaaaaaauuuuaaaaaaucuaaaagaucuaaaaaaaaaaaaaaaaaaaaaaaaaaaaaaaaaaaaaaaaaaaaaaaaaaaaaaaaaaaaaaaaugcaucccccccccccccccccccccccccccccccaaaggcucuuuucagagccaccagaauu

SEQ ID NO: 615 - RNA, 2033 nt, Artificial Sequence
  mRNA product Design c-4 comprising derived and/or modified sequence from HRSV(A2)__F-del (opt4)
gggagaguccgcucagccagguugcagaagcggcuuagcguguguccuaaucuucucucugcguguagguaggccugugccgcaaacaagcuuaccauggagcugcugauccugaaggccaacgccaucaccaccauccugaccgccgugaccuucugcuucgccagcggccagaacaucaccgaggaguucuaccagagcaccugcagcgccgugagcaagggcuaccugagcgcccugagaaccggcugguacaccagcgugaucaccaucgagcugagcaacaucaaggagaacaagugcaacggcaccgacgccaaggugaagcugaucaagcaggagcuggacaaguacaagaacgccgugaccgagcugcagcugcugaugcagagcacccccgccaccaacaacagagccagaagagagcugcccagauucaugaacuacacccugaacaacgccaagaagaccaacgugacccugagcaagaagagaaagagaagauuccugggcuuccugcugggcgugggcagcgccaucgccagcggcguggccgugagcaaggugcugcaccuggagggcgaggugaacaagaucaagagcgcccugcugagcaccaacaaggccguggugagccugagcaacggcgugagcgugcugaccagcaaggugcuggaccugaagaacuacaucgacaagcagcugcugcccaucgugaacaagcagagcugcagcaucagcaacaucgagaccgugaucgaguuccagcagaagaacaacagacugcuggagaucaccagagaguucagcgugaacgccggcgugaccacccccgugagcaccuacaugcugaccaacagcgagcugcugagccugaucaacgacaugcccaucaccaacgaccagaagaagcugaugagcaacaacgugcagaucgugagacagcagagcuacagcaucaugagcaucaucaaggaggaggugcuggccuacguggugcagcugccccuguacggcgugaucgacacccccugcuggaagcugcacaccagcccccugugcaccaccaacaccaaggagggcagcaacaucugccugaccagaaccgacagaggcugguacugcgacaacgccggcagcgugagcuucuucccccaggccgagaccugcaaggugcagagcaacagaguguucugcgacaccaugaacagccugacccugcccagcgaggugaaccugugcaacguggacaucuucaaccccaaguacgacugcaagaucaugaccagcaagaccgacgugagcagcagcgugaucaccagccugggcgccaucgugagcugcuacggcaagaccaagugcaccgccagcaacaagaacagaggcaucaucaagaccuucagcaacggcugcgacuacgugagcaacaagggcguggacaccgugagcgugggcaacacccuguacuacgugaacaagcaggagggcaagagccuguacgugaagggcgagcccaucaucaacuucuacgacccccugguguuccccagcgacgaguucgacgccagcaucagccaggugaacgagaagaucaaccagagccuggccuucaucagaaagagcgacgagcugcugcacaacgugaacgccggcaagagcaccaccaacaucaugaucaccaccaucaucaucgugaucaucgugauccugcugagccugaucgccgugggccugcugcuguacugcaaggccagaugaggacuaguggaagcauuuuccuggcugauuaaaagaaauuacucagcuauggucaucuguuccuguuagaaggcuaugcagcauauuauauacuaugcgcauguuaugaaaugcauaauaaaaaauuuuaaaaaaucuaaaagaucuaaaaaaaaaaaaaaaaaaaaaaaaaaaaaaaaaaaaaaaaaaaaaaaaaaaaaaaaaaaaaaaaugcaucccccccccccccccccccccccccccccccaaaggcucuuuucagagccaccagaauu

SEQ ID NO: 616 - RNA, 2033 nt, Artificial Sequence
  mRNA product Design c-4 comprising derived and/or modified sequence from HRSV(A2)__F-del (opt5)
gggagaguccgcucagccagguugcagaagcggcuuagcguguguccuaaucuucucucugcguguagguaggccugugccgcaaacaagcuuaccauggagcugcucauccugaaggccaacgcuauuaccacaauccuuacggccgugaccuucugcuuugcgagcggccagaauauuacagaagaguucuaccaauccaccuguucugcugucagcaaaggguaucuguccgcccucagaacaggaugguacaccucuguuaucacaauugaacugagcaacaucaaggagaauaaaugcaacggcaccgacgccaaggugaaacuuaucaagcaggaacuggauaaguauaaaaaugcugugacggagcuccagcugcugaugcaguccacccccgccacaaacaaucgggcucgcagagagcucccucgguuuaugaacuacacccugaauaacgccaagaaaacaaaugucacccuuucuaagaaacgcaagagacgguuccugggguuucuccugggagugggcagcgcgauugccuccgggguugcugugagcaagguccuucaccuggaaggagaggugaacaaaaucaagucugcccuccuguccacgaauaaagcuguugugagccugucuaacggcgucuccgugcucacaagcaaggugcuggaccuuaaaaauuauauugauaagcaacugcucccgaucgucaacaaacagucuuguuccauuagcaacaucgaaaccguuauugaguuccagcagaagaauaaccgccugcuugagaucacaagagaauuuuccgugaaugccggcgugaccacccccgucucuacauacaugcugacgaacagcgagcuccugucccugaucaaugacaugccuauuaccaacgaucaaaagaaacucaugagcaauaacgugcagaucguucggcagcagucuuauuccauuaugagcaucauuaaggaagaggugcuggcguacgucgugcaacuuccccuguacgggguuaucgacacaccuugcuggaaacuccauaccucuccccuguguacaaccaauacgaaggaaggaagcaacaucugccuuacacgcaccgauagaggcugguauugugacaaugccggguccgugucuuucuuuccucaggcugagaccugcaaaguccagagcaaccggguguucugugauacaaugaacucccugacccucccgagcgaggucaaucugugcaauguggacauuuuuaaccccaaguacgauuguaagaucaugacaucuaaaacggacguuuccagcucugugauuaccucccugggagccaucgucagcugcuauggcaagacaaaaugcaccgcuuccaacaagaaucgcgggauuaucaaaacauucucuaacggaugugauuacgugagcaauaagggcguugacaccguguccgucggcaacacgcucuauuacgugaauaagcaagaagggaaaucucuguaugugaagggagagccuaucauuaacuuuuacgacccccuuguuuucccuagcgaugaauuugacgccuccaucagccaggucaaugagaaaauuaaccagucucuggccuucaucagaaaguccgaugaacuccugcacaaugugaacgcuggcaaaagcaccacaaauauuaugaucaccacaauuaucaucgugauuaucgucauucugcuuucucucaucgcgguggggcugcugcucuacugcaaggcccggugaggacuaguggaagcauuuuccuggcugauuaaaagaaauuacucagcuauggucaucuguuccuguuagaaggcuaugcagcauauuauauacuaugcgcauguuaugaaaugcauaauaaaaaauuuuaaaaaaucuaaaagaucuaaaaaaaaaaaaaaaaaaaaaaaaaaaaaaaaaaaaaaaaaaaaaaaaaaaaaaaaaaaaaaaaugcaucccccccccccccccccccccccccccccccaaaggcucuuuucagagccaccagaauu

SEQ ID NO: 617 - RNA, 2033 nt, Artificial Sequence
  mRNA product Design c-4 comprising derived and/or modified sequence from HRSV(A2)__F-del (opt6)
gggagaguccgcucagccagguugcagaagcggcuuagcguguguccuaaucuucucucugcguguagguaggccugugccgcaaacaagcuuaccauggaauuacuaauacucaaagccaacgcaauaacaacaauacuaacagcaguaacauucugcuucgcaucaggacaaaacaucacagaagaauuuuaccaaaguacaugcagugcagucucuaaaggauaccucagugccuuacgcacaggaugguacacaucaguaauaacaaucgaacuuucaaacauaaaagaaaacaaaugcaauggaaccgacgccaaaguaaaacuaaucaaacaagaacuagacaaauauaaaaaugcaguaacagaauuacaacuccuaaugcaauccacaccagcaacaaauaacagagcaagacgagaacucccucgauucaugaauuacacauuaaacaacgcaaaaaaaacuaacguaacuuuaucaaaaaaaagaaaacguagauuucuaggauuccuacuaggcguaggguccgccauugcaucaggaguagcaguuagcaaaguauuacauuuagaaggagaaguaaauaaaaucaaaagcgcacuacucucaaccaacaaagcaguaguaucacucucaaacggaguaucaguacuaacauccaaaguacucgaccucaaaaacuacauagacaaacaauuacuacccauaguaaacaaacaaucaugcucuauaucaaauaucgaaacaguaaucgaauuucaacaaaaaaacaaucgacuacuugaaauaacaagagaguucuccgucaaugccggagucaccacaccagucucaacauacaugcuaaccaacucugaacuccuaucacuaauaaaugacaugccaauaacaaacgaccaaaaaaaacuaaugucaaauaacguacaaauaguacgacaacaaaguuauuccauaaugaguauaaucaaagaagaaguguuagcauacguaguccaacuaccauuauauggaguaauagacacaccauguuggaaauuacacaccucaccacucugcacuaccaauacaaaagaaggcucaaauauaugccuaacucgcacagacagaggcugguacugcgauaacgcaggauccguaucuuucuuuccccaagcagaaacuugcaaaguacaaucaaacagagucuucugcgacaccaugaauagucucacauuaccaucugaaguaaaccuauguaacguagauauauucaauccaaaauacgacugcaaaauaaugacaucaaaaaccgacgucucuagcaguguaaucacaucacuaggagcaauaguaagcugcuauggaaaaacaaaauguacagcaucaaacaaaaacaggggaauaauaaaaaccuucucaaacggaugugacuacguaucaaauaaaggcguagacacaguaagcguaggaaacacccuauacuacguuaacaaacaagaagggaaaucauuauacguaaaaggagaaccaauaauaaacuucuacgauccacucguauucccauccgacgaauuugacgccagcauaucccaaguuaacgaaaaaauaaaccaaucacuugcauuuauacgaaaaucugaugaacuucuccacaacguaaaugcaggaaaauccaccaccaauauaaugaucacaacuaucaucauaguaauaaucgucauuuuacuaucauuaauagcaguuggccuacuucuauacugcaaagcaagauaaggacuaguggaagcauuuuccuggcugauuaaaagaaauuacucagcuauggucaucuguuccuguuagaaggcuaugcagcauauuauauacuaugcgcauguuaugaaaugcauaauaaaaaauuuuaaaaaaucuaaaagaucuaaaaaaaaaaaaaaaaaaaaaaaaaaaaaaaaaaaaaaaaaaaaaaaaaaaaaaaaaaaaaaaaugcaucccccccccccccccccccccccccccccccaaaggcucuuuucagagccaccagaauu

SEQ ID NO: 618 - RNA, 2033 nt, Artificial Sequence
  mRNA product Design c-4 comprising derived and/or modified sequence from HRSV(A2)__F-del (opt11)
gggagaguccgcucagccagguugcagaagcggcuuagcguguguccuaaucuucucucugcguguagguaggccugugccgcaaacaagcuuaccauggaacuacuaauccuaaaagccaacgcgaucaccaccauccuaacggcagucaccuucugcuucgcaucaggccaaaacaucacagaagaguucuaccaaagcacaugcuccgccguauccaaaggcuaccucagcgcccuacgcacaggcugguacacaucugucaucaccauagaacucuccaacaucaaagaaaacaaaugcaacggcacugacgccaaaguaaagcugaucaaacaagaacucgacaaauacaaaaacgcagucaccgaacuccaacuacucaugcaauccaccccugcaaccaacaacagggcccgccgcgaacucccccgcuucaugaacuacacuuuaaacaacgccaaaaagaccaacgucacacucagcaagaaacggaaacgacgauuccuaggguuucuccuaggcgucggcucggcaaucgccuccggcgucgccguaagcaaaguacuacaccuagaaggcgaagugaacaaaaucaaaagugcccuucucuccaccaacaaggccguagucucucuauccaacggagucucaguccucaccucaaagguccucgaccucaaaaacuacaucgacaaacaacuacuccccauugucaacaagcagucaugcuccauaucaaacaucgaaaccgucaucgaguuccaacagaaaaacaaccgacuccucgaaauaaccagagaguucucggucaacgccggcgucaccaccccagucagcaccuacaugcucacuaacuccgaacuccuaucccucaucaacgacaugccaauuaccaacgaccaaaagaaacuaaugucgaacaacguucaaaucguccgacaacaaaguuacuccaucaugagcauaaucaaagaagaaguucuagcguacgucguccaacucccacuauacggcgucaucgacacuccgugcuggaaacuccacacaucaccccuauguacaaccaacacaaaagaaggcagcaacaucugccucacccgcaccgaccgagggugguauugcgauaacgcuggcagcgucuccuucuucccccaagccgaaaccugcaaaguccaaucaaacagaguauucugcgacaccaugaacucccuuacucucccuagcgaagucaaccucugcaacguugacauauucaaccccaaauacgacugcaaaaucaugaccuccaagaccgacgucuccuccuccgucaucacaucucuaggugccauugucuccugcuacggaaaaaccaaaugcacagccuccaacaaaaaccgcggcaucauaaaaaccuucuccaacggcugcgacuacgucaguaauaaaggcgucgacacgguauccguugggaauacgcuuuacuacguaaauaaacaagaaggcaaaucccucuacgucaaaggugaacccaucauaaacuucuacgacccgcuuguguucccauccgacgaguucgacgccagcaucagccaggucaacgaaaagaucaaccaaucccuagccuucauccgcaaaagcgacgaacuacuacacaacgucaacgccggaaaauccacaaccaacaucaugaucaccaccaucaucaucgucaucaucguaauccuacucucucucaucgccgucggccuccuacuguacuguaaagcccgauagggacuaguggaagcauuuuccuggcugauuaaaagaaauuacucagcuauggucaucuguuccuguuagaaggcuaugcagcauauuauauacuaugcgcauguuaugaaaugcauaauaaaaaauuuuaaaaaaucuaaaagaucuaaaaaaaaaaaaaaaaaaaaaaaaaaaaaaaaaaaaaaaaaaaaaaaaaaaaaaaaaaaaaaaaugcaucccccccccccccccccccccccccccccccaaaggcucuuuucagagccaccagaauu

SEQ ID NO: 619 - RNA, 1951 nt, Artificial Sequence
  mRNA product Design c-5 comprising derived and/or modified sequence from HRSV(A2)__F-del (artificial)
gggagagcggcucggccauuuugucccagucaguccggaggcugcggcugcagaaguaccgccugcggaguaacugcaaagaagcuuaccauggaguugcuaauccucaaagcaaaugcaauuaccacaauccucacugcagucacauuuuguuuugcuucuggucaaaacaucacugaagaauuuuaucaaucaacaugcagugcaguuagcaaaggcuaucuuagugcucugagaacugguugguauaccaguguuauaacuauagaauuaaguaauaucaaggaaaauaaguguaauggaacagaugcuaagguaaaauugauaaaacaagaauuagauaaauauaaaaaugcuguaacagaauugcaguugcucaugcaaagcacaccagcaacaaacaaucgagccagaagagaacuaccaagguuuaugaauuauacacucaacaaugccaaaaaaaccaauguaacauuaagcaagaaaaggaaaagaagauuucuugguuuuuuguuagguguuggaucugcaaucgccaguggcguugcuguaucuaagguccugcaccuagaaggggaagugaacaagaucaaaagugcucuacuauccacaaacaaggcuguagucagcuuaucaaauggaguuagugucuuaaccagcaaaguguuagaccucaaaaacuauauagauaaacaauuguuaccuauugugaacaagcaaagcugcagcauaucaaauauagaaacugugauagaguuccaacaaaagaacaacagacuacuagagauuaccagggaauuuaguguuaaugcagguguaacuacaccuguaagcacuuacauguuaacuaauagugaauuauugucauuaaucaaugauaugccuauaacaaaugaucagaaaaaguuaauguccaacaauguucaaauaguuagacagcaaaguuacucuaucauguccauaauaaaagaggaagucuuagcauauguaguacaauuaccacuauaugguguuauagauacacccuguuggaaacuacacacauccccucuauguacaaccaacacaaaagaaggguccaacaucuguuuaacaagaacugacagaggaugguacugugacaaugcaggaucaguaucuuucuucccacaagcugaaacauguaaaguucaaucaaaucgaguauuuugugacacaaugaacaguuuaacauuaccaagugaaguaaaucucugcaauguugacauauucaaccccaaauaugauuguaaaauuaugacuucaaaaacagauguaagcagcuccguuaucacaucucuaggagccauugugucaugcuauggcaaaacuaaauguacagcauccaauaaaaaucguggaaucauaaagacauuuucuaacgggugcgauuauguaucaaauaaagggguggacacugugucuguagguaacacauuauauuauguaaauaagcaagaagguaaaagucucuauguaaaaggugaaccaauaauaaauuucuaugacccauuaguauuccccucugaugaauuugaugcaucaauaucucaagucaacgagaagauuaaccagagccuagcauuuauucguaaauccgaugaauuauuacauaauguaaaugcugguaaauccaccacaaauaucaugauaacuacuauaauuauagugauuauaguaauauuguuaucauuaauugcuguuggacugcucuuauacuguaaggccagauaaggacuagucccuguucccagagcccacuuuuuuuucuuuuuuugaaauaaaauagccugucuuucagaucuaaaaaaaaaaaaaaaaaaaaaaaaaaaaaaaaaaaaaaaaaaaaaaaaaaaaaaaaaaaaaaaaugcaucccccccccccccccccccccccccccccccaaaggcucuuuucagagccaccagaauu

SEQ ID NO: 620 - RNA, 1951 nt, Artificial Sequence
  mRNA product Design c-5 comprising derived and/or modified sequence from HRSV(A2)__F-del (opt1)
gggagagcggcucggccauuuugucccagucaguccggaggcugcggcugcagaaguaccgccugcggaguaacugcaaagaagcuuaccauggagcugcucauccugaaggccaacgccaucaccaccauccugacggcggugaccuucugcuucgccagcggccagaacaucaccgaggaguucuaccaguccaccugcagcgccgucuccaagggguaccucagcgcccugcggacgggcugguacaccuccgugaucaccaucgagcugagcaacaucaaggagaacaagugcaacgggaccgacgccaaggugaagcucaucaagcaggagcuggacaaguacaagaacgcggucacggagcugcagcuccugaugcaguccaccccggcaaccaacaaccgcgcccggcgcgagcugccccgguucaugaacuacacccucaacaacgccaagaagacgaacgugacccugagcaagaagcgcaagcggcgcuuccugggcuuccuccugggggugggcuccgccaucgcgagcggcgucgccguguccaaggugcugcaccucgagggggaggucaacaagaucaagagcgcccugcuguccaccaacaaggccguggugagccucuccaacggcgucagcgugcugaccuccaaggugcuggaccucaagaacuacaucgacaagcagcugcugcccaucgucaacaagcagagcugcuccaucagcaacaucgagacggugaucgaguuccagcagaagaacaaccggcuccuggagaucacccgcgaguucagcgugaacgccggggucaccacccccguguccacguacaugcugaccaacagcgagcuccugucccugaucaacgacaugccgaucaccaacgaccagaagaagcucaugagcaacaacgugcagaucguccggcagcaguccuacagcaucauguccaucaucaaggaggaggugcuggcguacgugguccagcugccccucuacggcgugaucgacacccccugcuggaagcugcacacgagcccccugugcaccaccaacaccaaggagggguccaacaucugccucacgcgcaccgaccggggcugguacugcgacaacgccggcagcgucuccuucuucccgcaggccgagaccugcaaggugcagagcaaccgcguguucugcgacaccaugaacucccugacgcugcccagcgagguaaaccucugcaacgucgacaucuucaaccccaaguacgacugcaagaucaugaccuccaagaccgacgugagcuccagcgugaucaccucccugggggccaucgucagcugcuacggcaagacgaagugcaccgccagcaacaagaaccgggggaucaucaagaccuucuccaacggcugcgacuacgugagcaacaagggcguggacaccguguccgucgggaacacccuguacuacgugaacaagcaggagggcaagagccucuacgugaagggggagcccaucaucaacuucuacgacccgcuggucuuccccuccgacgaguucgacgcgagcaucucccaggugaacgagaagaucaaccagagccuggccuucauccgcaaguccgacgagcugcuccacaacgugaacgccggcaagagcacgaccaacaucaugaucaccaccaucaucaucgucaucaucgugauccugcugucccucaucgccguggggcugcugcucuacugcaaggcccggugaggacuagucccuguucccagagcccacuuuuuuuucuuuuuuugaaauaaaauagccugucuuucagaucuaaaaaaaaaaaaaaaaaaaaaaaaaaaaaaaaaaaaaaaaaaaaaaaaaaaaaaaaaaaaaaaaugcaucccccccccccccccccccccccccccccccaaaggcucuuuucagagccaccagaauu

SEQ ID NO: 621 - RNA, 1951 nt, Artificial Sequence
  mRNA product Design c-5 comprising derived and/or modified sequence from HRSV(A2)__F-del (opt1)
gggagagcggcucggccauuuugucccagucaguccggaggcugcggcugcagaaguaccgccugcggaguaacugcaaagaagcuuaccauggagcugcucauccugaaggccaacgccaucaccaccauccugacggcggugaccuucugcuucgccagcggccagaacaucaccgaggaguucuaccaguccacgugcagcgccgucuccaagggguaccucagcgcccugcgcaccggcugguacaccuccgugaucaccaucgagcugagcaacaucaaggagaacaagugcaacgggaccgacgccaaggugaagcucaucaagcaggagcuggacaaguacaagaacgcggucacggagcugcagcuccugaugcaguccacccccgccaccaacaaccgggcccgccgggagcugccgcgcuucaugaacuacacccucaacaacgccaagaagacgaacgugacccugagcaagaagcggaagcgccgguuccugggcuuccuccugggggugggcuccgcgaucgccagcggcgucgccguguccaaggugcugcaccucgagggggaggucaacaagaucaagagcgcccugcuguccaccaacaaggccguggugagccucuccaacggcgucagcgugcugaccuccaaggugcuggaccucaagaacuacaucgacaagcagcugcugcccaucgucaacaagcagagcugcuccaucagcaacaucgagacggugaucgaguuccagcagaagaacaaccgccuccuggagaucacccgggaguucagcgugaacgcgggggucaccacccccguguccacguacaugcugaccaacagcgagcuccugucccugaucaacgacaugcccaucaccaacgaccagaagaagcucaugagcaacaacgugcagaucguccgccagcaguccuacagcaucauguccaucaucaaggaggaggugcuggccuacgugguccagcugccgcucuacggcgugaucgacacccccugcuggaagcugcacacgagcccccugugcaccaccaacaccaaggagggguccaacaucugccucacgcggaccgaccgcggcugguacugcgacaacgccggcagcgucuccuucuucccccaggccgagaccugcaaggugcagagcaaccggguguucugcgacaccaugaacucccugacgcugccgagcgaggucaaccucugcaacguggacaucuucaaccccaaguacgacugcaagaucaugaccuccaagaccgacgugagcuccagcgucaucaccucccugggggccaucgugagcugcuacggcaagacgaagugcaccgcgagcaacaagaaccgcgggaucaucaagaccuucuccaacggcugcgacuacgugagcaacaagggcgucgacaccguguccguggggaacacccuguacuacgucaacaagcaggagggcaagagccucuacgugaagggggagcccaucaucaacuucuacgacccccugguguucccguccgacgaguucgacgccagcaucucccaggucaacgagaagaucaaccagagccuggccuucauccggaaguccgacgagcuccugcacaacgugaacgccggcaagagcacgaccaacaucaugaucaccaccaucaucaucgugaucaucgucauccugcugucccucaucgccguggggcugcugcucuacugcaaggcgcgcugaggacuagucccuguucccagagcccacuuuuuuuucuuuuuuugaaauaaaauagccugucuuucagaucuaaaaaaaaaaaaaaaaaaaaaaaaaaaaaaaaaaaaaaaaaaaaaaaaaaaaaaaaaaaaaaaaugcaucccccccccccccccccccccccccccccccaaaggcucuuuucagagccaccagaauu

SEQ ID NO: 622 - RNA, 1951 nt, Artificial Sequence
  mRNA product Design c-5 comprising derived and/or modified sequence from HRSV(A2)__F-del (opt2)
gggagagcggcucggccauuuugucccagucaguccggaggcugcggcugcagaaguaccgccugcggaguaacugcaaagaagcuuaccauggagcuccucauccucaaggccaacgccaucaccaccauccucaccgccgucaccuucugcuucgccuccggccagaacaucaccgaggaguucuaccaguccaccugcuccgccgucuccaagggcuaccucuccgcccuccgcaccggcugguacaccuccgucaucaccaucgagcucuccaacaucaaggagaacaagugcaacggcaccgacgccaaggucaagcucaucaagcaggagcucgacaaguacaagaacgccgucaccgagcuccagcuccucaugcaguccacccccgccaccaacaaccgcgcccgccgcgagcucccccgcuucaugaacuacacccucaacaacgccaagaagaccaacgucacccucuccaagaagcgcaagcgccgcuuccucggcuuccuccucggcgucggcuccgccaucgccuccggcgucgccgucuccaagguccuccaccucgagggcgaggucaacaagaucaaguccgcccuccucuccaccaacaaggccgucgucucccucuccaacggcgucuccguccucaccuccaagguccucgaccucaagaacuacaucgacaagcagcuccuccccaucgucaacaagcaguccugcuccaucuccaacaucgagaccgucaucgaguuccagcagaagaacaaccgccuccucgagaucacccgcgaguucuccgucaacgccggcgucaccacccccgucuccaccuacaugcucaccaacuccgagcuccucucccucaucaacgacaugcccaucaccaacgaccagaagaagcucauguccaacaacguccagaucguccgccagcaguccuacuccaucauguccaucaucaaggaggagguccucgccuacgucguccagcucccccucuacggcgucaucgacacccccugcuggaagcuccacaccuccccccucugcaccaccaacaccaaggagggcuccaacaucugccucacccgcaccgaccgcggcugguacugcgacaacgccggcuccgucuccuucuucccccaggccgagaccugcaagguccaguccaaccgcgucuucugcgacaccaugaacucccucacccuccccuccgaggucaaccucugcaacgucgacaucuucaaccccaaguacgacugcaagaucaugaccuccaagaccgacgucuccuccuccgucaucaccucccucggcgccaucgucuccugcuacggcaagaccaagugcaccgccuccaacaagaaccgcggcaucaucaagaccuucuccaacggcugcgacuacgucuccaacaagggcgucgacaccgucuccgucggcaacacccucuacuacgucaacaagcaggagggcaagucccucuacgucaagggcgagcccaucaucaacuucuacgacccccucgucuuccccuccgacgaguucgacgccuccaucucccaggucaacgagaagaucaaccagucccucgccuucauccgcaaguccgacgagcuccuccacaacgucaacgccggcaaguccaccaccaacaucaugaucaccaccaucaucaucgucaucaucgucauccuccucucccucaucgccgucggccuccuccucuacugcaaggcccgcugaggacuagucccuguucccagagcccacuuuuuuuucuuuuuuugaaauaaaauagccugucuuucagaucuaaaaaaaaaaaaaaaaaaaaaaaaaaaaaaaaaaaaaaaaaaaaaaaaaaaaaaaaaaaaaaaaugcaucccccccccccccccccccccccccccccccaaaggcucuuuucagagccaccagaauu

SEQ ID NO: 623 - RNA, 1951 nt, Artificial Sequence
  mRNA product Design c-5 comprising derived and/or modified sequence from HRSV(A2)__F-del (opt3)
gggagagcggcucggccauuuugucccagucaguccggaggcugcggcugcagaaguaccgccugcggaguaacugcaaagaagcuuaccauggagcugcucauccuuaaggccaacgcuauuaccacaauacugacugcagugacguucugcuuugccagcggccagaauaucaccgaagaguucuaccaauccacauguucugcggucucaaaaggguauuugagugcuuuaagaacuggaugguacaccagcguuauuacaaucgaacuguccaacauuaaggagaauaaaugcaacgguaccgacgccaaggugaaacuaaucaagcaggaacucgauaaguauaaaaaugcaguaacugagcugcagcuucugaugcagucuacacccgccaccaacaauagggcucggcgcgaguugccucgauuuaugaacuacacgcucaauaacgcaaagaaaacuaaugugacccugucgaagaaacguaagagaagguuccugggcuuucucuuaggggucggaucagccauagcuagcggcguggccguuaguaaggugcugcaccuugaaggugaggucaacaaaaucaaguccgcguugcugucuacaaauaaagcagugguaagccuauccaacgggguuucagugcucacuucuaagguccuggaccuuaaaaauuauauugauaagcaacuguugccaaucgugaacaaacagagcuguucuauuuccaacaucgaaaccgugauagaguuccagcagaagaauaaccggcuccuggagauuacacgcgaauuuucagucaaugccggaguuaccacgccggugagcacuuacauguuaacaaacagugagcugcucucucuuaucaaugacaugcccauuaccaacgaucaaaagaaacugauguccaauaacguacagaucgugagacagcagagcuauucgaucaugucuauuauaaaggaagaggucuuggcuuacgugguucaacuaccucuguacggcgugaucgacacuccaugcuggaaacuccauacauccccacuguguaccacgaauaccaaggaaggcucaaacauuugccuuacaaggacugaucgggggugguauugugacaaugccggaagugucagcuucuuuccucaggcagagaccugcaaagugcaguccaaccgcguauucugugauacaaugaauagucugacuuugccaagcgagguuaaccucugcaauguggacaucuuuaaccccaaguacgauuguaagauaaugaccucaaaaacagacgucaguuccagcgugauuaccucucugggugcuaucgucucaugcuauggcaagacuaaaugcacggccaguaacaagaaucgagggaucauuaaaacauucagcaacggaugugauuacguguccaauaagggcguugacaccgugucuguagguaacacuuuauauuacgucaauaagcaagaagggaaaucgcuguaugugaagggagagccuaucauuaacuuuuacgacccccuaguuuucccgagcgaugaauuugacgcguccauaucacaggugaaugagaaaaucaaccagagucucgccuucauuagaaagucugaugaacugcuucacaaugucaacgcaggcaaaagcaccacaaauaucaugaucaccacuauuauaaucgugauuaucguaauuuugcugucccucaucgcugugggccugcuucuguacugcaaggccaggugaggacuagucccuguucccagagcccacuuuuuuuucuuuuuuugaaauaaaauagccugucuuucagaucuaaaaaaaaaaaaaaaaaaaaaaaaaaaaaaaaaaaaaaaaaaaaaaaaaaaaaaaaaaaaaaaaugcaucccccccccccccccccccccccccccccccaaaggcucuuuucagagccaccagaauu

SEQ ID NO: 624 - RNA, 1951 nt, Artificial Sequence
  mRNA product Design c-5 comprising derived and/or modified sequence from HRSV(A2)__F-del (opt4)
gggagagcggcucggccauuuugucccagucaguccggaggcugcggcugcagaaguaccgccugcggaguaacugcaaagaagcuuaccauggagcugcugauccugaaggccaacgccaucaccaccauccugaccgccgugaccuucugcuucgccagcggccagaacaucaccgaggaguucuaccagagcaccugcagcgccgugagcaagggcuaccugagcgcccugagaaccggcugguacaccagcgugaucaccaucgagcugagcaacaucaaggagaacaagugcaacggcaccgacgccaaggugaagcugaucaagcaggagcuggacaaguacaagaacgccgugaccgagcugcagcugcugaugcagagcacccccgccaccaacaacagagccagaagagagcugcccagauucaugaacuacacccugaacaacgccaagaagaccaacgugacccugagcaagaagagaaagagaagauuccugggcuuccugcugggcgugggcagcgccaucgccagcggcguggccgugagcaaggugcugcaccuggagggcgaggugaacaagaucaagagcgcccugcugagcaccaacaaggccguggugagccugagcaacggcgugagcgugcugaccagcaaggugcuggaccugaagaacuacaucgacaagcagcugcugcccaucgugaacaagcagagcugcagcaucagcaacaucgagaccgugaucgaguuccagcagaagaacaacagacugcuggagaucaccagagaguucagcgugaacgccggcgugaccacccccgugagcaccuacaugcugaccaacagcgagcugcugagccugaucaacgacaugcccaucaccaacgaccagaagaagcugaugagcaacaacgugcagaucgugagacagcagagcuacagcaucaugagcaucaucaaggaggaggugcuggccuacguggugcagcugccccuguacggcgugaucgacacccccugcuggaagcugcacaccagcccccugugcaccaccaacaccaaggagggcagcaacaucugccugaccagaaccgacagaggcugguacugcgacaacgccggcagcgugagcuucuucccccaggccgagaccugcaaggugcagagcaacagaguguucugcgacaccaugaacagccugacccugcccagcgaggugaaccugugcaacguggacaucuucaaccccaaguacgacugcaagaucaugaccagcaagaccgacgugagcagcagcgugaucaccagccugggcgccaucgugagcugcuacggcaagaccaagugcaccgccagcaacaagaacagaggcaucaucaagaccuucagcaacggcugcgacuacgugagcaacaagggcguggacaccgugagcgugggcaacacccuguacuacgugaacaagcaggagggcaagagccuguacgugaagggcgagcccaucaucaacuucuacgacccccugguguuccccagcgacgaguucgacgccagcaucagccaggugaacgagaagaucaaccagagccuggccuucaucagaaagagcgacgagcugcugcacaacgugaacgccggcaagagcaccaccaacaucaugaucaccaccaucaucaucgugaucaucgugauccugcugagccugaucgccgugggccugcugcuguacugcaaggccagaugaggacuagucccuguucccagagcccacuuuuuuuucuuuuuuugaaauaaaauagccugucuuucagaucuaaaaaaaaaaaaaaaaaaaaaaaaaaaaaaaaaaaaaaaaaaaaaaaaaaaaaaaaaaaaaaaaugcaucccccccccccccccccccccccccccccccaaaggcucuuuucagagccaccagaauu

SEQ ID NO: 625 - RNA, 1951 nt, Artificial Sequence
  mRNA product Design c-5 comprising derived and/or modified sequence from HRSV(A2)__F-del (opt5)
gggagagcggcucggccauuuugucccagucaguccggaggcugcggcugcagaaguaccgccugcggaguaacugcaaagaagcuuaccauggagcugcucauccugaaggccaacgcuauuaccacaauccuuacggccgugaccuucugcuuugcgagcggccagaauauuacagaagaguucuaccaauccaccuguucugcugucagcaaaggguaucuguccgcccucagaacaggaugguacaccucuguuaucacaauugaacugagcaacaucaaggagaauaaaugcaacggcaccgacgccaaggugaaacuuaucaagcaggaacuggauaaguauaaaaaugcugugacggagcuccagcugcugaugcaguccacccccgccacaaacaaucgggcucgcagagagcucccucgguuuaugaacuacacccugaauaacgccaagaaaacaaaugucacccuuucuaagaaacgcaagagacgguuccugggguuucuccugggagugggcagcgcgauugccuccgggguugcugugagcaagguccuucaccuggaaggagaggugaacaaaaucaagucugcccuccuguccacgaauaaagcuguugugagccugucuaacggcgucuccgugcucacaagcaaggugcuggaccuuaaaaauuauauugauaagcaacugcucccgaucgucaacaaacagucuuguuccauuagcaacaucgaaaccguuauugaguuccagcagaagaauaaccgccugcuugagaucacaagagaauuuuccgugaaugccggcgugaccacccccgucucuacauacaugcugacgaacagcgagcuccugucccugaucaaugacaugccuauuaccaacgaucaaaagaaacucaugagcaauaacgugcagaucguucggcagcagucuuauuccauuaugagcaucauuaaggaagaggugcuggcguacgucgugcaacuuccccuguacgggguuaucgacacaccuugcuggaaacuccauaccucuccccuguguacaaccaauacgaaggaaggaagcaacaucugccuuacacgcaccgauagaggcugguauugugacaaugccggguccgugucuuucuuuccucaggcugagaccugcaaaguccagagcaaccggguguucugugauacaaugaacucccugacccucccgagcgaggucaaucugugcaauguggacauuuuuaaccccaaguacgauuguaagaucaugacaucuaaaacggacguuuccagcucugugauuaccucccugggagccaucgucagcugcuauggcaagacaaaaugcaccgcuuccaacaagaaucgcgggauuaucaaaacauucucuaacggaugugauuacgugagcaauaagggcguugacaccguguccgucggcaacacgcucuauuacgugaauaagcaagaagggaaaucucuguaugugaagggagagccuaucauuaacuuuuacgacccccuuguuuucccuagcgaugaauuugacgccuccaucagccaggucaaugagaaaauuaaccagucucuggccuucaucagaaaguccgaugaacuccugcacaaugugaacgcuggcaaaagcaccacaaauauuaugaucaccacaauuaucaucgugauuaucgucauucugcuuucucucaucgcgguggggcugcugcucuacugcaaggcccggugaggacuagucccuguucccagagcccacuuuuuuuucuuuuuuugaaauaaaauagccugucuuucagaucuaaaaaaaaaaaaaaaaaaaaaaaaaaaaaaaaaaaaaaaaaaaaaaaaaaaaaaaaaaaaaaaaugcaucccccccccccccccccccccccccccccccaaaggcucuuuucagagccaccagaauu

SEQ ID NO: 626 - RNA, 1951 nt, Artificial Sequence
  mRNA product Design c-5 comprising derived and/or modified sequence from HRSV(A2)__F-del (opt6)
gggagagcggcucggccauuuugucccagucaguccggaggcugcggcugcagaaguaccgccugcggaguaacugcaaagaagcuuaccauggaauuacuaauacucaaagccaacgcaauaacaacaauacuaacagcaguaacauucugcuucgcaucaggacaaaacaucacagaagaauuuuaccaaaguacaugcagugcagucucuaaaggauaccucagugccuuacgcacaggaugguacacaucaguaauaacaaucgaacuuucaaacauaaaagaaaacaaaugcaauggaaccgacgccaaaguaaaacuaaucaaacaagaacuagacaaauauaaaaaugcaguaacagaauuacaacuccuaaugcaauccacaccagcaacaaauaacagagcaagacgagaacucccucgauucaugaauuacacauuaaacaacgcaaaaaaaacuaacguaacuuuaucaaaaaaaagaaaacguagauuucuaggauuccuacuaggcguaggguccgccauugcaucaggaguagcaguuagcaaaguauuacauuuagaaggagaaguaaauaaaaucaaaagcgcacuacucucaaccaacaaagcaguaguaucacucucaaacggaguaucaguacuaacauccaaaguacucgaccucaaaaacuacauagacaaacaauuacuacccauaguaaacaaacaaucaugcucuauaucaaauaucgaaacaguaaucgaauuucaacaaaaaaacaaucgacuacuugaaauaacaagagaguucuccgucaaugccggagucaccacaccagucucaacauacaugcuaaccaacucugaacuccuaucacuaauaaaugacaugccaauaacaaacgaccaaaaaaaacuaaugucaaauaacguacaaauaguacgacaacaaaguuauuccauaaugaguauaaucaaagaagaaguguuagcauacguaguccaacuaccauuauauggaguaauagacacaccauguuggaaauuacacaccucaccacucugcacuaccaauacaaaagaaggcucaaauauaugccuaacucgcacagacagaggcugguacugcgauaacgcaggauccguaucuuucuuuccccaagcagaaacuugcaaaguacaaucaaacagagucuucugcgacaccaugaauagucucacauuaccaucugaaguaaaccuauguaacguagauauauucaauccaaaauacgacugcaaaauaaugacaucaaaaaccgacgucucuagcaguguaaucacaucacuaggagcaauaguaagcugcuauggaaaaacaaaauguacagcaucaaacaaaaacaggggaauaauaaaaaccuucucaaacggaugugacuacguaucaaauaaaggcguagacacaguaagcguaggaaacacccuauacuacguuaacaaacaagaagggaaaucauuauacguaaaaggagaaccaauaauaaacuucuacgauccacucguauucccauccgacgaauuugacgccagcauaucccaaguuaacgaaaaaauaaaccaaucacuugcauuuauacgaaaaucugaugaacuucuccacaacguaaaugcaggaaaauccaccaccaauauaaugaucacaacuaucaucauaguaauaaucgucauuuuacuaucauuaauagcaguuggccuacuucuauacugcaaagcaagauaaggacuagucccuguucccagagcccacuuuuuuuucuuuuuuugaaauaaaauagccugucuuucagaucuaaaaaaaaaaaaaaaaaaaaaaaaaaaaaaaaaaaaaaaaaaaaaaaaaaaaaaaaaaaaaaaaugcaucccccccccccccccccccccccccccccccaaaggcucuuuucagagccaccagaauu

SEQ ID NO: 627 - RNA, 1951 nt, Artificial Sequence
  mRNA product Design c-5 comprising derived and/or modified sequence from HRSV(A2)__F-del (opt11)
gggagagcggcucggccauuuugucccagucaguccggaggcugcggcugcagaaguaccgccugcggaguaacugcaaagaagcuuaccauggaacuacuaauccuaaaagccaacgcgaucaccaccauccuaacggcagucaccuucugcuucgcaucaggccaaaacaucacagaagaguucuaccaaagcacaugcuccgccguauccaaaggcuaccucagcgcccuacgcacaggcugguacacaucugucaucaccauagaacucuccaacaucaaagaaaacaaaugcaacggcacugacgccaaaguaaagcugaucaaacaagaacucgacaaauacaaaaacgcagucaccgaacuccaacuacucaugcaauccaccccugcaaccaacaacagggcccgccgcgaacucccccgcuucaugaacuacacuuuaaacaacgccaaaaagaccaacgucacacucagcaagaaacggaaacgacgauuccuaggguuucuccuaggcgucggcucggcaaucgccuccggcgucgccguaagcaaaguacuacaccuagaaggcgaagugaacaaaaucaaaagugcccuucucuccaccaacaaggccguagucucucuauccaacggagucucaguccucaccucaaagguccucgaccucaaaaacuacaucgacaaacaacuacuccccauugucaacaagcagucaugcuccauaucaaacaucgaaaccgucaucgaguuccaacagaaaaacaaccgacuccucgaaauaaccagagaguucucggucaacgccggcgucaccaccccagucagcaccuacaugcucacuaacuccgaacuccuaucccucaucaacgacaugccaauuaccaacgaccaaaagaaacuaaugucgaacaacguucaaaucguccgacaacaaaguuacuccaucaugagcauaaucaaagaagaaguucuagcguacgucguccaacucccacuauacggcgucaucgacacuccgugcuggaaacuccacacaucaccccuauguacaaccaacacaaaagaaggcagcaacaucugccucacccgcaccgaccgagggugguauugcgauaacgcuggcagcgucuccuucuucccccaagccgaaaccugcaaaguccaaucaaacagaguauucugcgacaccaugaacucccuuacucucccuagcgaagucaaccucugcaacguugacauauucaaccccaaauacgacugcaaaaucaugaccuccaagaccgacgucuccuccuccgucaucacaucucuaggugccauugucuccugcuacggaaaaaccaaaugcacagccuccaacaaaaaccgcggcaucauaaaaaccuucuccaacggcugcgacuacgucaguaauaaaggcgucgacacgguauccguugggaauacgcuuuacuacguaaauaaacaagaaggcaaaucccucuacgucaaaggugaacccaucauaaacuucuacgacccgcuuguguucccauccgacgaguucgacgccagcaucagccaggucaacgaaaagaucaaccaaucccuagccuucauccgcaaaagcgacgaacuacuacacaacgucaacgccggaaaauccacaaccaacaucaugaucaccaccaucaucaucgucaucaucguaauccuacucucucucaucgccgucggccuccuacuguacuguaaagcccgauagggacuagucccuguucccagagcccacuuuuuuuucuuuuuuugaaauaaaauagccugucuuucagaucuaaaaaaaaaaaaaaaaaaaaaaaaaaaaaaaaaaaaaaaaaaaaaaaaaaaaaaaaaaaaaaaaugcaucccccccccccccccccccccccccccccccaaaggcucuuuucagagccaccagaauu

SEQ ID NO: 628 - RNA, 1960 nt, Artificial Sequence
  mRNA product Design d-1 comprising derived and/or modified sequence from HRSV(A2)__F-del (artificial)
gggagacccgugacccggaaguuguacggcuacgcgacuuucccucccacaaacccucgcgcccuuccuuuccuacuugggcccggcagaaagcuuaccauggaguugcuaauccucaaagcaaaugcaauuaccacaauccucacugcagucacauuuuguuuugcuucuggucaaaacaucacugaagaauuuuaucaaucaacaugcagugcaguuagcaaaggcuaucuuagugcucugagaacugguugguauaccaguguuauaacuauagaauuaaguaauaucaaggaaaauaaguguaauggaacagaugcuaagguaaaauugauaaaacaagaauuagauaaauauaaaaaugcuguaacagaauugcaguugcucaugcaaagcacaccagcaacaaacaaucgagccagaagagaacuaccaagguuuaugaauuauacacucaacaaugccaaaaaaaccaauguaacauuaagcaagaaaaggaaaagaagauuucuugguuuuuuguuagguguuggaucugcaaucgccaguggcguugcuguaucuaagguccugcaccuagaaggggaagugaacaagaucaaaagugcucuacuauccacaaacaaggcuguagucagcuuaucaaauggaguuagugucuuaaccagcaaaguguuagaccucaaaaacuauauagauaaacaauuguuaccuauugugaacaagcaaagcugcagcauaucaaauauagaaacugugauagaguuccaacaaaagaacaacagacuacuagagauuaccagggaauuuaguguuaaugcagguguaacuacaccuguaagcacuuacauguuaacuaauagugaauuauugucauuaaucaaugauaugccuauaacaaaugaucagaaaaaguuaauguccaacaauguucaaauaguuagacagcaaaguuacucuaucauguccauaauaaaagaggaagucuuagcauauguaguacaauuaccacuauaugguguuauagauacacccuguuggaaacuacacacauccccucuauguacaaccaacacaaaagaaggguccaacaucuguuuaacaagaacugacagaggaugguacugugacaaugcaggaucaguaucuuucuucccacaagcugaaacauguaaaguucaaucaaaucgaguauuuugugacacaaugaacaguuuaacauuaccaagugaaguaaaucucugcaauguugacauauucaaccccaaauaugauuguaaaauuaugacuucaaaaacagauguaagcagcuccguuaucacaucucuaggagccauugugucaugcuauggcaaaacuaaauguacagcauccaauaaaaaucguggaaucauaaagacauuuucuaacgggugcgauuauguaucaaauaaagggguggacacugugucuguagguaacacauuauauuauguaaauaagcaagaagguaaaagucucuauguaaaaggugaaccaauaauaaauuucuaugacccauuaguauuccccucugaugaauuugaugcaucaauaucucaagucaacgagaagauuaaccagagccuagcauuuauucguaaauccgaugaauuauuacauaauguaaaugcugguaaauccaccacaaauaucaugauaacuacuauaauuauagugauuauaguaauauuguuaucauuaauugcuguuggacugcucuuauacuguaaggccagauaaggacuagucccuguucccagagcccacuuuuuuuucuuuuuuugaaauaaaauagccugucuuucagaucuaaaaaaaaaaaaaaaaaaaaaaaaaaaaaaaaaaaaaaaaaaaaaaaaaaaaaaaaaaaaaaaaugcaucccccccccccccccccccccccccccccccaaaggcucuuuucagagccaccagaauu

SEQ ID NO: 629 - RNA, 1960 nt, Artificial Sequence
  mRNA product Design d-1 comprising derived and/or modified sequence from HRSV(A2)__F-del (opt1)
gggagacccgugacccggaaguuguacggcuacgcgacuuucccucccacaaacccucgcgcccuuccuuuccuacuugggcccggcagaaagcuuaccauggagcugcucauccugaaggccaacgccaucaccaccauccugacggcggugaccuucugcuucgccagcggccagaacaucaccgaggaguucuaccaguccaccugcagcgccgucuccaagggguaccucagcgcccugcggacgggcugguacaccuccgugaucaccaucgagcugagcaacaucaaggagaacaagugcaacgggaccgacgccaaggugaagcucaucaagcaggagcuggacaaguacaagaacgcggucacggagcugcagcuccugaugcaguccaccccggcaaccaacaaccgcgcccggcgcgagcugccccgguucaugaacuacacccucaacaacgccaagaagacgaacgugacccugagcaagaagcgcaagcggcgcuuccugggcuuccuccugggggugggcuccgccaucgcgagcggcgucgccguguccaaggugcugcaccucgagggggaggucaacaagaucaagagcgcccugcuguccaccaacaaggccguggugagccucuccaacggcgucagcgugcugaccuccaaggugcuggaccucaagaacuacaucgacaagcagcugcugcccaucgucaacaagcagagcugcuccaucagcaacaucgagacggugaucgaguuccagcagaagaacaaccggcuccuggagaucacccgcgaguucagcgugaacgccggggucaccacccccguguccacguacaugcugaccaacagcgagcuccugucccugaucaacgacaugccgaucaccaacgaccagaagaagcucaugagcaacaacgugcagaucguccggcagcaguccuacagcaucauguccaucaucaaggaggaggugcuggcguacgugguccagcugccccucuacggcgugaucgacacccccugcuggaagcugcacacgagcccccugugcaccaccaacaccaaggagggguccaacaucugccucacgcgcaccgaccggggcugguacugcgacaacgccggcagcgucuccuucuucccgcaggccgagaccugcaaggugcagagcaaccgcguguucugcgacaccaugaacucccugacgcugcccagcgagguaaaccucugcaacgucgacaucuucaaccccaaguacgacugcaagaucaugaccuccaagaccgacgugagcuccagcgugaucaccucccugggggccaucgucagcugcuacggcaagacgaagugcaccgccagcaacaagaaccgggggaucaucaagaccuucuccaacggcugcgacuacgugagcaacaagggcguggacaccguguccgucgggaacacccuguacuacgugaacaagcaggagggcaagagccucuacgugaagggggagcccaucaucaacuucuacgacccgcuggucuuccccuccgacgaguucgacgcgagcaucucccaggugaacgagaagaucaaccagagccuggccuucauccgcaaguccgacgagcugcuccacaacgugaacgccggcaagagcacgaccaacaucaugaucaccaccaucaucaucgucaucaucgugauccugcugucccucaucgccguggggcugcugcucuacugcaaggcccggugaggacuagucccuguucccagagcccacuuuuuuuucuuuuuuugaaauaaaauagccugucuuucagaucuaaaaaaaaaaaaaaaaaaaaaaaaaaaaaaaaaaaaaaaaaaaaaaaaaaaaaaaaaaaaaaaaugcaucccccccccccccccccccccccccccccccaaaggcucuuuucagagccaccagaauu

SEQ ID NO: 630 - RNA, 1960 nt, Artificial Sequence
  mRNA product Design d-1 comprising derived and/or modified sequence from HRSV(A2)__F-del (opt1)
gggagacccgugacccggaaguuguacggcuacgcgacuuucccucccacaaacccucgcgcccuuccuuuccuacuugggcccggcagaaagcuuaccauggagcugcucauccugaaggccaacgccaucaccaccauccugacggcggugaccuucugcuucgccagcggccagaacaucaccgaggaguucuaccaguccacgugcagcgccgucuccaagggguaccucagcgcccugcgcaccggcugguacaccuccgugaucaccaucgagcugagcaacaucaaggagaacaagugcaacgggaccgacgccaaggugaagcucaucaagcaggagcuggacaaguacaagaacgcggucacggagcugcagcuccugaugcaguccacccccgccaccaacaaccgggcccgccgggagcugccgcgcuucaugaacuacacccucaacaacgccaagaagacgaacgugacccugagcaagaagcggaagcgccgguuccugggcuuccuccugggggugggcuccgcgaucgccagcggcgucgccguguccaaggugcugcaccucgagggggaggucaacaagaucaagagcgcccugcuguccaccaacaaggccguggugagccucuccaacggcgucagcgugcugaccuccaaggugcuggaccucaagaacuacaucgacaagcagcugcugcccaucgucaacaagcagagcugcuccaucagcaacaucgagacggugaucgaguuccagcagaagaacaaccgccuccuggagaucacccgggaguucagcgugaacgcgggggucaccacccccguguccacguacaugcugaccaacagcgagcuccugucccugaucaacgacaugcccaucaccaacgaccagaagaagcucaugagcaacaacgugcagaucguccgccagcaguccuacagcaucauguccaucaucaaggaggaggugcuggccuacgugguccagcugccgcucuacggcgugaucgacacccccugcuggaagcugcacacgagcccccugugcaccaccaacaccaaggagggguccaacaucugccucacgcggaccgaccgcggcugguacugcgacaacgccggcagcgucuccuucuucccccaggccgagaccugcaaggugcagagcaaccggguguucugcgacaccaugaacucccugacgcugccgagcgaggucaaccucugcaacguggacaucuucaaccccaaguacgacugcaagaucaugaccuccaagaccgacgugagcuccagcgucaucaccucccugggggccaucgugagcugcuacggcaagacgaagugcaccgcgagcaacaagaaccgcgggaucaucaagaccuucuccaacggcugcgacuacgugagcaacaagggcgucgacaccguguccguggggaacacccuguacuacgucaacaagcaggagggcaagagccucuacgugaagggggagcccaucaucaacuucuacgacccccugguguucccguccgacgaguucgacgccagcaucucccaggucaacgagaagaucaaccagagccuggccuucauccggaaguccgacgagcuccugcacaacgugaacgccggcaagagcacgaccaacaucaugaucaccaccaucaucaucgugaucaucgucauccugcugucccucaucgccguggggcugcugcucuacugcaaggcgcgcugaggacuagucccuguucccagagcccacuuuuuuuucuuuuuuugaaauaaaauagccugucuuucagaucuaaaaaaaaaaaaaaaaaaaaaaaaaaaaaaaaaaaaaaaaaaaaaaaaaaaaaaaaaaaaaaaaugcaucccccccccccccccccccccccccccccccaaaggcucuuuucagagccaccagaauu

SEQ ID NO: 631 - RNA, 1960 nt, Artificial Sequence
  mRNA product Design d-1 comprising derived and/or modified sequence from HRSV(A2)__F-del (opt2)
gggagacccgugacccggaaguuguacggcuacgcgacuuucccucccacaaacccucgcgcccuuccuuuccuacuugggcccggcagaaagcuuaccauggagcuccucauccucaaggccaacgccaucaccaccauccucaccgccgucaccuucugcuucgccuccggccagaacaucaccgaggaguucuaccaguccaccugcuccgccgucuccaagggcuaccucuccgcccuccgcaccggcugguacaccuccgucaucaccaucgagcucuccaacaucaaggagaacaagugcaacggcaccgacgccaaggucaagcucaucaagcaggagcucgacaaguacaagaacgccgucaccgagcuccagcuccucaugcaguccacccccgccaccaacaaccgcgcccgccgcgagcucccccgcuucaugaacuacacccucaacaacgccaagaagaccaacgucacccucuccaagaagcgcaagcgccgcuuccucggcuuccuccucggcgucggcuccgccaucgccuccggcgucgccgucuccaagguccuccaccucgagggcgaggucaacaagaucaaguccgcccuccucuccaccaacaaggccgucgucucccucuccaacggcgucuccguccucaccuccaagguccucgaccucaagaacuacaucgacaagcagcuccuccccaucgucaacaagcaguccugcuccaucuccaacaucgagaccgucaucgaguuccagcagaagaacaaccgccuccucgagaucacccgcgaguucuccgucaacgccggcgucaccacccccgucuccaccuacaugcucaccaacuccgagcuccucucccucaucaacgacaugcccaucaccaacgaccagaagaagcucauguccaacaacguccagaucguccgccagcaguccuacuccaucauguccaucaucaaggaggagguccucgccuacgucguccagcucccccucuacggcgucaucgacacccccugcuggaagcuccacaccuccccccucugcaccaccaacaccaaggagggcuccaacaucugccucacccgcaccgaccgcggcugguacugcgacaacgccggcuccgucuccuucuucccccaggccgagaccugcaagguccaguccaaccgcgucuucugcgacaccaugaacucccucacccuccccuccgaggucaaccucugcaacgucgacaucuucaaccccaaguacgacugcaagaucaugaccuccaagaccgacgucuccuccuccgucaucaccucccucggcgccaucgucuccugcuacggcaagaccaagugcaccgccuccaacaagaaccgcggcaucaucaagaccuucuccaacggcugcgacuacgucuccaacaagggcgucgacaccgucuccgucggcaacacccucuacuacgucaacaagcaggagggcaagucccucuacgucaagggcgagcccaucaucaacuucuacgacccccucgucuuccccuccgacgaguucgacgccuccaucucccaggucaacgagaagaucaaccagucccucgccuucauccgcaaguccgacgagcuccuccacaacgucaacgccggcaaguccaccaccaacaucaugaucaccaccaucaucaucgucaucaucgucauccuccucucccucaucgccgucggccuccuccucuacugcaaggcccgcugaggacuagucccuguucccagagcccacuuuuuuuucuuuuuuugaaauaaaauagccugucuuucagaucuaaaaaaaaaaaaaaaaaaaaaaaaaaaaaaaaaaaaaaaaaaaaaaaaaaaaaaaaaaaaaaaaugcaucccccccccccccccccccccccccccccccaaaggcucuuuucagagccaccagaauu

SEQ ID NO: 632 - RNA, 1960 nt, Artificial Sequence
  mRNA product Design d-1 comprising derived and/or modified sequence from HRSV(A2)__F-del (opt3)
gggagacccgugacccggaaguuguacggcuacgcgacuuucccucccacaaacccucgcgcccuuccuuuccuacuugggcccggcagaaagcuuaccauggagcugcucauccuuaaggccaacgcuauuaccacaauacugacugcagugacguucugcuuugccagcggccagaauaucaccgaagaguucuaccaauccacauguucugcggucucaaaaggguauuugagugcuuuaagaacuggaugguacaccagcguuauuacaaucgaacuguccaacauuaaggagaauaaaugcaacgguaccgacgccaaggugaaacuaaucaagcaggaacucgauaaguauaaaaaugcaguaacugagcugcagcuucugaugcagucuacacccgccaccaacaauagggcucggcgcgaguugccucgauuuaugaacuacacgcucaauaacgcaaagaaaacuaaugugacccugucgaagaaacguaagagaagguuccugggcuuucucuuaggggucggaucagccauagcuagcggcguggccguuaguaaggugcugcaccuugaaggugaggucaacaaaaucaaguccgcguugcugucuacaaauaaagcagugguaagccuauccaacgggguuucagugcucacuucuaagguccuggaccuuaaaaauuauauugauaagcaacuguugccaaucgugaacaaacagagcuguucuauuuccaacaucgaaaccgugauagaguuccagcagaagaauaaccggcuccuggagauuacacgcgaauuuucagucaaugccggaguuaccacgccggugagcacuuacauguuaacaaacagugagcugcucucucuuaucaaugacaugcccauuaccaacgaucaaaagaaacugauguccaauaacguacagaucgugagacagcagagcuauucgaucaugucuauuauaaaggaagaggucuuggcuuacgugguucaacuaccucuguacggcgugaucgacacuccaugcuggaaacuccauacauccccacuguguaccacgaauaccaaggaaggcucaaacauuugccuuacaaggacugaucgggggugguauugugacaaugccggaagugucagcuucuuuccucaggcagagaccugcaaagugcaguccaaccgcguauucugugauacaaugaauagucugacuuugccaagcgagguuaaccucugcaauguggacaucuuuaaccccaaguacgauuguaagauaaugaccucaaaaacagacgucaguuccagcgugauuaccucucugggugcuaucgucucaugcuauggcaagacuaaaugcacggccaguaacaagaaucgagggaucauuaaaacauucagcaacggaugugauuacguguccaauaagggcguugacaccgugucuguagguaacacuuuauauuacgucaauaagcaagaagggaaaucgcuguaugugaagggagagccuaucauuaacuuuuacgacccccuaguuuucccgagcgaugaauuugacgcguccauaucacaggugaaugagaaaaucaaccagagucucgccuucauuagaaagucugaugaacugcuucacaaugucaacgcaggcaaaagcaccacaaauaucaugaucaccacuauuauaaucgugauuaucguaauuuugcugucccucaucgcugugggccugcuucuguacugcaaggccaggugaggacuagucccuguucccagagcccacuuuuuuuucuuuuuuugaaauaaaauagccugucuuucagaucuaaaaaaaaaaaaaaaaaaaaaaaaaaaaaaaaaaaaaaaaaaaaaaaaaaaaaaaaaaaaaaaaugcaucccccccccccccccccccccccccccccccaaaggcucuuuucagagccaccagaauu

SEQ ID NO: 633 - RNA, 1960 nt, Artificial Sequence
  mRNA product Design d-1 comprising derived and/or modified sequence from HRSV(A2)__F-del (opt4)
gggagacccgugacccggaaguuguacggcuacgcgacuuucccucccacaaacccucgcgcccuuccuuuccuacuugggcccggcagaaagcuuaccauggagcugcugauccugaaggccaacgccaucaccaccauccugaccgccgugaccuucugcuucgccagcggccagaacaucaccgaggaguucuaccagagcaccugcagcgccgugagcaagggcuaccugagcgcccugagaaccggcugguacaccagcgugaucaccaucgagcugagcaacaucaaggagaacaagugcaacggcaccgacgccaaggugaagcugaucaagcaggagcuggacaaguacaagaacgccgugaccgagcugcagcugcugaugcagagcacccccgccaccaacaacagagccagaagagagcugcccagauucaugaacuacacccugaacaacgccaagaagaccaacgugacccugagcaagaagagaaagagaagauuccugggcuuccugcugggcgugggcagcgccaucgccagcggcguggccgugagcaaggugcugcaccuggagggcgaggugaacaagaucaagagcgcccugcugagcaccaacaaggccguggugagccugagcaacggcgugagcgugcugaccagcaaggugcuggaccugaagaacuacaucgacaagcagcugcugcccaucgugaacaagcagagcugcagcaucagcaacaucgagaccgugaucgaguuccagcagaagaacaacagacugcuggagaucaccagagaguucagcgugaacgccggcgugaccacccccgugagcaccuacaugcugaccaacagcgagcugcugagccugaucaacgacaugcccaucaccaacgaccagaagaagcugaugagcaacaacgugcagaucgugagacagcagagcuacagcaucaugagcaucaucaaggaggaggugcuggccuacguggugcagcugccccuguacggcgugaucgacacccccugcuggaagcugcacaccagcccccugugcaccaccaacaccaaggagggcagcaacaucugccugaccagaaccgacagaggcugguacugcgacaacgccggcagcgugagcuucuucccccaggccgagaccugcaaggugcagagcaacagaguguucugcgacaccaugaacagccugacccugcccagcgaggugaaccugugcaacguggacaucuucaaccccaaguacgacugcaagaucaugaccagcaagaccgacgugagcagcagcgugaucaccagccugggcgccaucgugagcugcuacggcaagaccaagugcaccgccagcaacaagaacagaggcaucaucaagaccuucagcaacggcugcgacuacgugagcaacaagggcguggacaccgugagcgugggcaacacccuguacuacgugaacaagcaggagggcaagagccuguacgugaagggcgagcccaucaucaacuucuacgacccccugguguuccccagcgacgaguucgacgccagcaucagccaggugaacgagaagaucaaccagagccuggccuucaucagaaagagcgacgagcugcugcacaacgugaacgccggcaagagcaccaccaacaucaugaucaccaccaucaucaucgugaucaucgugauccugcugagccugaucgccgugggccugcugcuguacugcaaggccagaugaggacuagucccuguucccagagcccacuuuuuuuucuuuuuuugaaauaaaauagccugucuuucagaucuaaaaaaaaaaaaaaaaaaaaaaaaaaaaaaaaaaaaaaaaaaaaaaaaaaaaaaaaaaaaaaaaugcaucccccccccccccccccccccccccccccccaaaggcucuuuucagagccaccagaauu

SEQ ID NO: 634 - RNA, 1960 nt, Artificial Sequence
  mRNA product Design d-1 comprising derived and/or modified sequence from HRSV(A2)__F-del (opt5)
gggagacccgugacccggaaguuguacggcuacgcgacuuucccucccacaaacccucgcgcccuuccuuuccuacuugggcccggcagaaagcuuaccauggagcugcucauccugaaggccaacgcuauuaccacaauccuuacggccgugaccuucugcuuugcgagcggccagaauauuacagaagaguucuaccaauccaccuguucugcugucagcaaaggguaucuguccgcccucagaacaggaugguacaccucuguuaucacaauugaacugagcaacaucaaggagaauaaaugcaacggcaccgacgccaaggugaaacuuaucaagcaggaacuggauaaguauaaaaaugcugugacggagcuccagcugcugaugcaguccacccccgccacaaacaaucgggcucgcagagagcucccucgguuuaugaacuacacccugaauaacgccaagaaaacaaaugucacccuuucuaagaaacgcaagagacgguuccugggguuucuccugggagugggcagcgcgauugccuccgggguugcugugagcaagguccuucaccuggaaggagaggugaacaaaaucaagucugcccuccuguccacgaauaaagcuguugugagccugucuaacggcgucuccgugcucacaagcaaggugcuggaccuuaaaaauuauauugauaagcaacugcucccgaucgucaacaaacagucuuguuccauuagcaacaucgaaaccguuauugaguuccagcagaagaauaaccgccugcuugagaucacaagagaauuuuccgugaaugccggcgugaccacccccgucucuacauacaugcugacgaacagcgagcuccugucccugaucaaugacaugccuauuaccaacgaucaaaagaaacucaugagcaauaacgugcagaucguucggcagcagucuuauuccauuaugagcaucauuaaggaagaggugcuggcguacgucgugcaacuuccccuguacgggguuaucgacacaccuugcuggaaacuccauaccucuccccuguguacaaccaauacgaaggaaggaagcaacaucugccuuacacgcaccgauagaggcugguauugugacaaugccggguccgugucuuucuuuccucaggcugagaccugcaaaguccagagcaaccggguguucugugauacaaugaacucccugacccucccgagcgaggucaaucugugcaauguggacauuuuuaaccccaaguacgauuguaagaucaugacaucuaaaacggacguuuccagcucugugauuaccucccugggagccaucgucagcugcuauggcaagacaaaaugcaccgcuuccaacaagaaucgcgggauuaucaaaacauucucuaacggaugugauuacgugagcaauaagggcguugacaccguguccgucggcaacacgcucuauuacgugaauaagcaagaagggaaaucucuguaugugaagggagagccuaucauuaacuuuuacgacccccuuguuuucccuagcgaugaauuugacgccuccaucagccaggucaaugagaaaauuaaccagucucuggccuucaucagaaaguccgaugaacuccugcacaaugugaacgcuggcaaaagcaccacaaauauuaugaucaccacaauuaucaucgugauuaucgucauucugcuuucucucaucgcgguggggcugcugcucuacugcaaggcccggugaggacuagucccuguucccagagcccacuuuuuuuucuuuuuuugaaauaaaauagccugucuuucagaucuaaaaaaaaaaaaaaaaaaaaaaaaaaaaaaaaaaaaaaaaaaaaaaaaaaaaaaaaaaaaaaaaugcaucccccccccccccccccccccccccccccccaaaggcucuuuucagagccaccagaauu

SEQ ID NO: 635 - RNA, 1960 nt, Artificial Sequence
  mRNA product Design d-1 comprising derived and/or modified sequence from HRSV(A2)__F-del (opt6)
gggagacccgugacccggaaguuguacggcuacgcgacuuucccucccacaaacccucgcgcccuuccuuuccuacuugggcccggcagaaagcuuaccauggaauuacuaauacucaaagccaacgcaauaacaacaauacuaacagcaguaacauucugcuucgcaucaggacaaaacaucacagaagaauuuuaccaaaguacaugcagugcagucucuaaaggauaccucagugccuuacgcacaggaugguacacaucaguaauaacaaucgaacuuucaaacauaaaagaaaacaaaugcaauggaaccgacgccaaaguaaaacuaaucaaacaagaacuagacaaauauaaaaaugcaguaacagaauuacaacuccuaaugcaauccacaccagcaacaaauaacagagcaagacgagaacucccucgauucaugaauuacacauuaaacaacgcaaaaaaaacuaacguaacuuuaucaaaaaaaagaaaacguagauuucuaggauuccuacuaggcguaggguccgccauugcaucaggaguagcaguuagcaaaguauuacauuuagaaggagaaguaaauaaaaucaaaagcgcacuacucucaaccaacaaagcaguaguaucacucucaaacggaguaucaguacuaacauccaaaguacucgaccucaaaaacuacauagacaaacaauuacuacccauaguaaacaaacaaucaugcucuauaucaaauaucgaaacaguaaucgaauuucaacaaaaaaacaaucgacuacuugaaauaacaagagaguucuccgucaaugccggagucaccacaccagucucaacauacaugcuaaccaacucugaacuccuaucacuaauaaaugacaugccaauaacaaacgaccaaaaaaaacuaaugucaaauaacguacaaauaguacgacaacaaaguuauuccauaaugaguauaaucaaagaagaaguguuagcauacguaguccaacuaccauuauauggaguaauagacacaccauguuggaaauuacacaccucaccacucugcacuaccaauacaaaagaaggcucaaauauaugccuaacucgcacagacagaggcugguacugcgauaacgcaggauccguaucuuucuuuccccaagcagaaacuugcaaaguacaaucaaacagagucuucugcgacaccaugaauagucucacauuaccaucugaaguaaaccuauguaacguagauauauucaauccaaaauacgacugcaaaauaaugacaucaaaaaccgacgucucuagcaguguaaucacaucacuaggagcaauaguaagcugcuauggaaaaacaaaauguacagcaucaaacaaaaacaggggaauaauaaaaaccuucucaaacggaugugacuacguaucaaauaaaggcguagacacaguaagcguaggaaacacccuauacuacguuaacaaacaagaagggaaaucauuauacguaaaaggagaaccaauaauaaacuucuacgauccacucguauucccauccgacgaauuugacgccagcauaucccaaguuaacgaaaaaauaaaccaaucacuugcauuuauacgaaaaucugaugaacuucuccacaacguaaaugcaggaaaauccaccaccaauauaaugaucacaacuaucaucauaguaauaaucgucauuuuacuaucauuaauagcaguuggccuacuucuauacugcaaagcaagauaaggacuagucccuguucccagagcccacuuuuuuuucuuuuuuugaaauaaaauagccugucuuucagaucuaaaaaaaaaaaaaaaaaaaaaaaaaaaaaaaaaaaaaaaaaaaaaaaaaaaaaaaaaaaaaaaaugcaucccccccccccccccccccccccccccccccaaaggcucuuuucagagccaccagaauu

SEQ ID NO: 636 - RNA, 1960 nt, Artificial Sequence
  mRNA product Design d-1 comprising derived and/or modified sequence from HRSV(A2)__F-del (opt11)
gggagacccgugacccggaaguuguacggcuacgcgacuuucccucccacaaacccucgcgcccuuccuuuccuacuugggcccggcagaaagcuuaccauggaacuacuaauccuaaaagccaacgcgaucaccaccauccuaacggcagucaccuucugcuucgcaucaggccaaaacaucacagaagaguucuaccaaagcacaugcuccgccguauccaaaggcuaccucagcgcccuacgcacaggcugguacacaucugucaucaccauagaacucuccaacaucaaagaaaacaaaugcaacggcacugacgccaaaguaaagcugaucaaacaagaacucgacaaauacaaaaacgcagucaccgaacuccaacuacucaugcaauccaccccugcaaccaacaacagggcccgccgcgaacucccccgcuucaugaacuacacuuuaaacaacgccaaaaagaccaacgucacacucagcaagaaacggaaacgacgauuccuaggguuucuccuaggcgucggcucggcaaucgccuccggcgucgccguaagcaaaguacuacaccuagaaggcgaagugaacaaaaucaaaagugcccuucucuccaccaacaaggccguagucucucuauccaacggagucucaguccucaccucaaagguccucgaccucaaaaacuacaucgacaaacaacuacuccccauugucaacaagcagucaugcuccauaucaaacaucgaaaccgucaucgaguuccaacagaaaaacaaccgacuccucgaaauaaccagagaguucucggucaacgccggcgucaccaccccagucagcaccuacaugcucacuaacuccgaacuccuaucccucaucaacgacaugccaauuaccaacgaccaaaagaaacuaaugucgaacaacguucaaaucguccgacaacaaaguuacuccaucaugagcauaaucaaagaagaaguucuagcguacgucguccaacucccacuauacggcgucaucgacacuccgugcuggaaacuccacacaucaccccuauguacaaccaacacaaaagaaggcagcaacaucugccucacccgcaccgaccgagggugguauugcgauaacgcuggcagcgucuccuucuucccccaagccgaaaccugcaaaguccaaucaaacagaguauucugcgacaccaugaacucccuuacucucccuagcgaagucaaccucugcaacguugacauauucaaccccaaauacgacugcaaaaucaugaccuccaagaccgacgucuccuccuccgucaucacaucucuaggugccauugucuccugcuacggaaaaaccaaaugcacagccuccaacaaaaaccgcggcaucauaaaaaccuucuccaacggcugcgacuacgucaguaauaaaggcgucgacacgguauccguugggaauacgcuuuacuacguaaauaaacaagaaggcaaaucccucuacgucaaaggugaacccaucauaaacuucuacgacccgcuuguguucccauccgacgaguucgacgccagcaucagccaggucaacgaaaagaucaaccaaucccuagccuucauccgcaaaagcgacgaacuacuacacaacgucaacgccggaaaauccacaaccaacaucaugaucaccaccaucaucaucgucaucaucguaauccuacucucucucaucgccgucggccuccuacuguacuguaaagcccgauagggacuagucccuguucccagagcccacuuuuuuuucuuuuuuugaaauaaaauagccugucuuucagaucuaaaaaaaaaaaaaaaaaaaaaaaaaaaaaaaaaaaaaaaaaaaaaaaaaaaaaaaaaaaaaaaaugcaucccccccccccccccccccccccccccccccaaaggcucuuuucagagccaccagaauu

SEQ ID NO: 637 - RNA, 2015 nt, Artificial Sequence
  mRNA product Design d-2 comprising derived and/or modified sequence from HRSV(A2)__F-del (artificial)
gggagagcggcucggccauuuugucccagucaguccggaggcugcggcugcagaaguaccgccugcggaguaacugcaaagaagcuuaccauggaguugcuaauccucaaagcaaaugcaauuaccacaauccucacugcagucacauuuuguuuugcuucuggucaaaacaucacugaagaauuuuaucaaucaacaugcagugcaguuagcaaaggcuaucuuagugcucugagaacugguugguauaccaguguuauaacuauagaauuaaguaauaucaaggaaaauaaguguaauggaacagaugcuaagguaaaauugauaaaacaagaauuagauaaauauaaaaaugcuguaacagaauugcaguugcucaugcaaagcacaccagcaacaaacaaucgagccagaagagaacuaccaagguuuaugaauuauacacucaacaaugccaaaaaaaccaauguaacauuaagcaagaaaaggaaaagaagauuucuugguuuuuuguuagguguuggaucugcaaucgccaguggcguugcuguaucuaagguccugcaccuagaaggggaagugaacaagaucaaaagugcucuacuauccacaaacaaggcuguagucagcuuaucaaauggaguuagugucuuaaccagcaaaguguuagaccucaaaaacuauauagauaaacaauuguuaccuauugugaacaagcaaagcugcagcauaucaaauauagaaacugugauagaguuccaacaaaagaacaacagacuacuagagauuaccagggaauuuaguguuaaugcagguguaacuacaccuguaagcacuuacauguuaacuaauagugaauuauugucauuaaucaaugauaugccuauaacaaaugaucagaaaaaguuaauguccaacaauguucaaauaguuagacagcaaaguuacucuaucauguccauaauaaaagaggaagucuuagcauauguaguacaauuaccacuauaugguguuauagauacacccuguuggaaacuacacacauccccucuauguacaaccaacacaaaagaaggguccaacaucuguuuaacaagaacugacagaggaugguacugugacaaugcaggaucaguaucuuucuucccacaagcugaaacauguaaaguucaaucaaaucgaguauuuugugacacaaugaacaguuuaacauuaccaagugaaguaaaucucugcaauguugacauauucaaccccaaauaugauuguaaaauuaugacuucaaaaacagauguaagcagcuccguuaucacaucucuaggagccauugugucaugcuauggcaaaacuaaauguacagcauccaauaaaaaucguggaaucauaaagacauuuucuaacgggugcgauuauguaucaaauaaagggguggacacugugucuguagguaacacauuauauuauguaaauaagcaagaagguaaaagucucuauguaaaaggugaaccaauaauaaauuucuaugacccauuaguauuccccucugaugaauuugaugcaucaauaucucaagucaacgagaagauuaaccagagccuagcauuuauucguaaauccgaugaauuauuacauaauguaaaugcugguaaauccaccacaaauaucaugauaacuacuauaauuauagugauuauaguaauauuguuaucauuaauugcuguuggacugcucuuauacuguaaggccagauaaggacuaguaauaaggaaacuguaugaaugucugugggcaggaagugaagagauccuucuguaaagguuuuuggaauuaugucugcugaauaauaaacuuuuuugaaauaauaaaucugguagaaaaaugagaucuaaaaaaaaaaaaaaaaaaaaaaaaaaaaaaaaaaaaaaaaaaaaaaaaaaaaaaaaaaaaaaaaugcaucccccccccccccccccccccccccccccccaaaggcucuuuucagagccaccagaauu

SEQ ID NO: 638 - RNA, 2015 nt, Artificial Sequence
  mRNA product Design d-2 comprising derived and/or modified sequence from HRSV(A2)__F-del (opt1)
gggagagcggcucggccauuuugucccagucaguccggaggcugcggcugcagaaguaccgccugcggaguaacugcaaagaagcuuaccauggagcugcucauccugaaggccaacgccaucaccaccauccugacggcggugaccuucugcuucgccagcggccagaacaucaccgaggaguucuaccaguccaccugcagcgccgucuccaagggguaccucagcgcccugcggacgggcugguacaccuccgugaucaccaucgagcugagcaacaucaaggagaacaagugcaacgggaccgacgccaaggugaagcucaucaagcaggagcuggacaaguacaagaacgcggucacggagcugcagcuccugaugcaguccaccccggcaaccaacaaccgcgcccggcgcgagcugccccgguucaugaacuacacccucaacaacgccaagaagacgaacgugacccugagcaagaagcgcaagcggcgcuuccugggcuuccuccugggggugggcuccgccaucgcgagcggcgucgccguguccaaggugcugcaccucgagggggaggucaacaagaucaagagcgcccugcuguccaccaacaaggccguggugagccucuccaacggcgucagcgugcugaccuccaaggugcuggaccucaagaacuacaucgacaagcagcugcugcccaucgucaacaagcagagcugcuccaucagcaacaucgagacggugaucgaguuccagcagaagaacaaccggcuccuggagaucacccgcgaguucagcgugaacgccggggucaccacccccguguccacguacaugcugaccaacagcgagcuccugucccugaucaacgacaugccgaucaccaacgaccagaagaagcucaugagcaacaacgugcagaucguccggcagcaguccuacagcaucauguccaucaucaaggaggaggugcuggcguacgugguccagcugccccucuacggcgugaucgacacccccugcuggaagcugcacacgagcccccugugcaccaccaacaccaaggagggguccaacaucugccucacgcgcaccgaccggggcugguacugcgacaacgccggcagcgucuccuucuucccgcaggccgagaccugcaaggugcagagcaaccgcguguucugcgacaccaugaacucccugacgcugcccagcgagguaaaccucugcaacgucgacaucuucaaccccaaguacgacugcaagaucaugaccuccaagaccgacgugagcuccagcgugaucaccucccugggggccaucgucagcugcuacggcaagacgaagugcaccgccagcaacaagaaccgggggaucaucaagaccuucuccaacggcugcgacuacgugagcaacaagggcguggacaccguguccgucgggaacacccuguacuacgugaacaagcaggagggcaagagccucuacgugaagggggagcccaucaucaacuucuacgacccgcuggucuuccccuccgacgaguucgacgcgagcaucucccaggugaacgagaagaucaaccagagccuggccuucauccgcaaguccgacgagcugcuccacaacgugaacgccggcaagagcacgaccaacaucaugaucaccaccaucaucaucgucaucaucgugauccugcugucccucaucgccguggggcugcugcucuacugcaaggcccggugaggacuaguaauaaggaaacuguaugaaugucugugggcaggaagugaagagauccuucuguaaagguuuuuggaauuaugucugcugaauaauaaacuuuuuugaaauaauaaaucugguagaaaaaugagaucuaaaaaaaaaaaaaaaaaaaaaaaaaaaaaaaaaaaaaaaaaaaaaaaaaaaaaaaaaaaaaaaaugcaucccccccccccccccccccccccccccccccaaaggcucuuuucagagccaccagaauu

SEQ ID NO: 639 - RNA, 2015 nt, Artificial Sequence
  mRNA product Design d-2 comprising derived and/or modified sequence from HRSV(A2)__F-del (opt1)
gggagagcggcucggccauuuugucccagucaguccggaggcugcggcugcagaaguaccgccugcggaguaacugcaaagaagcuuaccauggagcugcucauccugaaggccaacgccaucaccaccauccugacggcggugaccuucugcuucgccagcggccagaacaucaccgaggaguucuaccaguccacgugcagcgccgucuccaagggguaccucagcgcccugcgcaccggcugguacaccuccgugaucaccaucgagcugagcaacaucaaggagaacaagugcaacgggaccgacgccaaggugaagcucaucaagcaggagcuggacaaguacaagaacgcggucacggagcugcagcuccugaugcaguccacccccgccaccaacaaccgggcccgccgggagcugccgcgcuucaugaacuacacccucaacaacgccaagaagacgaacgugacccugagcaagaagcggaagcgccgguuccugggcuuccuccugggggugggcuccgcgaucgccagcggcgucgccguguccaaggugcugcaccucgagggggaggucaacaagaucaagagcgcccugcuguccaccaacaaggccguggugagccucuccaacggcgucagcgugcugaccuccaaggugcuggaccucaagaacuacaucgacaagcagcugcugcccaucgucaacaagcagagcugcuccaucagcaacaucgagacggugaucgaguuccagcagaagaacaaccgccuccuggagaucacccgggaguucagcgugaacgcgggggucaccacccccguguccacguacaugcugaccaacagcgagcuccugucccugaucaacgacaugcccaucaccaacgaccagaagaagcucaugagcaacaacgugcagaucguccgccagcaguccuacagcaucauguccaucaucaaggaggaggugcuggccuacgugguccagcugccgcucuacggcgugaucgacacccccugcuggaagcugcacacgagcccccugugcaccaccaacaccaaggagggguccaacaucugccucacgcggaccgaccgcggcugguacugcgacaacgccggcagcgucuccuucuucccccaggccgagaccugcaaggugcagagcaaccggguguucugcgacaccaugaacucccugacgcugccgagcgaggucaaccucugcaacguggacaucuucaaccccaaguacgacugcaagaucaugaccuccaagaccgacgugagcuccagcgucaucaccucccugggggccaucgugagcugcuacggcaagacgaagugcaccgcgagcaacaagaaccgcgggaucaucaagaccuucuccaacggcugcgacuacgugagcaacaagggcgucgacaccguguccguggggaacacccuguacuacgucaacaagcaggagggcaagagccucuacgugaagggggagcccaucaucaacuucuacgacccccugguguucccguccgacgaguucgacgccagcaucucccaggucaacgagaagaucaaccagagccuggccuucauccggaaguccgacgagcuccugcacaacgugaacgccggcaagagcacgaccaacaucaugaucaccaccaucaucaucgugaucaucgucauccugcugucccucaucgccguggggcugcugcucuacugcaaggcgcgcugaggacuaguaauaaggaaacuguaugaaugucugugggcaggaagugaagagauccuucuguaaagguuuuuggaauuaugucugcugaauaauaaacuuuuuugaaauaauaaaucugguagaaaaaugagaucuaaaaaaaaaaaaaaaaaaaaaaaaaaaaaaaaaaaaaaaaaaaaaaaaaaaaaaaaaaaaaaaaugcaucccccccccccccccccccccccccccccccaaaggcucuuuucagagccaccagaauu

SEQ ID NO: 640 - RNA, 2015 nt, Artificial Sequence
  mRNA product Design d-2 comprising derived and/or modified sequence from HRSV(A2)__F-del (opt2)
gggagagcggcucggccauuuugucccagucaguccggaggcugcggcugcagaaguaccgccugcggaguaacugcaaagaagcuuaccauggagcuccucauccucaaggccaacgccaucaccaccauccucaccgccgucaccuucugcuucgccuccggccagaacaucaccgaggaguucuaccaguccaccugcuccgccgucuccaagggcuaccucuccgcccuccgcaccggcugguacaccuccgucaucaccaucgagcucuccaacaucaaggagaacaagugcaacggcaccgacgccaaggucaagcucaucaagcaggagcucgacaaguacaagaacgccgucaccgagcuccagcuccucaugcaguccacccccgccaccaacaaccgcgcccgccgcgagcucccccgcuucaugaacuacacccucaacaacgccaagaagaccaacgucacccucuccaagaagcgcaagcgccgcuuccucggcuuccuccucggcgucggcuccgccaucgccuccggcgucgccgucuccaagguccuccaccucgagggcgaggucaacaagaucaaguccgcccuccucuccaccaacaaggccgucgucucccucuccaacggcgucuccguccucaccuccaagguccucgaccucaagaacuacaucgacaagcagcuccuccccaucgucaacaagcaguccugcuccaucuccaacaucgagaccgucaucgaguuccagcagaagaacaaccgccuccucgagaucacccgcgaguucuccgucaacgccggcgucaccacccccgucuccaccuacaugcucaccaacuccgagcuccucucccucaucaacgacaugcccaucaccaacgaccagaagaagcucauguccaacaacguccagaucguccgccagcaguccuacuccaucauguccaucaucaaggaggagguccucgccuacgucguccagcucccccucuacggcgucaucgacacccccugcuggaagcuccacaccuccccccucugcaccaccaacaccaaggagggcuccaacaucugccucacccgcaccgaccgcggcugguacugcgacaacgccggcuccgucuccuucuucccccaggccgagaccugcaagguccaguccaaccgcgucuucugcgacaccaugaacucccucacccuccccuccgaggucaaccucugcaacgucgacaucuucaaccccaaguacgacugcaagaucaugaccuccaagaccgacgucuccuccuccgucaucaccucccucggcgccaucgucuccugcuacggcaagaccaagugcaccgccuccaacaagaaccgcggcaucaucaagaccuucuccaacggcugcgacuacgucuccaacaagggcgucgacaccgucuccgucggcaacacccucuacuacgucaacaagcaggagggcaagucccucuacgucaagggcgagcccaucaucaacuucuacgacccccucgucuuccccuccgacgaguucgacgccuccaucucccaggucaacgagaagaucaaccagucccucgccuucauccgcaaguccgacgagcuccuccacaacgucaacgccggcaaguccaccaccaacaucaugaucaccaccaucaucaucgucaucaucgucauccuccucucccucaucgccgucggccuccuccucuacugcaaggcccgcugaggacuaguaauaaggaaacuguaugaaugucugugggcaggaagugaagagauccuucuguaaagguuuuuggaauuaugucugcugaauaauaaacuuuuuugaaauaauaaaucugguagaaaaaugagaucuaaaaaaaaaaaaaaaaaaaaaaaaaaaaaaaaaaaaaaaaaaaaaaaaaaaaaaaaaaaaaaaaugcaucccccccccccccccccccccccccccccccaaaggcucuuuucagagccaccagaauu

SEQ ID NO: 641 - RNA, 2015 nt, Artificial Sequence
  mRNA product Design d-2 comprising derived and/or modified sequence from HRSV(A2)__F-del (opt3)
gggagagcggcucggccauuuugucccagucaguccggaggcugcggcugcagaaguaccgccugcggaguaacugcaaagaagcuuaccauggagcugcucauccuuaaggccaacgcuauuaccacaauacugacugcagugacguucugcuuugccagcggccagaauaucaccgaagaguucuaccaauccacauguucugcggucucaaaaggguauuugagugcuuuaagaacuggaugguacaccagcguuauuacaaucgaacuguccaacauuaaggagaauaaaugcaacgguaccgacgccaaggugaaacuaaucaagcaggaacucgauaaguauaaaaaugcaguaacugagcugcagcuucugaugcagucuacacccgccaccaacaauagggcucggcgcgaguugccucgauuuaugaacuacacgcucaauaacgcaaagaaaacuaaugugacccugucgaagaaacguaagagaagguuccugggcuuucucuuaggggucggaucagccauagcuagcggcguggccguuaguaaggugcugcaccuugaaggugaggucaacaaaaucaaguccgcguugcugucuacaaauaaagcagugguaagccuauccaacgggguuucagugcucacuucuaagguccuggaccuuaaaaauuauauugauaagcaacuguugccaaucgugaacaaacagagcuguucuauuuccaacaucgaaaccgugauagaguuccagcagaagaauaaccggcuccuggagauuacacgcgaauuuucagucaaugccggaguuaccacgccggugagcacuuacauguuaacaaacagugagcugcucucucuuaucaaugacaugcccauuaccaacgaucaaaagaaacugauguccaauaacguacagaucgugagacagcagagcuauucgaucaugucuauuauaaaggaagaggucuuggcuuacgugguucaacuaccucuguacggcgugaucgacacuccaugcuggaaacuccauacauccccacuguguaccacgaauaccaaggaaggcucaaacauuugccuuacaaggacugaucgggggugguauugugacaaugccggaagugucagcuucuuuccucaggcagagaccugcaaagugcaguccaaccgcguauucugugauacaaugaauagucugacuuugccaagcgagguuaaccucugcaauguggacaucuuuaaccccaaguacgauuguaagauaaugaccucaaaaacagacgucaguuccagcgugauuaccucucugggugcuaucgucucaugcuauggcaagacuaaaugcacggccaguaacaagaaucgagggaucauuaaaacauucagcaacggaugugauuacguguccaauaagggcguugacaccgugucuguagguaacacuuuauauuacgucaauaagcaagaagggaaaucgcuguaugugaagggagagccuaucauuaacuuuuacgacccccuaguuuucccgagcgaugaauuugacgcguccauaucacaggugaaugagaaaaucaaccagagucucgccuucauuagaaagucugaugaacugcuucacaaugucaacgcaggcaaaagcaccacaaauaucaugaucaccacuauuauaaucgugauuaucguaauuuugcugucccucaucgcugugggccugcuucuguacugcaaggccaggugaggacuaguaauaaggaaacuguaugaaugucugugggcaggaagugaagagauccuucuguaaagguuuuuggaauuaugucugcugaauaauaaacuuuuuugaaauaauaaaucugguagaaaaaugagaucuaaaaaaaaaaaaaaaaaaaaaaaaaaaaaaaaaaaaaaaaaaaaaaaaaaaaaaaaaaaaaaaaugcaucccccccccccccccccccccccccccccccaaaggcucuuuucagagccaccagaauu

SEQ ID NO: 642 - RNA, 2015 nt, Artificial Sequence
  mRNA product Design d-2 comprising derived and/or modified sequence from HRSV(A2)__F-del (opt4)
gggagagcggcucggccauuuugucccagucaguccggaggcugcggcugcagaaguaccgccugcggaguaacugcaaagaagcuuaccauggagcugcugauccugaaggccaacgccaucaccaccauccugaccgccgugaccuucugcuucgccagcggccagaacaucaccgaggaguucuaccagagcaccugcagcgccgugagcaagggcuaccugagcgcccugagaaccggcugguacaccagcgugaucaccaucgagcugagcaacaucaaggagaacaagugcaacggcaccgacgccaaggugaagcugaucaagcaggagcuggacaaguacaagaacgccgugaccgagcugcagcugcugaugcagagcacccccgccaccaacaacagagccagaagagagcugcccagauucaugaacuacacccugaacaacgccaagaagaccaacgugacccugagcaagaagagaaagagaagauuccugggcuuccugcugggcgugggcagcgccaucgccagcggcguggccgugagcaaggugcugcaccuggagggcgaggugaacaagaucaagagcgcccugcugagcaccaacaaggccguggugagccugagcaacggcgugagcgugcugaccagcaaggugcuggaccugaagaacuacaucgacaagcagcugcugcccaucgugaacaagcagagcugcagcaucagcaacaucgagaccgugaucgaguuccagcagaagaacaacagacugcuggagaucaccagagaguucagcgugaacgccggcgugaccacccccgugagcaccuacaugcugaccaacagcgagcugcugagccugaucaacgacaugcccaucaccaacgaccagaagaagcugaugagcaacaacgugcagaucgugagacagcagagcuacagcaucaugagcaucaucaaggaggaggugcuggccuacguggugcagcugccccuguacggcgugaucgacacccccugcuggaagcugcacaccagcccccugugcaccaccaacaccaaggagggcagcaacaucugccugaccagaaccgacagaggcugguacugcgacaacgccggcagcgugagcuucuucccccaggccgagaccugcaaggugcagagcaacagaguguucugcgacaccaugaacagccugacccugcccagcgaggugaaccugugcaacguggacaucuucaaccccaaguacgacugcaagaucaugaccagcaagaccgacgugagcagcagcgugaucaccagccugggcgccaucgugagcugcuacggcaagaccaagugcaccgccagcaacaagaacagaggcaucaucaagaccuucagcaacggcugcgacuacgugagcaacaagggcguggacaccgugagcgugggcaacacccuguacuacgugaacaagcaggagggcaagagccuguacgugaagggcgagcccaucaucaacuucuacgacccccugguguuccccagcgacgaguucgacgccagcaucagccaggugaacgagaagaucaaccagagccuggccuucaucagaaagagcgacgagcugcugcacaacgugaacgccggcaagagcaccaccaacaucaugaucaccaccaucaucaucgugaucaucgugauccugcugagccugaucgccgugggccugcugcuguacugcaaggccagaugaggacuaguaauaaggaaacuguaugaaugucugugggcaggaagugaagagauccuucuguaaagguuuuuggaauuaugucugcugaauaauaaacuuuuuugaaauaauaaaucugguagaaaaaugagaucuaaaaaaaaaaaaaaaaaaaaaaaaaaaaaaaaaaaaaaaaaaaaaaaaaaaaaaaaaaaaaaaaugcaucccccccccccccccccccccccccccccccaaaggcucuuuucagagccaccagaauu

SEQ ID NO: 643 - RNA, 2015 nt, Artificial Sequence
  mRNA product Design d-2 comprising derived and/or modified sequence from HRSV(A2)__F-del (opt5)
gggagagcggcucggccauuuugucccagucaguccggaggcugcggcugcagaaguaccgccugcggaguaacugcaaagaagcuuaccauggagcugcucauccugaaggccaacgcuauuaccacaauccuuacggccgugaccuucugcuuugcgagcggccagaauauuacagaagaguucuaccaauccaccuguucugcugucagcaaaggguaucuguccgcccucagaacaggaugguacaccucuguuaucacaauugaacugagcaacaucaaggagaauaaaugcaacggcaccgacgccaaggugaaacuuaucaagcaggaacuggauaaguauaaaaaugcugugacggagcuccagcugcugaugcaguccacccccgccacaaacaaucgggcucgcagagagcucccucgguuuaugaacuacacccugaauaacgccaagaaaacaaaugucacccuuucuaagaaacgcaagagacgguuccugggguuucuccugggagugggcagcgcgauugccuccgggguugcugugagcaagguccuucaccuggaaggagaggugaacaaaaucaagucugcccuccuguccacgaauaaagcuguugugagccugucuaacggcgucuccgugcucacaagcaaggugcuggaccuuaaaaauuauauugauaagcaacugcucccgaucgucaacaaacagucuuguuccauuagcaacaucgaaaccguuauugaguuccagcagaagaauaaccgccugcuugagaucacaagagaauuuuccgugaaugccggcgugaccacccccgucucuacauacaugcugacgaacagcgagcuccugucccugaucaaugacaugccuauuaccaacgaucaaaagaaacucaugagcaauaacgugcagaucguucggcagcagucuuauuccauuaugagcaucauuaaggaagaggugcuggcguacgucgugcaacuuccccuguacgggguuaucgacacaccuugcuggaaacuccauaccucuccccuguguacaaccaauacgaaggaaggaagcaacaucugccuuacacgcaccgauagaggcugguauugugacaaugccggguccgugucuuucuuuccucaggcugagaccugcaaaguccagagcaaccggguguucugugauacaaugaacucccugacccucccgagcgaggucaaucugugcaauguggacauuuuuaaccccaaguacgauuguaagaucaugacaucuaaaacggacguuuccagcucugugauuaccucccugggagccaucgucagcugcuauggcaagacaaaaugcaccgcuuccaacaagaaucgcgggauuaucaaaacauucucuaacggaugugauuacgugagcaauaagggcguugacaccguguccgucggcaacacgcucuauuacgugaauaagcaagaagggaaaucucuguaugugaagggagagccuaucauuaacuuuuacgacccccuuguuuucccuagcgaugaauuugacgccuccaucagccaggucaaugagaaaauuaaccagucucuggccuucaucagaaaguccgaugaacuccugcacaaugugaacgcuggcaaaagcaccacaaauauuaugaucaccacaauuaucaucgugauuaucgucauucugcuuucucucaucgcgguggggcugcugcucuacugcaaggcccggugaggacuaguaauaaggaaacuguaugaaugucugugggcaggaagugaagagauccuucuguaaagguuuuuggaauuaugucugcugaauaauaaacuuuuuugaaauaauaaaucugguagaaaaaugagaucuaaaaaaaaaaaaaaaaaaaaaaaaaaaaaaaaaaaaaaaaaaaaaaaaaaaaaaaaaaaaaaaaugcaucccccccccccccccccccccccccccccccaaaggcucuuuucagagccaccagaauu

SEQ ID NO: 644 - RNA, 2015 nt, Artificial Sequence
  mRNA product Design d-2 comprising derived and/or modified sequence from HRSV(A2)__F-del (opt6)
gggagagcggcucggccauuuugucccagucaguccggaggcugcggcugcagaaguaccgccugcggaguaacugcaaagaagcuuaccauggaauuacuaauacucaaagccaacgcaauaacaacaauacuaacagcaguaacauucugcuucgcaucaggacaaaacaucacagaagaauuuuaccaaaguacaugcagugcagucucuaaaggauaccucagugccuuacgcacaggaugguacacaucaguaauaacaaucgaacuuucaaacauaaaagaaaacaaaugcaauggaaccgacgccaaaguaaaacuaaucaaacaagaacuagacaaauauaaaaaugcaguaacagaauuacaacuccuaaugcaauccacaccagcaacaaauaacagagcaagacgagaacucccucgauucaugaauuacacauuaaacaacgcaaaaaaaacuaacguaacuuuaucaaaaaaaagaaaacguagauuucuaggauuccuacuaggcguaggguccgccauugcaucaggaguagcaguuagcaaaguauuacauuuagaaggagaaguaaauaaaaucaaaagcgcacuacucucaaccaacaaagcaguaguaucacucucaaacggaguaucaguacuaacauccaaaguacucgaccucaaaaacuacauagacaaacaauuacuacccauaguaaacaaacaaucaugcucuauaucaaauaucgaaacaguaaucgaauuucaacaaaaaaacaaucgacuacuugaaauaacaagagaguucuccgucaaugccggagucaccacaccagucucaacauacaugcuaaccaacucugaacuccuaucacuaauaaaugacaugccaauaacaaacgaccaaaaaaaacuaaugucaaauaacguacaaauaguacgacaacaaaguuauuccauaaugaguauaaucaaagaagaaguguuagcauacguaguccaacuaccauuauauggaguaauagacacaccauguuggaaauuacacaccucaccacucugcacuaccaauacaaaagaaggcucaaauauaugccuaacucgcacagacagaggcugguacugcgauaacgcaggauccguaucuuucuuuccccaagcagaaacuugcaaaguacaaucaaacagagucuucugcgacaccaugaauagucucacauuaccaucugaaguaaaccuauguaacguagauauauucaauccaaaauacgacugcaaaauaaugacaucaaaaaccgacgucucuagcaguguaaucacaucacuaggagcaauaguaagcugcuauggaaaaacaaaauguacagcaucaaacaaaaacaggggaauaauaaaaaccuucucaaacggaugugacuacguaucaaauaaaggcguagacacaguaagcguaggaaacacccuauacuacguuaacaaacaagaagggaaaucauuauacguaaaaggagaaccaauaauaaacuucuacgauccacucguauucccauccgacgaauuugacgccagcauaucccaaguuaacgaaaaaauaaaccaaucacuugcauuuauacgaaaaucugaugaacuucuccacaacguaaaugcaggaaaauccaccaccaauauaaugaucacaacuaucaucauaguaauaaucgucauuuuacuaucauuaauagcaguuggccuacuucuauacugcaaagcaagauaaggacuaguaauaaggaaacuguaugaaugucugugggcaggaagugaagagauccuucuguaaagguuuuuggaauuaugucugcugaauaauaaacuuuuuugaaauaauaaaucugguagaaaaaugagaucuaaaaaaaaaaaaaaaaaaaaaaaaaaaaaaaaaaaaaaaaaaaaaaaaaaaaaaaaaaaaaaaaugcaucccccccccccccccccccccccccccccccaaaggcucuuuucagagccaccagaauu

SEQ ID NO: 645 - RNA, 2015 nt, Artificial Sequence
  mRNA product Design d-2 comprising derived and/or modified sequence from HRSV(A2)__F-del (opt11)
gggagagcggcucggccauuuugucccagucaguccggaggcugcggcugcagaaguaccgccugcggaguaacugcaaagaagcuuaccauggaacuacuaauccuaaaagccaacgcgaucaccaccauccuaacggcagucaccuucugcuucgcaucaggccaaaacaucacagaagaguucuaccaaagcacaugcuccgccguauccaaaggcuaccucagcgcccuacgcacaggcugguacacaucugucaucaccauagaacucuccaacaucaaagaaaacaaaugcaacggcacugacgccaaaguaaagcugaucaaacaagaacucgacaaauacaaaaacgcagucaccgaacuccaacuacucaugcaauccaccccugcaaccaacaacagggcccgccgcgaacucccccgcuucaugaacuacacuuuaaacaacgccaaaaagaccaacgucacacucagcaagaaacggaaacgacgauuccuaggguuucuccuaggcgucggcucggcaaucgccuccggcgucgccguaagcaaaguacuacaccuagaaggcgaagugaacaaaaucaaaagugcccuucucuccaccaacaaggccguagucucucuauccaacggagucucaguccucaccucaaagguccucgaccucaaaaacuacaucgacaaacaacuacuccccauugucaacaagcagucaugcuccauaucaaacaucgaaaccgucaucgaguuccaacagaaaaacaaccgacuccucgaaauaaccagagaguucucggucaacgccggcgucaccaccccagucagcaccuacaugcucacuaacuccgaacuccuaucccucaucaacgacaugccaauuaccaacgaccaaaagaaacuaaugucgaacaacguucaaaucguccgacaacaaaguuacuccaucaugagcauaaucaaagaagaaguucuagcguacgucguccaacucccacuauacggcgucaucgacacuccgugcuggaaacuccacacaucaccccuauguacaaccaacacaaaagaaggcagcaacaucugccucacccgcaccgaccgagggugguauugcgauaacgcuggcagcgucuccuucuucccccaagccgaaaccugcaaaguccaaucaaacagaguauucugcgacaccaugaacucccuuacucucccuagcgaagucaaccucugcaacguugacauauucaaccccaaauacgacugcaaaaucaugaccuccaagaccgacgucuccuccuccgucaucacaucucuaggugccauugucuccugcuacggaaaaaccaaaugcacagccuccaacaaaaaccgcggcaucauaaaaaccuucuccaacggcugcgacuacgucaguaauaaaggcgucgacacgguauccguugggaauacgcuuuacuacguaaauaaacaagaaggcaaaucccucuacgucaaaggugaacccaucauaaacuucuacgacccgcuuguguucccauccgacgaguucgacgccagcaucagccaggucaacgaaaagaucaaccaaucccuagccuucauccgcaaaagcgacgaacuacuacacaacgucaacgccggaaaauccacaaccaacaucaugaucaccaccaucaucaucgucaucaucguaauccuacucucucucaucgccgucggccuccuacuguacuguaaagcccgauagggacuaguaauaaggaaacuguaugaaugucugugggcaggaagugaagagauccuucuguaaagguuuuuggaauuaugucugcugaauaauaaacuuuuuugaaauaauaaaucugguagaaaaaugagaucuaaaaaaaaaaaaaaaaaaaaaaaaaaaaaaaaaaaaaaaaaaaaaaaaaaaaaaaaaaaaaaaaugcaucccccccccccccccccccccccccccccccaaaggcucuuuucagagccaccagaauu

SEQ ID NO: 646 - RNA, 2331 nt, Artificial Sequence
  mRNA product Design d-3 comprising derived and/or modified sequence from HRSV(A2)__F-del (artificial)
gggagagggcgcuuggcuugcaaggacccugagcugcggcauugaagcacacccaacccaacucgacugaagucagccucacugaaccggaucugagaaucuucucucucugggcuugccagggcucuccgaaccuagcuagcauccucuucaauuccaacuagaaagcuuaccauggaguugcuaauccucaaagcaaaugcaauuaccacaauccucacugcagucacauuuuguuuugcuucuggucaaaacaucacugaagaauuuuaucaaucaacaugcagugcaguuagcaaaggcuaucuuagugcucugagaacugguugguauaccaguguuauaacuauagaauuaaguaauaucaaggaaaauaaguguaauggaacagaugcuaagguaaaauugauaaaacaagaauuagauaaauauaaaaaugcuguaacagaauugcaguugcucaugcaaagcacaccagcaacaaacaaucgagccagaagagaacuaccaagguuuaugaauuauacacucaacaaugccaaaaaaaccaauguaacauuaagcaagaaaaggaaaagaagauuucuugguuuuuuguuagguguuggaucugcaaucgccaguggcguugcuguaucuaagguccugcaccuagaaggggaagugaacaagaucaaaagugcucuacuauccacaaacaaggcuguagucagcuuaucaaauggaguuagugucuuaaccagcaaaguguuagaccucaaaaacuauauagauaaacaauuguuaccuauugugaacaagcaaagcugcagcauaucaaauauagaaacugugauagaguuccaacaaaagaacaacagacuacuagagauuaccagggaauuuaguguuaaugcagguguaacuacaccuguaagcacuuacauguuaacuaauagugaauuauugucauuaaucaaugauaugccuauaacaaaugaucagaaaaaguuaauguccaacaauguucaaauaguuagacagcaaaguuacucuaucauguccauaauaaaagaggaagucuuagcauauguaguacaauuaccacuauaugguguuauagauacacccuguuggaaacuacacacauccccucuauguacaaccaacacaaaagaaggguccaacaucuguuuaacaagaacugacagaggaugguacugugacaaugcaggaucaguaucuuucuucccacaagcugaaacauguaaaguucaaucaaaucgaguauuuugugacacaaugaacaguuuaacauuaccaagugaaguaaaucucugcaauguugacauauucaaccccaaauaugauuguaaaauuaugacuucaaaaacagauguaagcagcuccguuaucacaucucuaggagccauugugucaugcuauggcaaaacuaaauguacagcauccaauaaaaaucguggaaucauaaagacauuuucuaacgggugcgauuauguaucaaauaaagggguggacacugugucuguagguaacacauuauauuauguaaauaagcaagaagguaaaagucucuauguaaaaggugaaccaauaauaaauuucuaugacccauuaguauuccccucugaugaauuugaugcaucaauaucucaagucaacgagaagauuaaccagagccuagcauuuauucguaaauccgaugaauuauuacauaauguaaaugcugguaaauccaccacaaauaucaugauaacuacuauaauuauagugauuauaguaauauuguuaucauuaauugcuguuggacugcucuuauacuguaaggccagauaaggacuagugaagggaacacccaaauuuaauucagccuuaagcacaauuaauuaagagugaaacguaauuguacaagcaguuggucacccaccauagggcaugaucaacaccgcaaccuuuccuuuuucccccagugauucugaaaaaccccucuucccuucagcuugcuuagauguuccaaauuuaguaagcuuaaggcggccuacagaagaaaaagaaaaaaaaggccacaaaaguucccucucacuuucaguaaauaaaauaaaagcagcaacagaaauaaagaaauaaaugaaauucaaaaugaaauaaauauuguguugugcagcauuaaaaaaucaauaaaaauuaaaaaugagcaagaucuaaaaaaaaaaaaaaaaaaaaaaaaaaaaaaaaaaaaaaaaaaaaaaaaaaaaaaaaaaaaaaaaugcaucccccccccccccccccccccccccccccccaaaggcucuuuucagagccaccagaauu

SEQ ID NO: 647 - RNA, 2331 nt, Artificial Sequence
  mRNA product Design d-3 comprising derived and/or modified sequence from HRSV(A2)__F-del (opt1)
gggagagggcgcuuggcuugcaaggacccugagcugcggcauugaagcacacccaacccaacucgacugaagucagccucacugaaccggaucugagaaucuucucucucugggcuugccagggcucuccgaaccuagcuagcauccucuucaauuccaacuagaaagcuuaccauggagcugcucauccugaaggccaacgccaucaccaccauccugacggcggugaccuucugcuucgccagcggccagaacaucaccgaggaguucuaccaguccaccugcagcgccgucuccaagggguaccucagcgcccugcggacgggcugguacaccuccgugaucaccaucgagcugagcaacaucaaggagaacaagugcaacgggaccgacgccaaggugaagcucaucaagcaggagcuggacaaguacaagaacgcggucacggagcugcagcuccugaugcaguccaccccggcaaccaacaaccgcgcccggcgcgagcugccccgguucaugaacuacacccucaacaacgccaagaagacgaacgugacccugagcaagaagcgcaagcggcgcuuccugggcuuccuccugggggugggcuccgccaucgcgagcggcgucgccguguccaaggugcugcaccucgagggggaggucaacaagaucaagagcgcccugcuguccaccaacaaggccguggugagccucuccaacggcgucagcgugcugaccuccaaggugcuggaccucaagaacuacaucgacaagcagcugcugcccaucgucaacaagcagagcugcuccaucagcaacaucgagacggugaucgaguuccagcagaagaacaaccggcuccuggagaucacccgcgaguucagcgugaacgccggggucaccacccccguguccacguacaugcugaccaacagcgagcuccugucccugaucaacgacaugccgaucaccaacgaccagaagaagcucaugagcaacaacgugcagaucguccggcagcaguccuacagcaucauguccaucaucaaggaggaggugcuggcguacgugguccagcugccccucuacggcgugaucgacacccccugcuggaagcugcacacgagcccccugugcaccaccaacaccaaggagggguccaacaucugccucacgcgcaccgaccggggcugguacugcgacaacgccggcagcgucuccuucuucccgcaggccgagaccugcaaggugcagagcaaccgcguguucugcgacaccaugaacucccugacgcugcccagcgagguaaaccucugcaacgucgacaucuucaaccccaaguacgacugcaagaucaugaccuccaagaccgacgugagcuccagcgugaucaccucccugggggccaucgucagcugcuacggcaagacgaagugcaccgccagcaacaagaaccgggggaucaucaagaccuucuccaacggcugcgacuacgugagcaacaagggcguggacaccguguccgucgggaacacccuguacuacgugaacaagcaggagggcaagagccucuacgugaagggggagcccaucaucaacuucuacgacccgcuggucuuccccuccgacgaguucgacgcgagcaucucccaggugaacgagaagaucaaccagagccuggccuucauccgcaaguccgacgagcugcuccacaacgugaacgccggcaagagcacgaccaacaucaugaucaccaccaucaucaucgucaucaucgugauccugcugucccucaucgccguggggcugcugcucuacugcaaggcccggugaggacuagugaagggaacacccaaauuuaauucagccuuaagcacaauuaauuaagagugaaacguaauuguacaagcaguuggucacccaccauagggcaugaucaacaccgcaaccuuuccuuuuucccccagugauucugaaaaaccccucuucccuucagcuugcuuagauguuccaaauuuaguaagcuuaaggcggccuacagaagaaaaagaaaaaaaaggccacaaaaguucccucucacuuucaguaaauaaaauaaaagcagcaacagaaauaaagaaauaaaugaaauucaaaaugaaauaaauauuguguugugcagcauuaaaaaaucaauaaaaauuaaaaaugagcaagaucuaaaaaaaaaaaaaaaaaaaaaaaaaaaaaaaaaaaaaaaaaaaaaaaaaaaaaaaaaaaaaaaaugcaucccccccccccccccccccccccccccccccaaaggcucuuuucagagccaccagaauu

SEQ ID NO: 648 - RNA, 2331 nt, Artificial Sequence
  mRNA product Design d-3 comprising derived and/or modified sequence from HRSV(A2)__F-del (opt1)
gggagagggcgcuuggcuugcaaggacccugagcugcggcauugaagcacacccaacccaacucgacugaagucagccucacugaaccggaucugagaaucuucucucucugggcuugccagggcucuccgaaccuagcuagcauccucuucaauuccaacuagaaagcuuaccauggagcugcucauccugaaggccaacgccaucaccaccauccugacggcggugaccuucugcuucgccagcggccagaacaucaccgaggaguucuaccaguccacgugcagcgccgucuccaagggguaccucagcgcccugcgcaccggcugguacaccuccgugaucaccaucgagcugagcaacaucaaggagaacaagugcaacgggaccgacgccaaggugaagcucaucaagcaggagcuggacaaguacaagaacgcggucacggagcugcagcuccugaugcaguccacccccgccaccaacaaccgggcccgccgggagcugccgcgcuucaugaacuacacccucaacaacgccaagaagacgaacgugacccugagcaagaagcggaagcgccgguuccugggcuuccuccugggggugggcuccgcgaucgccagcggcgucgccguguccaaggugcugcaccucgagggggaggucaacaagaucaagagcgcccugcuguccaccaacaaggccguggugagccucuccaacggcgucagcgugcugaccuccaaggugcuggaccucaagaacuacaucgacaagcagcugcugcccaucgucaacaagcagagcugcuccaucagcaacaucgagacggugaucgaguuccagcagaagaacaaccgccuccuggagaucacccgggaguucagcgugaacgcgggggucaccacccccguguccacguacaugcugaccaacagcgagcuccugucccugaucaacgacaugcccaucaccaacgaccagaagaagcucaugagcaacaacgugcagaucguccgccagcaguccuacagcaucauguccaucaucaaggaggaggugcuggccuacgugguccagcugccgcucuacggcgugaucgacacccccugcuggaagcugcacacgagcccccugugcaccaccaacaccaaggagggguccaacaucugccucacgcggaccgaccgcggcugguacugcgacaacgccggcagcgucuccuucuucccccaggccgagaccugcaaggugcagagcaaccggguguucugcgacaccaugaacucccugacgcugccgagcgaggucaaccucugcaacguggacaucuucaaccccaaguacgacugcaagaucaugaccuccaagaccgacgugagcuccagcgucaucaccucccugggggccaucgugagcugcuacggcaagacgaagugcaccgcgagcaacaagaaccgcgggaucaucaagaccuucuccaacggcugcgacuacgugagcaacaagggcgucgacaccguguccguggggaacacccuguacuacgucaacaagcaggagggcaagagccucuacgugaagggggagcccaucaucaacuucuacgacccccugguguucccguccgacgaguucgacgccagcaucucccaggucaacgagaagaucaaccagagccuggccuucauccggaaguccgacgagcuccugcacaacgugaacgccggcaagagcacgaccaacaucaugaucaccaccaucaucaucgugaucaucgucauccugcugucccucaucgccguggggcugcugcucuacugcaaggcgcgcugaggacuagugaagggaacacccaaauuuaauucagccuuaagcacaauuaauuaagagugaaacguaauuguacaagcaguuggucacccaccauagggcaugaucaacaccgcaaccuuuccuuuuucccccagugauucugaaaaaccccucuucccuucagcuugcuuagauguuccaaauuuaguaagcuuaaggcggccuacagaagaaaaagaaaaaaaaggccacaaaaguucccucucacuuucaguaaauaaaauaaaagcagcaacagaaauaaagaaauaaaugaaauucaaaaugaaauaaauauuguguugugcagcauuaaaaaaucaauaaaaauuaaaaaugagcaagaucuaaaaaaaaaaaaaaaaaaaaaaaaaaaaaaaaaaaaaaaaaaaaaaaaaaaaaaaaaaaaaaaaugcaucccccccccccccccccccccccccccccccaaaggcucuuuucagagccaccagaauu

SEQ ID NO: 649 - RNA, 2331 nt, Artificial Sequence
  mRNA product Design d-3 comprising derived and/or modified sequence from HRSV(A2)__F-del (opt2)
gggagagggcgcuuggcuugcaaggacccugagcugcggcauugaagcacacccaacccaacucgacugaagucagccucacugaaccggaucugagaaucuucucucucugggcuugccagggcucuccgaaccuagcuagcauccucuucaauuccaacuagaaagcuuaccauggagcuccucauccucaaggccaacgccaucaccaccauccucaccgccgucaccuucugcuucgccuccggccagaacaucaccgaggaguucuaccaguccaccugcuccgccgucuccaagggcuaccucuccgcccuccgcaccggcugguacaccuccgucaucaccaucgagcucuccaacaucaaggagaacaagugcaacggcaccgacgccaaggucaagcucaucaagcaggagcucgacaaguacaagaacgccgucaccgagcuccagcuccucaugcaguccacccccgccaccaacaaccgcgcccgccgcgagcucccccgcuucaugaacuacacccucaacaacgccaagaagaccaacgucacccucuccaagaagcgcaagcgccgcuuccucggcuuccuccucggcgucggcuccgccaucgccuccggcgucgccgucuccaagguccuccaccucgagggcgaggucaacaagaucaaguccgcccuccucuccaccaacaaggccgucgucucccucuccaacggcgucuccguccucaccuccaagguccucgaccucaagaacuacaucgacaagcagcuccuccccaucgucaacaagcaguccugcuccaucuccaacaucgagaccgucaucgaguuccagcagaagaacaaccgccuccucgagaucacccgcgaguucuccgucaacgccggcgucaccacccccgucuccaccuacaugcucaccaacuccgagcuccucucccucaucaacgacaugcccaucaccaacgaccagaagaagcucauguccaacaacguccagaucguccgccagcaguccuacuccaucauguccaucaucaaggaggagguccucgccuacgucguccagcucccccucuacggcgucaucgacacccccugcuggaagcuccacaccuccccccucugcaccaccaacaccaaggagggcuccaacaucugccucacccgcaccgaccgcggcugguacugcgacaacgccggcuccgucuccuucuucccccaggccgagaccugcaagguccaguccaaccgcgucuucugcgacaccaugaacucccucacccuccccuccgaggucaaccucugcaacgucgacaucuucaaccccaaguacgacugcaagaucaugaccuccaagaccgacgucuccuccuccgucaucaccucccucggcgccaucgucuccugcuacggcaagaccaagugcaccgccuccaacaagaaccgcggcaucaucaagaccuucuccaacggcugcgacuacgucuccaacaagggcgucgacaccgucuccgucggcaacacccucuacuacgucaacaagcaggagggcaagucccucuacgucaagggcgagcccaucaucaacuucuacgacccccucgucuuccccuccgacgaguucgacgccuccaucucccaggucaacgagaagaucaaccagucccucgccuucauccgcaaguccgacgagcuccuccacaacgucaacgccggcaaguccaccaccaacaucaugaucaccaccaucaucaucgucaucaucgucauccuccucucccucaucgccgucggccuccuccucuacugcaaggcccgcugaggacuagugaagggaacacccaaauuuaauucagccuuaagcacaauuaauuaagagugaaacguaauuguacaagcaguuggucacccaccauagggcaugaucaacaccgcaaccuuuccuuuuucccccagugauucugaaaaaccccucuucccuucagcuugcuuagauguuccaaauuuaguaagcuuaaggcggccuacagaagaaaaagaaaaaaaaggccacaaaaguucccucucacuuucaguaaauaaaauaaaagcagcaacagaaauaaagaaauaaaugaaauucaaaaugaaauaaauauuguguugugcagcauuaaaaaaucaauaaaaauuaaaaaugagcaagaucuaaaaaaaaaaaaaaaaaaaaaaaaaaaaaaaaaaaaaaaaaaaaaaaaaaaaaaaaaaaaaaaaugcaucccccccccccccccccccccccccccccccaaaggcucuuuucagagccaccagaauu

SEQ ID NO: 650 - RNA, 2331 nt, Artificial Sequence
  mRNA product Design d-3 comprising derived and/or modified sequence from HRSV(A2)__F-del (opt3)
gggagagggcgcuuggcuugcaaggacccugagcugcggcauugaagcacacccaacccaacucgacugaagucagccucacugaaccggaucugagaaucuucucucucugggcuugccagggcucuccgaaccuagcuagcauccucuucaauuccaacuagaaagcuuaccauggagcugcucauccuuaaggccaacgcuauuaccacaauacugacugcagugacguucugcuuugccagcggccagaauaucaccgaagaguucuaccaauccacauguucugcggucucaaaaggguauuugagugcuuuaagaacuggaugguacaccagcguuauuacaaucgaacuguccaacauuaaggagaauaaaugcaacgguaccgacgccaaggugaaacuaaucaagcaggaacucgauaaguauaaaaaugcaguaacugagcugcagcuucugaugcagucuacacccgccaccaacaauagggcucggcgcgaguugccucgauuuaugaacuacacgcucaauaacgcaaagaaaacuaaugugacccugucgaagaaacguaagagaagguuccugggcuuucucuuaggggucggaucagccauagcuagcggcguggccguuaguaaggugcugcaccuugaaggugaggucaacaaaaucaaguccgcguugcugucuacaaauaaagcagugguaagccuauccaacgggguuucagugcucacuucuaagguccuggaccuuaaaaauuauauugauaagcaacuguugccaaucgugaacaaacagagcuguucuauuuccaacaucgaaaccgugauagaguuccagcagaagaauaaccggcuccuggagauuacacgcgaauuuucagucaaugccggaguuaccacgccggugagcacuuacauguuaacaaacagugagcugcucucucuuaucaaugacaugcccauuaccaacgaucaaaagaaacugauguccaauaacguacagaucgugagacagcagagcuauucgaucaugucuauuauaaaggaagaggucuuggcuuacgugguucaacuaccucuguacggcgugaucgacacuccaugcuggaaacuccauacauccccacuguguaccacgaauaccaaggaaggcucaaacauuugccuuacaaggacugaucgggggugguauugugacaaugccggaagugucagcuucuuuccucaggcagagaccugcaaagugcaguccaaccgcguauucugugauacaaugaauagucugacuuugccaagcgagguuaaccucugcaauguggacaucuuuaaccccaaguacgauuguaagauaaugaccucaaaaacagacgucaguuccagcgugauuaccucucugggugcuaucgucucaugcuauggcaagacuaaaugcacggccaguaacaagaaucgagggaucauuaaaacauucagcaacggaugugauuacguguccaauaagggcguugacaccgugucuguagguaacacuuuauauuacgucaauaagcaagaagggaaaucgcuguaugugaagggagagccuaucauuaacuuuuacgacccccuaguuuucccgagcgaugaauuugacgcguccauaucacaggugaaugagaaaaucaaccagagucucgccuucauuagaaagucugaugaacugcuucacaaugucaacgcaggcaaaagcaccacaaauaucaugaucaccacuauuauaaucgugauuaucguaauuuugcugucccucaucgcugugggccugcuucuguacugcaaggccaggugaggacuagugaagggaacacccaaauuuaauucagccuuaagcacaauuaauuaagagugaaacguaauuguacaagcaguuggucacccaccauagggcaugaucaacaccgcaaccuuuccuuuuucccccagugauucugaaaaaccccucuucccuucagcuugcuuagauguuccaaauuuaguaagcuuaaggcggccuacagaagaaaaagaaaaaaaaggccacaaaaguucccucucacuuucaguaaauaaaauaaaagcagcaacagaaauaaagaaauaaaugaaauucaaaaugaaauaaauauuguguugugcagcauuaaaaaaucaauaaaaauuaaaaaugagcaagaucuaaaaaaaaaaaaaaaaaaaaaaaaaaaaaaaaaaaaaaaaaaaaaaaaaaaaaaaaaaaaaaaaugcaucccccccccccccccccccccccccccccccaaaggcucuuuucagagccaccagaauu

SEQ ID NO: 651 - RNA, 2331 nt, Artificial Sequence
  mRNA product Design d-3 comprising derived and/or modified sequence from HRSV(A2)__F-del (opt4)
gggagagggcgcuuggcuugcaaggacccugagcugcggcauugaagcacacccaacccaacucgacugaagucagccucacugaaccggaucugagaaucuucucucucugggcuugccagggcucuccgaaccuagcuagcauccucuucaauuccaacuagaaagcuuaccauggagcugcugauccugaaggccaacgccaucaccaccauccugaccgccgugaccuucugcuucgccagcggccagaacaucaccgaggaguucuaccagagcaccugcagcgccgugagcaagggcuaccugagcgcccugagaaccggcugguacaccagcgugaucaccaucgagcugagcaacaucaaggagaacaagugcaacggcaccgacgccaaggugaagcugaucaagcaggagcuggacaaguacaagaacgccgugaccgagcugcagcugcugaugcagagcacccccgccaccaacaacagagccagaagagagcugcccagauucaugaacuacacccugaacaacgccaagaagaccaacgugacccugagcaagaagagaaagagaagauuccugggcuuccugcugggcgugggcagcgccaucgccagcggcguggccgugagcaaggugcugcaccuggagggcgaggugaacaagaucaagagcgcccugcugagcaccaacaaggccguggugagccugagcaacggcgugagcgugcugaccagcaaggugcuggaccugaagaacuacaucgacaagcagcugcugcccaucgugaacaagcagagcugcagcaucagcaacaucgagaccgugaucgaguuccagcagaagaacaacagacugcuggagaucaccagagaguucagcgugaacgccggcgugaccacccccgugagcaccuacaugcugaccaacagcgagcugcugagccugaucaacgacaugcccaucaccaacgaccagaagaagcugaugagcaacaacgugcagaucgugagacagcagagcuacagcaucaugagcaucaucaaggaggaggugcuggccuacguggugcagcugccccuguacggcgugaucgacacccccugcuggaagcugcacaccagcccccugugcaccaccaacaccaaggagggcagcaacaucugccugaccagaaccgacagaggcugguacugcgacaacgccggcagcgugagcuucuucccccaggccgagaccugcaaggugcagagcaacagaguguucugcgacaccaugaacagccugacccugcccagcgaggugaaccugugcaacguggacaucuucaaccccaaguacgacugcaagaucaugaccagcaagaccgacgugagcagcagcgugaucaccagccugggcgccaucgugagcugcuacggcaagaccaagugcaccgccagcaacaagaacagaggcaucaucaagaccuucagcaacggcugcgacuacgugagcaacaagggcguggacaccgugagcgugggcaacacccuguacuacgugaacaagcaggagggcaagagccuguacgugaagggcgagcccaucaucaacuucuacgacccccugguguuccccagcgacgaguucgacgccagcaucagccaggugaacgagaagaucaaccagagccuggccuucaucagaaagagcgacgagcugcugcacaacgugaacgccggcaagagcaccaccaacaucaugaucaccaccaucaucaucgugaucaucgugauccugcugagccugaucgccgugggccugcugcuguacugcaaggccagaugaggacuagugaagggaacacccaaauuuaauucagccuuaagcacaauuaauuaagagugaaacguaauuguacaagcaguuggucacccaccauagggcaugaucaacaccgcaaccuuuccuuuuucccccagugauucugaaaaaccccucuucccuucagcuugcuuagauguuccaaauuuaguaagcuuaaggcggccuacagaagaaaaagaaaaaaaaggccacaaaaguucccucucacuuucaguaaauaaaauaaaagcagcaacagaaauaaagaaauaaaugaaauucaaaaugaaauaaauauuguguugugcagcauuaaaaaaucaauaaaaauuaaaaaugagcaagaucuaaaaaaaaaaaaaaaaaaaaaaaaaaaaaaaaaaaaaaaaaaaaaaaaaaaaaaaaaaaaaaaaugcaucccccccccccccccccccccccccccccccaaaggcucuuuucagagccaccagaauu

SEQ ID NO: 652 - RNA, 2331 nt, Artificial Sequence
  mRNA product Design d-3 comprising derived and/or modified sequence from HRSV(A2)__F-del (opt5)
gggagagggcgcuuggcuugcaaggacccugagcugcggcauugaagcacacccaacccaacucgacugaagucagccucacugaaccggaucugagaaucuucucucucugggcuugccagggcucuccgaaccuagcuagcauccucuucaauuccaacuagaaagcuuaccauggagcugcucauccugaaggccaacgcuauuaccacaauccuuacggccgugaccuucugcuuugcgagcggccagaauauuacagaagaguucuaccaauccaccuguucugcugucagcaaaggguaucuguccgcccucagaacaggaugguacaccucuguuaucacaauugaacugagcaacaucaaggagaauaaaugcaacggcaccgacgccaaggugaaacuuaucaagcaggaacuggauaaguauaaaaaugcugugacggagcuccagcugcugaugcaguccacccccgccacaaacaaucgggcucgcagagagcucccucgguuuaugaacuacacccugaauaacgccaagaaaacaaaugucacccuuucuaagaaacgcaagagacgguuccugggguuucuccugggagugggcagcgcgauugccuccgggguugcugugagcaagguccuucaccuggaaggagaggugaacaaaaucaagucugcccuccuguccacgaauaaagcuguugugagccugucuaacggcgucuccgugcucacaagcaaggugcuggaccuuaaaaauuauauugauaagcaacugcucccgaucgucaacaaacagucuuguuccauuagcaacaucgaaaccguuauugaguuccagcagaagaauaaccgccugcuugagaucacaagagaauuuuccgugaaugccggcgugaccacccccgucucuacauacaugcugacgaacagcgagcuccugucccugaucaaugacaugccuauuaccaacgaucaaaagaaacucaugagcaauaacgugcagaucguucggcagcagucuuauuccauuaugagcaucauuaaggaagaggugcuggcguacgucgugcaacuuccccuguacgggguuaucgacacaccuugcuggaaacuccauaccucuccccuguguacaaccaauacgaaggaaggaagcaacaucugccuuacacgcaccgauagaggcugguauugugacaaugccggguccgugucuuucuuuccucaggcugagaccugcaaaguccagagcaaccggguguucugugauacaaugaacucccugacccucccgagcgaggucaaucugugcaauguggacauuuuuaaccccaaguacgauuguaagaucaugacaucuaaaacggacguuuccagcucugugauuaccucccugggagccaucgucagcugcuauggcaagacaaaaugcaccgcuuccaacaagaaucgcgggauuaucaaaacauucucuaacggaugugauuacgugagcaauaagggcguugacaccguguccgucggcaacacgcucuauuacgugaauaagcaagaagggaaaucucuguaugugaagggagagccuaucauuaacuuuuacgacccccuuguuuucccuagcgaugaauuugacgccuccaucagccaggucaaugagaaaauuaaccagucucuggccuucaucagaaaguccgaugaacuccugcacaaugugaacgcuggcaaaagcaccacaaauauuaugaucaccacaauuaucaucgugauuaucgucauucugcuuucucucaucgcgguggggcugcugcucuacugcaaggcccggugaggacuagugaagggaacacccaaauuuaauucagccuuaagcacaauuaauuaagagugaaacguaauuguacaagcaguuggucacccaccauagggcaugaucaacaccgcaaccuuuccuuuuucccccagugauucugaaaaaccccucuucccuucagcuugcuuagauguuccaaauuuaguaagcuuaaggcggccuacagaagaaaaagaaaaaaaaggccacaaaaguucccucucacuuucaguaaauaaaauaaaagcagcaacagaaauaaagaaauaaaugaaauucaaaaugaaauaaauauuguguugugcagcauuaaaaaaucaauaaaaauuaaaaaugagcaagaucuaaaaaaaaaaaaaaaaaaaaaaaaaaaaaaaaaaaaaaaaaaaaaaaaaaaaaaaaaaaaaaaaugcaucccccccccccccccccccccccccccccccaaaggcucuuuucagagccaccagaauu

SEQ ID NO: 653 - RNA, 2331 nt, Artificial Sequence
  mRNA product Design d-3 comprising derived and/or modified sequence from HRSV(A2)__F-del (opt6)
gggagagggcgcuuggcuugcaaggacccugagcugcggcauugaagcacacccaacccaacucgacugaagucagccucacugaaccggaucugagaaucuucucucucugggcuugccagggcucuccgaaccuagcuagcauccucuucaauuccaacuagaaagcuuaccauggaauuacuaauacucaaagccaacgcaauaacaacaauacuaacagcaguaacauucugcuucgcaucaggacaaaacaucacagaagaauuuuaccaaaguacaugcagugcagucucuaaaggauaccucagugccuuacgcacaggaugguacacaucaguaauaacaaucgaacuuucaaacauaaaagaaaacaaaugcaauggaaccgacgccaaaguaaaacuaaucaaacaagaacuagacaaauauaaaaaugcaguaacagaauuacaacuccuaaugcaauccacaccagcaacaaauaacagagcaagacgagaacucccucgauucaugaauuacacauuaaacaacgcaaaaaaaacuaacguaacuuuaucaaaaaaaagaaaacguagauuucuaggauuccuacuaggcguaggguccgccauugcaucaggaguagcaguuagcaaaguauuacauuuagaaggagaaguaaauaaaaucaaaagcgcacuacucucaaccaacaaagcaguaguaucacucucaaacggaguaucaguacuaacauccaaaguacucgaccucaaaaacuacauagacaaacaauuacuacccauaguaaacaaacaaucaugcucuauaucaaauaucgaaacaguaaucgaauuucaacaaaaaaacaaucgacuacuugaaauaacaagagaguucuccgucaaugccggagucaccacaccagucucaacauacaugcuaaccaacucugaacuccuaucacuaauaaaugacaugccaauaacaaacgaccaaaaaaaacuaaugucaaauaacguacaaauaguacgacaacaaaguuauuccauaaugaguauaaucaaagaagaaguguuagcauacguaguccaacuaccauuauauggaguaauagacacaccauguuggaaauuacacaccucaccacucugcacuaccaauacaaaagaaggcucaaauauaugccuaacucgcacagacagaggcugguacugcgauaacgcaggauccguaucuuucuuuccccaagcagaaacuugcaaaguacaaucaaacagagucuucugcgacaccaugaauagucucacauuaccaucugaaguaaaccuauguaacguagauauauucaauccaaaauacgacugcaaaauaaugacaucaaaaaccgacgucucuagcaguguaaucacaucacuaggagcaauaguaagcugcuauggaaaaacaaaauguacagcaucaaacaaaaacaggggaauaauaaaaaccuucucaaacggaugugacuacguaucaaauaaaggcguagacacaguaagcguaggaaacacccuauacuacguuaacaaacaagaagggaaaucauuauacguaaaaggagaaccaauaauaaacuucuacgauccacucguauucccauccgacgaauuugacgccagcauaucccaaguuaacgaaaaaauaaaccaaucacuugcauuuauacgaaaaucugaugaacuucuccacaacguaaaugcaggaaaauccaccaccaauauaaugaucacaacuaucaucauaguaauaaucgucauuuuacuaucauuaauagcaguuggccuacuucuauacugcaaagcaagauaaggacuagugaagggaacacccaaauuuaauucagccuuaagcacaauuaauuaagagugaaacguaauuguacaagcaguuggucacccaccauagggcaugaucaacaccgcaaccuuuccuuuuucccccagugauucugaaaaaccccucuucccuucagcuugcuuagauguuccaaauuuaguaagcuuaaggcggccuacagaagaaaaagaaaaaaaaggccacaaaaguucccucucacuuucaguaaauaaaauaaaagcagcaacagaaauaaagaaauaaaugaaauucaaaaugaaauaaauauuguguugugcagcauuaaaaaaucaauaaaaauuaaaaaugagcaagaucuaaaaaaaaaaaaaaaaaaaaaaaaaaaaaaaaaaaaaaaaaaaaaaaaaaaaaaaaaaaaaaaaugcaucccccccccccccccccccccccccccccccaaaggcucuuuucagagccaccagaauu

SEQ ID NO: 654 - RNA, 2331 nt, Artificial Sequence
  mRNA product Design d-3 comprising derived and/or modified sequence from HRSV(A2)__F-del (opt11)
gggagagggcgcuuggcuugcaaggacccugagcugcggcauugaagcacacccaacccaacucgacugaagucagccucacugaaccggaucugagaaucuucucucucugggcuugccagggcucuccgaaccuagcuagcauccucuucaauuccaacuagaaagcuuaccauggaacuacuaauccuaaaagccaacgcgaucaccaccauccuaacggcagucaccuucugcuucgcaucaggccaaaacaucacagaagaguucuaccaaagcacaugcuccgccguauccaaaggcuaccucagcgcccuacgcacaggcugguacacaucugucaucaccauagaacucuccaacaucaaagaaaacaaaugcaacggcacugacgccaaaguaaagcugaucaaacaagaacucgacaaauacaaaaacgcagucaccgaacuccaacuacucaugcaauccaccccugcaaccaacaacagggcccgccgcgaacucccccgcuucaugaacuacacuuuaaacaacgccaaaaagaccaacgucacacucagcaagaaacggaaacgacgauuccuaggguuucuccuaggcgucggcucggcaaucgccuccggcgucgccguaagcaaaguacuacaccuagaaggcgaagugaacaaaaucaaaagugcccuucucuccaccaacaaggccguagucucucuauccaacggagucucaguccucaccucaaagguccucgaccucaaaaacuacaucgacaaacaacuacuccccauugucaacaagcagucaugcuccauaucaaacaucgaaaccgucaucgaguuccaacagaaaaacaaccgacuccucgaaauaaccagagaguucucggucaacgccggcgucaccaccccagucagcaccuacaugcucacuaacuccgaacuccuaucccucaucaacgacaugccaauuaccaacgaccaaaagaaacuaaugucgaacaacguucaaaucguccgacaacaaaguuacuccaucaugagcauaaucaaagaagaaguucuagcguacgucguccaacucccacuauacggcgucaucgacacuccgugcuggaaacuccacacaucaccccuauguacaaccaacacaaaagaaggcagcaacaucugccucacccgcaccgaccgagggugguauugcgauaacgcuggcagcgucuccuucuucccccaagccgaaaccugcaaaguccaaucaaacagaguauucugcgacaccaugaacucccuuacucucccuagcgaagucaaccucugcaacguugacauauucaaccccaaauacgacugcaaaaucaugaccuccaagaccgacgucuccuccuccgucaucacaucucuaggugccauugucuccugcuacggaaaaaccaaaugcacagccuccaacaaaaaccgcggcaucauaaaaaccuucuccaacggcugcgacuacgucaguaauaaaggcgucgacacgguauccguugggaauacgcuuuacuacguaaauaaacaagaaggcaaaucccucuacgucaaaggugaacccaucauaaacuucuacgacccgcuuguguucccauccgacgaguucgacgccagcaucagccaggucaacgaaaagaucaaccaaucccuagccuucauccgcaaaagcgacgaacuacuacacaacgucaacgccggaaaauccacaaccaacaucaugaucaccaccaucaucaucgucaucaucguaauccuacucucucucaucgccgucggccuccuacuguacuguaaagcccgauagggacuagugaagggaacacccaaauuuaauucagccuuaagcacaauuaauuaagagugaaacguaauuguacaagcaguuggucacccaccauagggcaugaucaacaccgcaaccuuuccuuuuucccccagugauucugaaaaaccccucuucccuucagcuugcuuagauguuccaaauuuaguaagcuuaaggcggccuacagaagaaaaagaaaaaaaaggccacaaaaguucccucucacuuucaguaaauaaaauaaaagcagcaacagaaauaaagaaauaaaugaaauucaaaaugaaauaaauauuguguugugcagcauuaaaaaaucaauaaaaauuaaaaaugagcaagaucuaaaaaaaaaaaaaaaaaaaaaaaaaaaaaaaaaaaaaaaaaaaaaaaaaaaaaaaaaaaaaaaaugcaucccccccccccccccccccccccccccccccaaaggcucuuuucagagccaccagaauu

SEQ ID NO: 655 - RNA, 2014 nt, Artificial Sequence
  mRNA product Design d-4 comprising derived and/or modified sequence from HRSV(A2)__F-del (artificial)
gggagagucccgcagucggcguccagcggcucugcuuguucgugugugugucguugcaggccuuauucaagcuuaccauggaguugcuaauccucaaagcaaaugcaauuaccacaauccucacugcagucacauuuuguuuugcuucuggucaaaacaucacugaagaauuuuaucaaucaacaugcagugcaguuagcaaaggcuaucuuagugcucugagaacugguugguauaccaguguuauaacuauagaauuaaguaauaucaaggaaaauaaguguaauggaacagaugcuaagguaaaauugauaaaacaagaauuagauaaauauaaaaaugcuguaacagaauugcaguugcucaugcaaagcacaccagcaacaaacaaucgagccagaagagaacuaccaagguuuaugaauuauacacucaacaaugccaaaaaaaccaauguaacauuaagcaagaaaaggaaaagaagauuucuugguuuuuuguuagguguuggaucugcaaucgccaguggcguugcuguaucuaagguccugcaccuagaaggggaagugaacaagaucaaaagugcucuacuauccacaaacaaggcuguagucagcuuaucaaauggaguuagugucuuaaccagcaaaguguuagaccucaaaaacuauauagauaaacaauuguuaccuauugugaacaagcaaagcugcagcauaucaaauauagaaacugugauagaguuccaacaaaagaacaacagacuacuagagauuaccagggaauuuaguguuaaugcagguguaacuacaccuguaagcacuuacauguuaacuaauagugaauuauugucauuaaucaaugauaugccuauaacaaaugaucagaaaaaguuaauguccaacaauguucaaauaguuagacagcaaaguuacucuaucauguccauaauaaaagaggaagucuuagcauauguaguacaauuaccacuauaugguguuauagauacacccuguuggaaacuacacacauccccucuauguacaaccaacacaaaagaaggguccaacaucuguuuaacaagaacugacagaggaugguacugugacaaugcaggaucaguaucuuucuucccacaagcugaaacauguaaaguucaaucaaaucgaguauuuugugacacaaugaacaguuuaacauuaccaagugaaguaaaucucugcaauguugacauauucaaccccaaauaugauuguaaaauuaugacuucaaaaacagauguaagcagcuccguuaucacaucucuaggagccauugugucaugcuauggcaaaacuaaauguacagcauccaauaaaaaucguggaaucauaaagacauuuucuaacgggugcgauuauguaucaaauaaagggguggacacugugucuguagguaacacauuauauuauguaaauaagcaagaagguaaaagucucuauguaaaaggugaaccaauaauaaauuucuaugacccauuaguauuccccucugaugaauuugaugcaucaauaucucaagucaacgagaagauuaaccagagccuagcauuuauucguaaauccgaugaauuauuacauaauguaaaugcugguaaauccaccacaaauaucaugauaacuacuauaauuauagugauuauaguaauauuguuaucauuaauugcuguuggacugcucuuauacuguaaggccagauaaggacuaguggaagcauuuuccuggcugauuaaaagaaauuacucagcuauggucaucuguuccuguuagaaggcuaugcagcauauuauauacuaugcgcauguuaugaaaugcauaauaaaaaauuuuaaaaaaucuaaaagaucuaaaaaaaaaaaaaaaaaaaaaaaaaaaaaaaaaaaaaaaaaaaaaaaaaaaaaaaaaaaaaaaaugcaucccccccccccccccccccccccccccccccaaaggcucuuuucagagccaccagaauu

SEQ ID NO: 656 - RNA, 2014 nt, Artificial Sequence
  mRNA product Design d-4 comprising derived and/or modified sequence from HRSV(A2)__F-del (opt1)
gggagagucccgcagucggcguccagcggcucugcuuguucgugugugugucguugcaggccuuauucaagcuuaccauggagcugcucauccugaaggccaacgccaucaccaccauccugacggcggugaccuucugcuucgccagcggccagaacaucaccgaggaguucuaccaguccaccugcagcgccgucuccaagggguaccucagcgcccugcggacgggcugguacaccuccgugaucaccaucgagcugagcaacaucaaggagaacaagugcaacgggaccgacgccaaggugaagcucaucaagcaggagcuggacaaguacaagaacgcggucacggagcugcagcuccugaugcaguccaccccggcaaccaacaaccgcgcccggcgcgagcugccccgguucaugaacuacacccucaacaacgccaagaagacgaacgugacccugagcaagaagcgcaagcggcgcuuccugggcuuccuccugggggugggcuccgccaucgcgagcggcgucgccguguccaaggugcugcaccucgagggggaggucaacaagaucaagagcgcccugcuguccaccaacaaggccguggugagccucuccaacggcgucagcgugcugaccuccaaggugcuggaccucaagaacuacaucgacaagcagcugcugcccaucgucaacaagcagagcugcuccaucagcaacaucgagacggugaucgaguuccagcagaagaacaaccggcuccuggagaucacccgcgaguucagcgugaacgccggggucaccacccccguguccacguacaugcugaccaacagcgagcuccugucccugaucaacgacaugccgaucaccaacgaccagaagaagcucaugagcaacaacgugcagaucguccggcagcaguccuacagcaucauguccaucaucaaggaggaggugcuggcguacgugguccagcugccccucuacggcgugaucgacacccccugcuggaagcugcacacgagcccccugugcaccaccaacaccaaggagggguccaacaucugccucacgcgcaccgaccggggcugguacugcgacaacgccggcagcgucuccuucuucccgcaggccgagaccugcaaggugcagagcaaccgcguguucugcgacaccaugaacucccugacgcugcccagcgagguaaaccucugcaacgucgacaucuucaaccccaaguacgacugcaagaucaugaccuccaagaccgacgugagcuccagcgugaucaccucccugggggccaucgucagcugcuacggcaagacgaagugcaccgccagcaacaagaaccgggggaucaucaagaccuucuccaacggcugcgacuacgugagcaacaagggcguggacaccguguccgucgggaacacccuguacuacgugaacaagcaggagggcaagagccucuacgugaagggggagcccaucaucaacuucuacgacccgcuggucuuccccuccgacgaguucgacgcgagcaucucccaggugaacgagaagaucaaccagagccuggccuucauccgcaaguccgacgagcugcuccacaacgugaacgccggcaagagcacgaccaacaucaugaucaccaccaucaucaucgucaucaucgugauccugcugucccucaucgccguggggcugcugcucuacugcaaggcccggugaggacuaguggaagcauuuuccuggcugauuaaaagaaauuacucagcuauggucaucuguuccuguuagaaggcuaugcagcauauuauauacuaugcgcauguuaugaaaugcauaauaaaaaauuuuaaaaaaucuaaaagaucuaaaaaaaaaaaaaaaaaaaaaaaaaaaaaaaaaaaaaaaaaaaaaaaaaaaaaaaaaaaaaaaaugcaucccccccccccccccccccccccccccccccaaaggcucuuuucagagccaccagaauu

SEQ ID NO: 657 - RNA, 2014 nt, Artificial Sequence
  mRNA product Design d-4 comprising derived and/or modified sequence from HRSV(A2)__F-del (opt1)
gggagagucccgcagucggcguccagcggcucugcuuguucgugugugugucguugcaggccuuauucaagcuuaccauggagcugcucauccugaaggccaacgccaucaccaccauccugacggcggugaccuucugcuucgccagcggccagaacaucaccgaggaguucuaccaguccacgugcagcgccgucuccaagggguaccucagcgcccugcgcaccggcugguacaccuccgugaucaccaucgagcugagcaacaucaaggagaacaagugcaacgggaccgacgccaaggugaagcucaucaagcaggagcuggacaaguacaagaacgcggucacggagcugcagcuccugaugcaguccacccccgccaccaacaaccgggcccgccgggagcugccgcgcuucaugaacuacacccucaacaacgccaagaagacgaacgugacccugagcaagaagcggaagcgccgguuccugggcuuccuccugggggugggcuccgcgaucgccagcggcgucgccguguccaaggugcugcaccucgagggggaggucaacaagaucaagagcgcccugcuguccaccaacaaggccguggugagccucuccaacggcgucagcgugcugaccuccaaggugcuggaccucaagaacuacaucgacaagcagcugcugcccaucgucaacaagcagagcugcuccaucagcaacaucgagacggugaucgaguuccagcagaagaacaaccgccuccuggagaucacccgggaguucagcgugaacgcgggggucaccacccccguguccacguacaugcugaccaacagcgagcuccugucccugaucaacgacaugcccaucaccaacgaccagaagaagcucaugagcaacaacgugcagaucguccgccagcaguccuacagcaucauguccaucaucaaggaggaggugcuggccuacgugguccagcugccgcucuacggcgugaucgacacccccugcuggaagcugcacacgagcccccugugcaccaccaacaccaaggagggguccaacaucugccucacgcggaccgaccgcggcugguacugcgacaacgccggcagcgucuccuucuucccccaggccgagaccugcaaggugcagagcaaccggguguucugcgacaccaugaacucccugacgcugccgagcgaggucaaccucugcaacguggacaucuucaaccccaaguacgacugcaagaucaugaccuccaagaccgacgugagcuccagcgucaucaccucccugggggccaucgugagcugcuacggcaagacgaagugcaccgcgagcaacaagaaccgcgggaucaucaagaccuucuccaacggcugcgacuacgugagcaacaagggcgucgacaccguguccguggggaacacccuguacuacgucaacaagcaggagggcaagagccucuacgugaagggggagcccaucaucaacuucuacgacccccugguguucccguccgacgaguucgacgccagcaucucccaggucaacgagaagaucaaccagagccuggccuucauccggaaguccgacgagcuccugcacaacgugaacgccggcaagagcacgaccaacaucaugaucaccaccaucaucaucgugaucaucgucauccugcugucccucaucgccguggggcugcugcucuacugcaaggcgcgcugaggacuaguggaagcauuuuccuggcugauuaaaagaaauuacucagcuauggucaucuguuccuguuagaaggcuaugcagcauauuauauacuaugcgcauguuaugaaaugcauaauaaaaaauuuuaaaaaaucuaaaagaucuaaaaaaaaaaaaaaaaaaaaaaaaaaaaaaaaaaaaaaaaaaaaaaaaaaaaaaaaaaaaaaaaugcaucccccccccccccccccccccccccccccccaaaggcucuuuucagagccaccagaauu

SEQ ID NO: 658 - RNA, 2014 nt, Artificial Sequence
  mRNA product Design d-4 comprising derived and/or modified sequence from HRSV(A2)__F-del (opt2)
gggagagucccgcagucggcguccagcggcucugcuuguucgugugugugucguugcaggccuuauucaagcuuaccauggagcuccucauccucaaggccaacgccaucaccaccauccucaccgccgucaccuucugcuucgccuccggccagaacaucaccgaggaguucuaccaguccaccugcuccgccgucuccaagggcuaccucuccgcccuccgcaccggcugguacaccuccgucaucaccaucgagcucuccaacaucaaggagaacaagugcaacggcaccgacgccaaggucaagcucaucaagcaggagcucgacaaguacaagaacgccgucaccgagcuccagcuccucaugcaguccacccccgccaccaacaaccgcgcccgccgcgagcucccccgcuucaugaacuacacccucaacaacgccaagaagaccaacgucacccucuccaagaagcgcaagcgccgcuuccucggcuuccuccucggcgucggcuccgccaucgccuccggcgucgccgucuccaagguccuccaccucgagggcgaggucaacaagaucaaguccgcccuccucuccaccaacaaggccgucgucucccucuccaacggcgucuccguccucaccuccaagguccucgaccucaagaacuacaucgacaagcagcuccuccccaucgucaacaagcaguccugcuccaucuccaacaucgagaccgucaucgaguuccagcagaagaacaaccgccuccucgagaucacccgcgaguucuccgucaacgccggcgucaccacccccgucuccaccuacaugcucaccaacuccgagcuccucucccucaucaacgacaugcccaucaccaacgaccagaagaagcucauguccaacaacguccagaucguccgccagcaguccuacuccaucauguccaucaucaaggaggagguccucgccuacgucguccagcucccccucuacggcgucaucgacacccccugcuggaagcuccacaccuccccccucugcaccaccaacaccaaggagggcuccaacaucugccucacccgcaccgaccgcggcugguacugcgacaacgccggcuccgucuccuucuucccccaggccgagaccugcaagguccaguccaaccgcgucuucugcgacaccaugaacucccucacccuccccuccgaggucaaccucugcaacgucgacaucuucaaccccaaguacgacugcaagaucaugaccuccaagaccgacgucuccuccuccgucaucaccucccucggcgccaucgucuccugcuacggcaagaccaagugcaccgccuccaacaagaaccgcggcaucaucaagaccuucuccaacggcugcgacuacgucuccaacaagggcgucgacaccgucuccgucggcaacacccucuacuacgucaacaagcaggagggcaagucccucuacgucaagggcgagcccaucaucaacuucuacgacccccucgucuuccccuccgacgaguucgacgccuccaucucccaggucaacgagaagaucaaccagucccucgccuucauccgcaaguccgacgagcuccuccacaacgucaacgccggcaaguccaccaccaacaucaugaucaccaccaucaucaucgucaucaucgucauccuccucucccucaucgccgucggccuccuccucuacugcaaggcccgcugaggacuaguggaagcauuuuccuggcugauuaaaagaaauuacucagcuauggucaucuguuccuguuagaaggcuaugcagcauauuauauacuaugcgcauguuaugaaaugcauaauaaaaaauuuuaaaaaaucuaaaagaucuaaaaaaaaaaaaaaaaaaaaaaaaaaaaaaaaaaaaaaaaaaaaaaaaaaaaaaaaaaaaaaaaugcaucccccccccccccccccccccccccccccccaaaggcucuuuucagagccaccagaauu

SEQ ID NO: 659 - RNA, 2014 nt, Artificial Sequence
  mRNA product Design d-4 comprising derived and/or modified sequence from HRSV(A2)__F-del (opt3)
gggagagucccgcagucggcguccagcggcucugcuuguucgugugugugucguugcaggccuuauucaagcuuaccauggagcugcucauccuuaaggccaacgcuauuaccacaauacugacugcagugacguucugcuuugccagcggccagaauaucaccgaagaguucuaccaauccacauguucugcggucucaaaaggguauuugagugcuuuaagaacuggaugguacaccagcguuauuacaaucgaacuguccaacauuaaggagaauaaaugcaacgguaccgacgccaaggugaaacuaaucaagcaggaacucgauaaguauaaaaaugcaguaacugagcugcagcuucugaugcagucuacacccgccaccaacaauagggcucggcgcgaguugccucgauuuaugaacuacacgcucaauaacgcaaagaaaacuaaugugacccugucgaagaaacguaagagaagguuccugggcuuucucuuaggggucggaucagccauagcuagcggcguggccguuaguaaggugcugcaccuugaaggugaggucaacaaaaucaaguccgcguugcugucuacaaauaaagcagugguaagccuauccaacgggguuucagugcucacuucuaagguccuggaccuuaaaaauuauauugauaagcaacuguugccaaucgugaacaaacagagcuguucuauuuccaacaucgaaaccgugauagaguuccagcagaagaauaaccggcuccuggagauuacacgcgaauuuucagucaaugccggaguuaccacgccggugagcacuuacauguuaacaaacagugagcugcucucucuuaucaaugacaugcccauuaccaacgaucaaaagaaacugauguccaauaacguacagaucgugagacagcagagcuauucgaucaugucuauuauaaaggaagaggucuuggcuuacgugguucaacuaccucuguacggcgugaucgacacuccaugcuggaaacuccauacauccccacuguguaccacgaauaccaaggaaggcucaaacauuugccuuacaaggacugaucgggggugguauugugacaaugccggaagugucagcuucuuuccucaggcagagaccugcaaagugcaguccaaccgcguauucugugauacaaugaauagucugacuuugccaagcgagguuaaccucugcaauguggacaucuuuaaccccaaguacgauuguaagauaaugaccucaaaaacagacgucaguuccagcgugauuaccucucugggugcuaucgucucaugcuauggcaagacuaaaugcacggccaguaacaagaaucgagggaucauuaaaacauucagcaacggaugugauuacguguccaauaagggcguugacaccgugucuguagguaacacuuuauauuacgucaauaagcaagaagggaaaucgcuguaugugaagggagagccuaucauuaacuuuuacgacccccuaguuuucccgagcgaugaauuugacgcguccauaucacaggugaaugagaaaaucaaccagagucucgccuucauuagaaagucugaugaacugcuucacaaugucaacgcaggcaaaagcaccacaaauaucaugaucaccacuauuauaaucgugauuaucguaauuuugcugucccucaucgcugugggccugcuucuguacugcaaggccaggugaggacuaguggaagcauuuuccuggcugauuaaaagaaauuacucagcuauggucaucuguuccuguuagaaggcuaugcagcauauuauauacuaugcgcauguuaugaaaugcauaauaaaaaauuuuaaaaaaucuaaaagaucuaaaaaaaaaaaaaaaaaaaaaaaaaaaaaaaaaaaaaaaaaaaaaaaaaaaaaaaaaaaaaaaaugcaucccccccccccccccccccccccccccccccaaaggcucuuuucagagccaccagaauu

SEQ ID NO: 660 - RNA, 2014 nt, Artificial Sequence
  mRNA product Design d-4 comprising derived and/or modified sequence from HRSV(A2)__F-del (opt4)
gggagagucccgcagucggcguccagcggcucugcuuguucgugugugugucguugcaggccuuauucaagcuuaccauggagcugcugauccugaaggccaacgccaucaccaccauccugaccgccgugaccuucugcuucgccagcggccagaacaucaccgaggaguucuaccagagcaccugcagcgccgugagcaagggcuaccugagcgcccugagaaccggcugguacaccagcgugaucaccaucgagcugagcaacaucaaggagaacaagugcaacggcaccgacgccaaggugaagcugaucaagcaggagcuggacaaguacaagaacgccgugaccgagcugcagcugcugaugcagagcacccccgccaccaacaacagagccagaagagagcugcccagauucaugaacuacacccugaacaacgccaagaagaccaacgugacccugagcaagaagagaaagagaagauuccugggcuuccugcugggcgugggcagcgccaucgccagcggcguggccgugagcaaggugcugcaccuggagggcgaggugaacaagaucaagagcgcccugcugagcaccaacaaggccguggugagccugagcaacggcgugagcgugcugaccagcaaggugcuggaccugaagaacuacaucgacaagcagcugcugcccaucgugaacaagcagagcugcagcaucagcaacaucgagaccgugaucgaguuccagcagaagaacaacagacugcuggagaucaccagagaguucagcgugaacgccggcgugaccacccccgugagcaccuacaugcugaccaacagcgagcugcugagccugaucaacgacaugcccaucaccaacgaccagaagaagcugaugagcaacaacgugcagaucgugagacagcagagcuacagcaucaugagcaucaucaaggaggaggugcuggccuacguggugcagcugccccuguacggcgugaucgacacccccugcuggaagcugcacaccagcccccugugcaccaccaacaccaaggagggcagcaacaucugccugaccagaaccgacagaggcugguacugcgacaacgccggcagcgugagcuucuucccccaggccgagaccugcaaggugcagagcaacagaguguucugcgacaccaugaacagccugacccugcccagcgaggugaaccugugcaacguggacaucuucaaccccaaguacgacugcaagaucaugaccagcaagaccgacgugagcagcagcgugaucaccagccugggcgccaucgugagcugcuacggcaagaccaagugcaccgccagcaacaagaacagaggcaucaucaagaccuucagcaacggcugcgacuacgugagcaacaagggcguggacaccgugagcgugggcaacacccuguacuacgugaacaagcaggagggcaagagccuguacgugaagggcgagcccaucaucaacuucuacgacccccugguguuccccagcgacgaguucgacgccagcaucagccaggugaacgagaagaucaaccagagccuggccuucaucagaaagagcgacgagcugcugcacaacgugaacgccggcaagagcaccaccaacaucaugaucaccaccaucaucaucgugaucaucgugauccugcugagccugaucgccgugggccugcugcuguacugcaaggccagaugaggacuaguggaagcauuuuccuggcugauuaaaagaaauuacucagcuauggucaucuguuccuguuagaaggcuaugcagcauauuauauacuaugcgcauguuaugaaaugcauaauaaaaaauuuuaaaaaaucuaaaagaucuaaaaaaaaaaaaaaaaaaaaaaaaaaaaaaaaaaaaaaaaaaaaaaaaaaaaaaaaaaaaaaaaugcaucccccccccccccccccccccccccccccccaaaggcucuuuucagagccaccagaauu

SEQ ID NO: 661 - RNA, 2014 nt, Artificial Sequence
  mRNA product Design d-4 comprising derived and/or modified sequence from HRSV(A2)__F-del (opt5)
gggagagucccgcagucggcguccagcggcucugcuuguucgugugugugucguugcaggccuuauucaagcuuaccauggagcugcucauccugaaggccaacgcuauuaccacaauccuuacggccgugaccuucugcuuugcgagcggccagaauauuacagaagaguucuaccaauccaccuguucugcugucagcaaaggguaucuguccgcccucagaacaggaugguacaccucuguuaucacaauugaacugagcaacaucaaggagaauaaaugcaacggcaccgacgccaaggugaaacuuaucaagcaggaacuggauaaguauaaaaaugcugugacggagcuccagcugcugaugcaguccacccccgccacaaacaaucgggcucgcagagagcucccucgguuuaugaacuacacccugaauaacgccaagaaaacaaaugucacccuuucuaagaaacgcaagagacgguuccugggguuucuccugggagugggcagcgcgauugccuccgggguugcugugagcaagguccuucaccuggaaggagaggugaacaaaaucaagucugcccuccuguccacgaauaaagcuguugugagccugucuaacggcgucuccgugcucacaagcaaggugcuggaccuuaaaaauuauauugauaagcaacugcucccgaucgucaacaaacagucuuguuccauuagcaacaucgaaaccguuauugaguuccagcagaagaauaaccgccugcuugagaucacaagagaauuuuccgugaaugccggcgugaccacccccgucucuacauacaugcugacgaacagcgagcuccugucccugaucaaugacaugccuauuaccaacgaucaaaagaaacucaugagcaauaacgugcagaucguucggcagcagucuuauuccauuaugagcaucauuaaggaagaggugcuggcguacgucgugcaacuuccccuguacgggguuaucgacacaccuugcuggaaacuccauaccucuccccuguguacaaccaauacgaaggaaggaagcaacaucugccuuacacgcaccgauagaggcugguauugugacaaugccggguccgugucuuucuuuccucaggcugagaccugcaaaguccagagcaaccggguguucugugauacaaugaacucccugacccucccgagcgaggucaaucugugcaauguggacauuuuuaaccccaaguacgauuguaagaucaugacaucuaaaacggacguuuccagcucugugauuaccucccugggagccaucgucagcugcuauggcaagacaaaaugcaccgcuuccaacaagaaucgcgggauuaucaaaacauucucuaacggaugugauuacgugagcaauaagggcguugacaccguguccgucggcaacacgcucuauuacgugaauaagcaagaagggaaaucucuguaugugaagggagagccuaucauuaacuuuuacgacccccuuguuuucccuagcgaugaauuugacgccuccaucagccaggucaaugagaaaauuaaccagucucuggccuucaucagaaaguccgaugaacuccugcacaaugugaacgcuggcaaaagcaccacaaauauuaugaucaccacaauuaucaucgugauuaucgucauucugcuuucucucaucgcgguggggcugcugcucuacugcaaggcccggugaggacuaguggaagcauuuuccuggcugauuaaaagaaauuacucagcuauggucaucuguuccuguuagaaggcuaugcagcauauuauauacuaugcgcauguuaugaaaugcauaauaaaaaauuuuaaaaaaucuaaaagaucuaaaaaaaaaaaaaaaaaaaaaaaaaaaaaaaaaaaaaaaaaaaaaaaaaaaaaaaaaaaaaaaaugcaucccccccccccccccccccccccccccccccaaaggcucuuuucagagccaccagaauu

SEQ ID NO: 662 - RNA, 2014 nt, Artificial Sequence
  mRNA product Design d-4 comprising derived and/or modified sequence from HRSV(A2)__F-del (opt6)
gggagagucccgcagucggcguccagcggcucugcuuguucgugugugugucguugcaggccuuauucaagcuuaccauggaauuacuaauacucaaagccaacgcaauaacaacaauacuaacagcaguaacauucugcuucgcaucaggacaaaacaucacagaagaauuuuaccaaaguacaugcagugcagucucuaaaggauaccucagugccuuacgcacaggaugguacacaucaguaauaacaaucgaacuuucaaacauaaaagaaaacaaaugcaauggaaccgacgccaaaguaaaacuaaucaaacaagaacuagacaaauauaaaaaugcaguaacagaauuacaacuccuaaugcaauccacaccagcaacaaauaacagagcaagacgagaacucccucgauucaugaauuacacauuaaacaacgcaaaaaaaacuaacguaacuuuaucaaaaaaaagaaaacguagauuucuaggauuccuacuaggcguaggguccgccauugcaucaggaguagcaguuagcaaaguauuacauuuagaaggagaaguaaauaaaaucaaaagcgcacuacucucaaccaacaaagcaguaguaucacucucaaacggaguaucaguacuaacauccaaaguacucgaccucaaaaacuacauagacaaacaauuacuacccauaguaaacaaacaaucaugcucuauaucaaauaucgaaacaguaaucgaauuucaacaaaaaaacaaucgacuacuugaaauaacaagagaguucuccgucaaugccggagucaccacaccagucucaacauacaugcuaaccaacucugaacuccuaucacuaauaaaugacaugccaauaacaaacgaccaaaaaaaacuaaugucaaauaacguacaaauaguacgacaacaaaguuauuccauaaugaguauaaucaaagaagaaguguuagcauacguaguccaacuaccauuauauggaguaauagacacaccauguuggaaauuacacaccucaccacucugcacuaccaauacaaaagaaggcucaaauauaugccuaacucgcacagacagaggcugguacugcgauaacgcaggauccguaucuuucuuuccccaagcagaaacuugcaaaguacaaucaaacagagucuucugcgacaccaugaauagucucacauuaccaucugaaguaaaccuauguaacguagauauauucaauccaaaauacgacugcaaaauaaugacaucaaaaaccgacgucucuagcaguguaaucacaucacuaggagcaauaguaagcugcuauggaaaaacaaaauguacagcaucaaacaaaaacaggggaauaauaaaaaccuucucaaacggaugugacuacguaucaaauaaaggcguagacacaguaagcguaggaaacacccuauacuacguuaacaaacaagaagggaaaucauuauacguaaaaggagaaccaauaauaaacuucuacgauccacucguauucccauccgacgaauuugacgccagcauaucccaaguuaacgaaaaaauaaaccaaucacuugcauuuauacgaaaaucugaugaacuucuccacaacguaaaugcaggaaaauccaccaccaauauaaugaucacaacuaucaucauaguaauaaucgucauuuuacuaucauuaauagcaguuggccuacuucuauacugcaaagcaagauaaggacuaguggaagcauuuuccuggcugauuaaaagaaauuacucagcuauggucaucuguuccuguuagaaggcuaugcagcauauuauauacuaugcgcauguuaugaaaugcauaauaaaaaauuuuaaaaaaucuaaaagaucuaaaaaaaaaaaaaaaaaaaaaaaaaaaaaaaaaaaaaaaaaaaaaaaaaaaaaaaaaaaaaaaaugcaucccccccccccccccccccccccccccccccaaaggcucuuuucagagccaccagaauu

SEQ ID NO: 663 - RNA, 2014 nt, Artificial Sequence
  mRNA product Design d-4 comprising derived and/or modified sequence from HRSV(A2)__F-del (opt11)
gggagagucccgcagucggcguccagcggcucugcuuguucgugugugugucguugcaggccuuauucaagcuuaccauggaacuacuaauccuaaaagccaacgcgaucaccaccauccuaacggcagucaccuucugcuucgcaucaggccaaaacaucacagaagaguucuaccaaagcacaugcuccgccguauccaaaggcuaccucagcgcccuacgcacaggcugguacacaucugucaucaccauagaacucuccaacaucaaagaaaacaaaugcaacggcacugacgccaaaguaaagcugaucaaacaagaacucgacaaauacaaaaacgcagucaccgaacuccaacuacucaugcaauccaccccugcaaccaacaacagggcccgccgcgaacucccccgcuucaugaacuacacuuuaaacaacgccaaaaagaccaacgucacacucagcaagaaacggaaacgacgauuccuaggguuucuccuaggcgucggcucggcaaucgccuccggcgucgccguaagcaaaguacuacaccuagaaggcgaagugaacaaaaucaaaagugcccuucucuccaccaacaaggccguagucucucuauccaacggagucucaguccucaccucaaagguccucgaccucaaaaacuacaucgacaaacaacuacuccccauugucaacaagcagucaugcuccauaucaaacaucgaaaccgucaucgaguuccaacagaaaaacaaccgacuccucgaaauaaccagagaguucucggucaacgccggcgucaccaccccagucagcaccuacaugcucacuaacuccgaacuccuaucccucaucaacgacaugccaauuaccaacgaccaaaagaaacuaaugucgaacaacguucaaaucguccgacaacaaaguuacuccaucaugagcauaaucaaagaagaaguucuagcguacgucguccaacucccacuauacggcgucaucgacacuccgugcuggaaacuccacacaucaccccuauguacaaccaacacaaaagaaggcagcaacaucugccucacccgcaccgaccgagggugguauugcgauaacgcuggcagcgucuccuucuucccccaagccgaaaccugcaaaguccaaucaaacagaguauucugcgacaccaugaacucccuuacucucccuagcgaagucaaccucugcaacguugacauauucaaccccaaauacgacugcaaaaucaugaccuccaagaccgacgucuccuccuccgucaucacaucucuaggugccauugucuccugcuacggaaaaaccaaaugcacagccuccaacaaaaaccgcggcaucauaaaaaccuucuccaacggcugcgacuacgucaguaauaaaggcgucgacacgguauccguugggaauacgcuuuacuacguaaauaaacaagaaggcaaaucccucuacgucaaaggugaacccaucauaaacuucuacgacccgcuuguguucccauccgacgaguucgacgccagcaucagccaggucaacgaaaagaucaaccaaucccuagccuucauccgcaaaagcgacgaacuacuacacaacgucaacgccggaaaauccacaaccaacaucaugaucaccaccaucaucaucgucaucaucguaauccuacucucucucaucgccgucggccuccuacuguacuguaaagcccgauagggacuaguggaagcauuuuccuggcugauuaaaagaaauuacucagcuauggucaucuguuccuguuagaaggcuaugcagcauauuauauacuaugcgcauguuaugaaaugcauaauaaaaaauuuuaaaaaaucuaaaagaucuaaaaaaaaaaaaaaaaaaaaaaaaaaaaaaaaaaaaaaaaaaaaaaaaaaaaaaaaaaaaaaaaugcaucccccccccccccccccccccccccccccccaaaggcucuuuucagagccaccagaauu

SEQ ID NO: 664 - RNA, 2111 nt, Artificial Sequence
  mRNA product Design d-5 comprising derived and/or modified sequence from HRSV(A2)__F-del (artificial)
gggagagggcgcuuggcuugcaaggacccugagcugcggcauugaagcacacccaacccaacucgacugaagucagccucacugaaccggaucugagaaucuucucucucugggcuugccagggcucuccgaaccuagcuagcauccucuucaauuccaacuagaaagcuuaccauggaguugcuaauccucaaagcaaaugcaauuaccacaauccucacugcagucacauuuuguuuugcuucuggucaaaacaucacugaagaauuuuaucaaucaacaugcagugcaguuagcaaaggcuaucuuagugcucugagaacugguugguauaccaguguuauaacuauagaauuaaguaauaucaaggaaaauaaguguaauggaacagaugcuaagguaaaauugauaaaacaagaauuagauaaauauaaaaaugcuguaacagaauugcaguugcucaugcaaagcacaccagcaacaaacaaucgagccagaagagaacuaccaagguuuaugaauuauacacucaacaaugccaaaaaaaccaauguaacauuaagcaagaaaaggaaaagaagauuucuugguuuuuuguuagguguuggaucugcaaucgccaguggcguugcuguaucuaagguccugcaccuagaaggggaagugaacaagaucaaaagugcucuacuauccacaaacaaggcuguagucagcuuaucaaauggaguuagugucuuaaccagcaaaguguuagaccucaaaaacuauauagauaaacaauuguuaccuauugugaacaagcaaagcugcagcauaucaaauauagaaacugugauagaguuccaacaaaagaacaacagacuacuagagauuaccagggaauuuaguguuaaugcagguguaacuacaccuguaagcacuuacauguuaacuaauagugaauuauugucauuaaucaaugauaugccuauaacaaaugaucagaaaaaguuaauguccaacaauguucaaauaguuagacagcaaaguuacucuaucauguccauaauaaaagaggaagucuuagcauauguaguacaauuaccacuauaugguguuauagauacacccuguuggaaacuacacacauccccucuauguacaaccaacacaaaagaaggguccaacaucuguuuaacaagaacugacagaggaugguacugugacaaugcaggaucaguaucuuucuucccacaagcugaaacauguaaaguucaaucaaaucgaguauuuugugacacaaugaacaguuuaacauuaccaagugaaguaaaucucugcaauguugacauauucaaccccaaauaugauuguaaaauuaugacuucaaaaacagauguaagcagcuccguuaucacaucucuaggagccauugugucaugcuauggcaaaacuaaauguacagcauccaauaaaaaucguggaaucauaaagacauuuucuaacgggugcgauuauguaucaaauaaagggguggacacugugucuguagguaacacauuauauuauguaaauaagcaagaagguaaaagucucuauguaaaaggugaaccaauaauaaauuucuaugacccauuaguauuccccucugaugaauuugaugcaucaauaucucaagucaacgagaagauuaaccagagccuagcauuuauucguaaauccgaugaauuauuacauaauguaaaugcugguaaauccaccacaaauaucaugauaacuacuauaauuauagugauuauaguaauauuguuaucauuaauugcuguuggacugcucuuauacuguaaggccagauaaggacuaguggaagcauuuuccuggcugauuaaaagaaauuacucagcuauggucaucuguuccuguuagaaggcuaugcagcauauuauauacuaugcgcauguuaugaaaugcauaauaaaaaauuuuaaaaaaucuaaaagaucuaaaaaaaaaaaaaaaaaaaaaaaaaaaaaaaaaaaaaaaaaaaaaaaaaaaaaaaaaaaaaaaaugcaucccccccccccccccccccccccccccccccaaaggcucuuuucagagccaccagaauu

SEQ ID NO: 665 - RNA, 2111 nt, Artificial Sequence
  mRNA product Design d-5 comprising derived and/or modified sequence from HRSV(A2)__F-del (opt1)
gggagagggcgcuuggcuugcaaggacccugagcugcggcauugaagcacacccaacccaacucgacugaagucagccucacugaaccggaucugagaaucuucucucucugggcuugccagggcucuccgaaccuagcuagcauccucuucaauuccaacuagaaagcuuaccauggagcugcucauccugaaggccaacgccaucaccaccauccugacggcggugaccuucugcuucgccagcggccagaacaucaccgaggaguucuaccaguccaccugcagcgccgucuccaagggguaccucagcgcccugcggacgggcugguacaccuccgugaucaccaucgagcugagcaacaucaaggagaacaagugcaacgggaccgacgccaaggugaagcucaucaagcaggagcuggacaaguacaagaacgcggucacggagcugcagcuccugaugcaguccaccccggcaaccaacaaccgcgcccggcgcgagcugccccgguucaugaacuacacccucaacaacgccaagaagacgaacgugacccugagcaagaagcgcaagcggcgcuuccugggcuuccuccugggggugggcuccgccaucgcgagcggcgucgccguguccaaggugcugcaccucgagggggaggucaacaagaucaagagcgcccugcuguccaccaacaaggccguggugagccucuccaacggcgucagcgugcugaccuccaaggugcuggaccucaagaacuacaucgacaagcagcugcugcccaucgucaacaagcagagcugcuccaucagcaacaucgagacggugaucgaguuccagcagaagaacaaccggcuccuggagaucacccgcgaguucagcgugaacgccggggucaccacccccguguccacguacaugcugaccaacagcgagcuccugucccugaucaacgacaugccgaucaccaacgaccagaagaagcucaugagcaacaacgugcagaucguccggcagcaguccuacagcaucauguccaucaucaaggaggaggugcuggcguacgugguccagcugccccucuacggcgugaucgacacccccugcuggaagcugcacacgagcccccugugcaccaccaacaccaaggagggguccaacaucugccucacgcgcaccgaccggggcugguacugcgacaacgccggcagcgucuccuucuucccgcaggccgagaccugcaaggugcagagcaaccgcguguucugcgacaccaugaacucccugacgcugcccagcgagguaaaccucugcaacgucgacaucuucaaccccaaguacgacugcaagaucaugaccuccaagaccgacgugagcuccagcgugaucaccucccugggggccaucgucagcugcuacggcaagacgaagugcaccgccagcaacaagaaccgggggaucaucaagaccuucuccaacggcugcgacuacgugagcaacaagggcguggacaccguguccgucgggaacacccuguacuacgugaacaagcaggagggcaagagccucuacgugaagggggagcccaucaucaacuucuacgacccgcuggucuuccccuccgacgaguucgacgcgagcaucucccaggugaacgagaagaucaaccagagccuggccuucauccgcaaguccgacgagcugcuccacaacgugaacgccggcaagagcacgaccaacaucaugaucaccaccaucaucaucgucaucaucgugauccugcugucccucaucgccguggggcugcugcucuacugcaaggcccggugaggacuaguggaagcauuuuccuggcugauuaaaagaaauuacucagcuauggucaucuguuccuguuagaaggcuaugcagcauauuauauacuaugcgcauguuaugaaaugcauaauaaaaaauuuuaaaaaaucuaaaagaucuaaaaaaaaaaaaaaaaaaaaaaaaaaaaaaaaaaaaaaaaaaaaaaaaaaaaaaaaaaaaaaaaugcaucccccccccccccccccccccccccccccccaaaggcucuuuucagagccaccagaauu

SEQ ID NO: 666 - RNA, 2111 nt, Artificial Sequence
  mRNA product Design d-5 comprising derived and/or modified sequence from HRSV(A2)__F-del (opt1)
gggagagggcgcuuggcuugcaaggacccugagcugcggcauugaagcacacccaacccaacucgacugaagucagccucacugaaccggaucugagaaucuucucucucugggcuugccagggcucuccgaaccuagcuagcauccucuucaauuccaacuagaaagcuuaccauggagcugcucauccugaaggccaacgccaucaccaccauccugacggcggugaccuucugcuucgccagcggccagaacaucaccgaggaguucuaccaguccacgugcagcgccgucuccaagggguaccucagcgcccugcgcaccggcugguacaccuccgugaucaccaucgagcugagcaacaucaaggagaacaagugcaacgggaccgacgccaaggugaagcucaucaagcaggagcuggacaaguacaagaacgcggucacggagcugcagcuccugaugcaguccacccccgccaccaacaaccgggcccgccgggagcugccgcgcuucaugaacuacacccucaacaacgccaagaagacgaacgugacccugagcaagaagcggaagcgccgguuccugggcuuccuccugggggugggcuccgcgaucgccagcggcgucgccguguccaaggugcugcaccucgagggggaggucaacaagaucaagagcgcccugcuguccaccaacaaggccguggugagccucuccaacggcgucagcgugcugaccuccaaggugcuggaccucaagaacuacaucgacaagcagcugcugcccaucgucaacaagcagagcugcuccaucagcaacaucgagacggugaucgaguuccagcagaagaacaaccgccuccuggagaucacccgggaguucagcgugaacgcgggggucaccacccccguguccacguacaugcugaccaacagcgagcuccugucccugaucaacgacaugcccaucaccaacgaccagaagaagcucaugagcaacaacgugcagaucguccgccagcaguccuacagcaucauguccaucaucaaggaggaggugcuggccuacgugguccagcugccgcucuacggcgugaucgacacccccugcuggaagcugcacacgagcccccugugcaccaccaacaccaaggagggguccaacaucugccucacgcggaccgaccgcggcugguacugcgacaacgccggcagcgucuccuucuucccccaggccgagaccugcaaggugcagagcaaccggguguucugcgacaccaugaacucccugacgcugccgagcgaggucaaccucugcaacguggacaucuucaaccccaaguacgacugcaagaucaugaccuccaagaccgacgugagcuccagcgucaucaccucccugggggccaucgugagcugcuacggcaagacgaagugcaccgcgagcaacaagaaccgcgggaucaucaagaccuucuccaacggcugcgacuacgugagcaacaagggcgucgacaccguguccguggggaacacccuguacuacgucaacaagcaggagggcaagagccucuacgugaagggggagcccaucaucaacuucuacgacccccugguguucccguccgacgaguucgacgccagcaucucccaggucaacgagaagaucaaccagagccuggccuucauccggaaguccgacgagcuccugcacaacgugaacgccggcaagagcacgaccaacaucaugaucaccaccaucaucaucgugaucaucgucauccugcugucccucaucgccguggggcugcugcucuacugcaaggcgcgcugaggacuaguggaagcauuuuccuggcugauuaaaagaaauuacucagcuauggucaucuguuccuguuagaaggcuaugcagcauauuauauacuaugcgcauguuaugaaaugcauaauaaaaaauuuuaaaaaaucuaaaagaucuaaaaaaaaaaaaaaaaaaaaaaaaaaaaaaaaaaaaaaaaaaaaaaaaaaaaaaaaaaaaaaaaugcaucccccccccccccccccccccccccccccccaaaggcucuuuucagagccaccagaauu

SEQ ID NO: 667 - RNA, 2111 nt, Artificial Sequence
  mRNA product Design d-5 comprising derived and/or modified sequence from HRSV(A2)__F-del (opt2)
gggagagggcgcuuggcuugcaaggacccugagcugcggcauugaagcacacccaacccaacucgacugaagucagccucacugaaccggaucugagaaucuucucucucugggcuugccagggcucuccgaaccuagcuagcauccucuucaauuccaacuagaaagcuuaccauggagcuccucauccucaaggccaacgccaucaccaccauccucaccgccgucaccuucugcuucgccuccggccagaacaucaccgaggaguucuaccaguccaccugcuccgccgucuccaagggcuaccucuccgcccuccgcaccggcugguacaccuccgucaucaccaucgagcucuccaacaucaaggagaacaagugcaacggcaccgacgccaaggucaagcucaucaagcaggagcucgacaaguacaagaacgccgucaccgagcuccagcuccucaugcaguccacccccgccaccaacaaccgcgcccgccgcgagcucccccgcuucaugaacuacacccucaacaacgccaagaagaccaacgucacccucuccaagaagcgcaagcgccgcuuccucggcuuccuccucggcgucggcuccgccaucgccuccggcgucgccgucuccaagguccuccaccucgagggcgaggucaacaagaucaaguccgcccuccucuccaccaacaaggccgucgucucccucuccaacggcgucuccguccucaccuccaagguccucgaccucaagaacuacaucgacaagcagcuccuccccaucgucaacaagcaguccugcuccaucuccaacaucgagaccgucaucgaguuccagcagaagaacaaccgccuccucgagaucacccgcgaguucuccgucaacgccggcgucaccacccccgucuccaccuacaugcucaccaacuccgagcuccucucccucaucaacgacaugcccaucaccaacgaccagaagaagcucauguccaacaacguccagaucguccgccagcaguccuacuccaucauguccaucaucaaggaggagguccucgccuacgucguccagcucccccucuacggcgucaucgacacccccugcuggaagcuccacaccuccccccucugcaccaccaacaccaaggagggcuccaacaucugccucacccgcaccgaccgcggcugguacugcgacaacgccggcuccgucuccuucuucccccaggccgagaccugcaagguccaguccaaccgcgucuucugcgacaccaugaacucccucacccuccccuccgaggucaaccucugcaacgucgacaucuucaaccccaaguacgacugcaagaucaugaccuccaagaccgacgucuccuccuccgucaucaccucccucggcgccaucgucuccugcuacggcaagaccaagugcaccgccuccaacaagaaccgcggcaucaucaagaccuucuccaacggcugcgacuacgucuccaacaagggcgucgacaccgucuccgucggcaacacccucuacuacgucaacaagcaggagggcaagucccucuacgucaagggcgagcccaucaucaacuucuacgacccccucgucuuccccuccgacgaguucgacgccuccaucucccaggucaacgagaagaucaaccagucccucgccuucauccgcaaguccgacgagcuccuccacaacgucaacgccggcaaguccaccaccaacaucaugaucaccaccaucaucaucgucaucaucgucauccuccucucccucaucgccgucggccuccuccucuacugcaaggcccgcugaggacuaguggaagcauuuuccuggcugauuaaaagaaauuacucagcuauggucaucuguuccuguuagaaggcuaugcagcauauuauauacuaugcgcauguuaugaaaugcauaauaaaaaauuuuaaaaaaucuaaaagaucuaaaaaaaaaaaaaaaaaaaaaaaaaaaaaaaaaaaaaaaaaaaaaaaaaaaaaaaaaaaaaaaaugcaucccccccccccccccccccccccccccccccaaaggcucuuuucagagccaccagaauu

SEQ ID NO: 668 - RNA, 2111 nt, Artificial Sequence
  mRNA product Design d-5 comprising derived and/or modified sequence from HRSV(A2)__F-del (opt3)
gggagagggcgcuuggcuugcaaggacccugagcugcggcauugaagcacacccaacccaacucgacugaagucagccucacugaaccggaucugagaaucuucucucucugggcuugccagggcucuccgaaccuagcuagcauccucuucaauuccaacuagaaagcuuaccauggagcugcucauccuuaaggccaacgcuauuaccacaauacugacugcagugacguucugcuuugccagcggccagaauaucaccgaagaguucuaccaauccacauguucugcggucucaaaaggguauuugagugcuuuaagaacuggaugguacaccagcguuauuacaaucgaacuguccaacauuaaggagaauaaaugcaacgguaccgacgccaaggugaaacuaaucaagcaggaacucgauaaguauaaaaaugcaguaacugagcugcagcuucugaugcagucuacacccgccaccaacaauagggcucggcgcgaguugccucgauuuaugaacuacacgcucaauaacgcaaagaaaacuaaugugacccugucgaagaaacguaagagaagguuccugggcuuucucuuaggggucggaucagccauagcuagcggcguggccguuaguaaggugcugcaccuugaaggugaggucaacaaaaucaaguccgcguugcugucuacaaauaaagcagugguaagccuauccaacgggguuucagugcucacuucuaagguccuggaccuuaaaaauuauauugauaagcaacuguugccaaucgugaacaaacagagcuguucuauuuccaacaucgaaaccgugauagaguuccagcagaagaauaaccggcuccuggagauuacacgcgaauuuucagucaaugccggaguuaccacgccggugagcacuuacauguuaacaaacagugagcugcucucucuuaucaaugacaugcccauuaccaacgaucaaaagaaacugauguccaauaacguacagaucgugagacagcagagcuauucgaucaugucuauuauaaaggaagaggucuuggcuuacgugguucaacuaccucuguacggcgugaucgacacuccaugcuggaaacuccauacauccccacuguguaccacgaauaccaaggaaggcucaaacauuugccuuacaaggacugaucgggggugguauugugacaaugccggaagugucagcuucuuuccucaggcagagaccugcaaagugcaguccaaccgcguauucugugauacaaugaauagucugacuuugccaagcgagguuaaccucugcaauguggacaucuuuaaccccaaguacgauuguaagauaaugaccucaaaaacagacgucaguuccagcgugauuaccucucugggugcuaucgucucaugcuauggcaagacuaaaugcacggccaguaacaagaaucgagggaucauuaaaacauucagcaacggaugugauuacguguccaauaagggcguugacaccgugucuguagguaacacuuuauauuacgucaauaagcaagaagggaaaucgcuguaugugaagggagagccuaucauuaacuuuuacgacccccuaguuuucccgagcgaugaauuugacgcguccauaucacaggugaaugagaaaaucaaccagagucucgccuucauuagaaagucugaugaacugcuucacaaugucaacgcaggcaaaagcaccacaaauaucaugaucaccacuauuauaaucgugauuaucguaauuuugcugucccucaucgcugugggccugcuucuguacugcaaggccaggugaggacuaguggaagcauuuuccuggcugauuaaaagaaauuacucagcuauggucaucuguuccuguuagaaggcuaugcagcauauuauauacuaugcgcauguuaugaaaugcauaauaaaaaauuuuaaaaaaucuaaaagaucuaaaaaaaaaaaaaaaaaaaaaaaaaaaaaaaaaaaaaaaaaaaaaaaaaaaaaaaaaaaaaaaaugcaucccccccccccccccccccccccccccccccaaaggcucuuuucagagccaccagaauu

SEQ ID NO: 669 - RNA, 2111 nt, Artificial Sequence
  mRNA product Design d-5 comprising derived and/or modified sequence from HRSV(A2)__F-del (opt4)
gggagagggcgcuuggcuugcaaggacccugagcugcggcauugaagcacacccaacccaacucgacugaagucagccucacugaaccggaucugagaaucuucucucucugggcuugccagggcucuccgaaccuagcuagcauccucuucaauuccaacuagaaagcuuaccauggagcugcugauccugaaggccaacgccaucaccaccauccugaccgccgugaccuucugcuucgccagcggccagaacaucaccgaggaguucuaccagagcaccugcagcgccgugagcaagggcuaccugagcgcccugagaaccggcugguacaccagcgugaucaccaucgagcugagcaacaucaaggagaacaagugcaacggcaccgacgccaaggugaagcugaucaagcaggagcuggacaaguacaagaacgccgugaccgagcugcagcugcugaugcagagcacccccgccaccaacaacagagccagaagagagcugcccagauucaugaacuacacccugaacaacgccaagaagaccaacgugacccugagcaagaagagaaagagaagauuccugggcuuccugcugggcgugggcagcgccaucgccagcggcguggccgugagcaaggugcugcaccuggagggcgaggugaacaagaucaagagcgcccugcugagcaccaacaaggccguggugagccugagcaacggcgugagcgugcugaccagcaaggugcuggaccugaagaacuacaucgacaagcagcugcugcccaucgugaacaagcagagcugcagcaucagcaacaucgagaccgugaucgaguuccagcagaagaacaacagacugcuggagaucaccagagaguucagcgugaacgccggcgugaccacccccgugagcaccuacaugcugaccaacagcgagcugcugagccugaucaacgacaugcccaucaccaacgaccagaagaagcugaugagcaacaacgugcagaucgugagacagcagagcuacagcaucaugagcaucaucaaggaggaggugcuggccuacguggugcagcugccccuguacggcgugaucgacacccccugcuggaagcugcacaccagcccccugugcaccaccaacaccaaggagggcagcaacaucugccugaccagaaccgacagaggcugguacugcgacaacgccggcagcgugagcuucuucccccaggccgagaccugcaaggugcagagcaacagaguguucugcgacaccaugaacagccugacccugcccagcgaggugaaccugugcaacguggacaucuucaaccccaaguacgacugcaagaucaugaccagcaagaccgacgugagcagcagcgugaucaccagccugggcgccaucgugagcugcuacggcaagaccaagugcaccgccagcaacaagaacagaggcaucaucaagaccuucagcaacggcugcgacuacgugagcaacaagggcguggacaccgugagcgugggcaacacccuguacuacgugaacaagcaggagggcaagagccuguacgugaagggcgagcccaucaucaacuucuacgacccccugguguuccccagcgacgaguucgacgccagcaucagccaggugaacgagaagaucaaccagagccuggccuucaucagaaagagcgacgagcugcugcacaacgugaacgccggcaagagcaccaccaacaucaugaucaccaccaucaucaucgugaucaucgugauccugcugagccugaucgccgugggccugcugcuguacugcaaggccagaugaggacuaguggaagcauuuuccuggcugauuaaaagaaauuacucagcuauggucaucuguuccuguuagaaggcuaugcagcauauuauauacuaugcgcauguuaugaaaugcauaauaaaaaauuuuaaaaaaucuaaaagaucuaaaaaaaaaaaaaaaaaaaaaaaaaaaaaaaaaaaaaaaaaaaaaaaaaaaaaaaaaaaaaaaaugcaucccccccccccccccccccccccccccccccaaaggcucuuuucagagccaccagaauu

SEQ ID NO: 670 - RNA, 2111 nt, Artificial Sequence
  mRNA product Design d-5 comprising derived and/or modified sequence from HRSV(A2)__F-del (opt5)
gggagagggcgcuuggcuugcaaggacccugagcugcggcauugaagcacacccaacccaacucgacugaagucagccucacugaaccggaucugagaaucuucucucucugggcuugccagggcucuccgaaccuagcuagcauccucuucaauuccaacuagaaagcuuaccauggagcugcucauccugaaggccaacgcuauuaccacaauccuuacggccgugaccuucugcuuugcgagcggccagaauauuacagaagaguucuaccaauccaccuguucugcugucagcaaaggguaucuguccgcccucagaacaggaugguacaccucuguuaucacaauugaacugagcaacaucaaggagaauaaaugcaacggcaccgacgccaaggugaaacuuaucaagcaggaacuggauaaguauaaaaaugcugugacggagcuccagcugcugaugcaguccacccccgccacaaacaaucgggcucgcagagagcucccucgguuuaugaacuacacccugaauaacgccaagaaaacaaaugucacccuuucuaagaaacgcaagagacgguuccugggguuucuccugggagugggcagcgcgauugccuccgggguugcugugagcaagguccuucaccuggaaggagaggugaacaaaaucaagucugcccuccuguccacgaauaaagcuguugugagccugucuaacggcgucuccgugcucacaagcaaggugcuggaccuuaaaaauuauauugauaagcaacugcucccgaucgucaacaaacagucuuguuccauuagcaacaucgaaaccguuauugaguuccagcagaagaauaaccgccugcuugagaucacaagagaauuuuccgugaaugccggcgugaccacccccgucucuacauacaugcugacgaacagcgagcuccugucccugaucaaugacaugccuauuaccaacgaucaaaagaaacucaugagcaauaacgugcagaucguucggcagcagucuuauuccauuaugagcaucauuaaggaagaggugcuggcguacgucgugcaacuuccccuguacgggguuaucgacacaccuugcuggaaacuccauaccucuccccuguguacaaccaauacgaaggaaggaagcaacaucugccuuacacgcaccgauagaggcugguauugugacaaugccggguccgugucuuucuuuccucaggcugagaccugcaaaguccagagcaaccggguguucugugauacaaugaacucccugacccucccgagcgaggucaaucugugcaauguggacauuuuuaaccccaaguacgauuguaagaucaugacaucuaaaacggacguuuccagcucugugauuaccucccugggagccaucgucagcugcuauggcaagacaaaaugcaccgcuuccaacaagaaucgcgggauuaucaaaacauucucuaacggaugugauuacgugagcaauaagggcguugacaccguguccgucggcaacacgcucuauuacgugaauaagcaagaagggaaaucucuguaugugaagggagagccuaucauuaacuuuuacgacccccuuguuuucccuagcgaugaauuugacgccuccaucagccaggucaaugagaaaauuaaccagucucuggccuucaucagaaaguccgaugaacuccugcacaaugugaacgcuggcaaaagcaccacaaauauuaugaucaccacaauuaucaucgugauuaucgucauucugcuuucucucaucgcgguggggcugcugcucuacugcaaggcccggugaggacuaguggaagcauuuuccuggcugauuaaaagaaauuacucagcuauggucaucuguuccuguuagaaggcuaugcagcauauuauauacuaugcgcauguuaugaaaugcauaauaaaaaauuuuaaaaaaucuaaaagaucuaaaaaaaaaaaaaaaaaaaaaaaaaaaaaaaaaaaaaaaaaaaaaaaaaaaaaaaaaaaaaaaaugcaucccccccccccccccccccccccccccccccaaaggcucuuuucagagccaccagaauu

SEQ ID NO: 671 - RNA, 2111 nt, Artificial Sequence
  mRNA product Design d-5 comprising derived and/or modified sequence from HRSV(A2)__F-del (opt6)
gggagagggcgcuuggcuugcaaggacccugagcugcggcauugaagcacacccaacccaacucgacugaagucagccucacugaaccggaucugagaaucuucucucucugggcuugccagggcucuccgaaccuagcuagcauccucuucaauuccaacuagaaagcuuaccauggaauuacuaauacucaaagccaacgcaauaacaacaauacuaacagcaguaacauucugcuucgcaucaggacaaaacaucacagaagaauuuuaccaaaguacaugcagugcagucucuaaaggauaccucagugccuuacgcacaggaugguacacaucaguaauaacaaucgaacuuucaaacauaaaagaaaacaaaugcaauggaaccgacgccaaaguaaaacuaaucaaacaagaacuagacaaauauaaaaaugcaguaacagaauuacaacuccuaaugcaauccacaccagcaacaaauaacagagcaagacgagaacucccucgauucaugaauuacacauuaaacaacgcaaaaaaaacuaacguaacuuuaucaaaaaaaagaaaacguagauuucuaggauuccuacuaggcguaggguccgccauugcaucaggaguagcaguuagcaaaguauuacauuuagaaggagaaguaaauaaaaucaaaagcgcacuacucucaaccaacaaagcaguaguaucacucucaaacggaguaucaguacuaacauccaaaguacucgaccucaaaaacuacauagacaaacaauuacuacccauaguaaacaaacaaucaugcucuauaucaaauaucgaaacaguaaucgaauuucaacaaaaaaacaaucgacuacuugaaauaacaagagaguucuccgucaaugccggagucaccacaccagucucaacauacaugcuaaccaacucugaacuccuaucacuaauaaaugacaugccaauaacaaacgaccaaaaaaaacuaaugucaaauaacguacaaauaguacgacaacaaaguuauuccauaaugaguauaaucaaagaagaaguguuagcauacguaguccaacuaccauuauauggaguaauagacacaccauguuggaaauuacacaccucaccacucugcacuaccaauacaaaagaaggcucaaauauaugccuaacucgcacagacagaggcugguacugcgauaacgcaggauccguaucuuucuuuccccaagcagaaacuugcaaaguacaaucaaacagagucuucugcgacaccaugaauagucucacauuaccaucugaaguaaaccuauguaacguagauauauucaauccaaaauacgacugcaaaauaaugacaucaaaaaccgacgucucuagcaguguaaucacaucacuaggagcaauaguaagcugcuauggaaaaacaaaauguacagcaucaaacaaaaacaggggaauaauaaaaaccuucucaaacggaugugacuacguaucaaauaaaggcguagacacaguaagcguaggaaacacccuauacuacguuaacaaacaagaagggaaaucauuauacguaaaaggagaaccaauaauaaacuucuacgauccacucguauucccauccgacgaauuugacgccagcauaucccaaguuaacgaaaaaauaaaccaaucacuugcauuuauacgaaaaucugaugaacuucuccacaacguaaaugcaggaaaauccaccaccaauauaaugaucacaacuaucaucauaguaauaaucgucauuuuacuaucauuaauagcaguuggccuacuucuauacugcaaagcaagauaaggacuaguggaagcauuuuccuggcugauuaaaagaaauuacucagcuauggucaucuguuccuguuagaaggcuaugcagcauauuauauacuaugcgcauguuaugaaaugcauaauaaaaaauuuuaaaaaaucuaaaagaucuaaaaaaaaaaaaaaaaaaaaaaaaaaaaaaaaaaaaaaaaaaaaaaaaaaaaaaaaaaaaaaaaugcaucccccccccccccccccccccccccccccccaaaggcucuuuucagagccaccagaauu

SEQ ID NO: 672 - RNA, 2111 nt, Artificial Sequence
  mRNA product Design d-5 comprising derived and/or modified sequence from HRSV(A2)__F-del (opt11)
gggagagggcgcuuggcuugcaaggacccugagcugcggcauugaagcacacccaacccaacucgacugaagucagccucacugaaccggaucugagaaucuucucucucugggcuugccagggcucuccgaaccuagcuagcauccucuucaauuccaacuagaaagcuuaccauggaacuacuaauccuaaaagccaacgcgaucaccaccauccuaacggcagucaccuucugcuucgcaucaggccaaaacaucacagaagaguucuaccaaagcacaugcuccgccguauccaaaggcuaccucagcgcccuacgcacaggcugguacacaucugucaucaccauagaacucuccaacaucaaagaaaacaaaugcaacggcacugacgccaaaguaaagcugaucaaacaagaacucgacaaauacaaaaacgcagucaccgaacuccaacuacucaugcaauccaccccugcaaccaacaacagggcccgccgcgaacucccccgcuucaugaacuacacuuuaaacaacgccaaaaagaccaacgucacacucagcaagaaacggaaacgacgauuccuaggguuucuccuaggcgucggcucggcaaucgccuccggcgucgccguaagcaaaguacuacaccuagaaggcgaagugaacaaaaucaaaagugcccuucucuccaccaacaaggccguagucucucuauccaacggagucucaguccucaccucaaagguccucgaccucaaaaacuacaucgacaaacaacuacuccccauugucaacaagcagucaugcuccauaucaaacaucgaaaccgucaucgaguuccaacagaaaaacaaccgacuccucgaaauaaccagagaguucucggucaacgccggcgucaccaccccagucagcaccuacaugcucacuaacuccgaacuccuaucccucaucaacgacaugccaauuaccaacgaccaaaagaaacuaaugucgaacaacguucaaaucguccgacaacaaaguuacuccaucaugagcauaaucaaagaagaaguucuagcguacgucguccaacucccacuauacggcgucaucgacacuccgugcuggaaacuccacacaucaccccuauguacaaccaacacaaaagaaggcagcaacaucugccucacccgcaccgaccgagggugguauugcgauaacgcuggcagcgucuccuucuucccccaagccgaaaccugcaaaguccaaucaaacagaguauucugcgacaccaugaacucccuuacucucccuagcgaagucaaccucugcaacguugacauauucaaccccaaauacgacugcaaaaucaugaccuccaagaccgacgucuccuccuccgucaucacaucucuaggugccauugucuccugcuacggaaaaaccaaaugcacagccuccaacaaaaaccgcggcaucauaaaaaccuucuccaacggcugcgacuacgucaguaauaaaggcgucgacacgguauccguugggaauacgcuuuacuacguaaauaaacaagaaggcaaaucccucuacgucaaaggugaacccaucauaaacuucuacgacccgcuuguguucccauccgacgaguucgacgccagcaucagccaggucaacgaaaagaucaaccaaucccuagccuucauccgcaaaagcgacgaacuacuacacaacgucaacgccggaaaauccacaaccaacaucaugaucaccaccaucaucaucgucaucaucguaauccuacucucucucaucgccgucggccuccuacuguacuguaaagcccgauagggacuaguggaagcauuuuccuggcugauuaaaagaaauuacucagcuauggucaucuguuccuguuagaaggcuaugcagcauauuauauacuaugcgcauguuaugaaaugcauaauaaaaaauuuuaaaaaaucuaaaagaucuaaaaaaaaaaaaaaaaaaaaaaaaaaaaaaaaaaaaaaaaaaaaaaaaaaaaaaaaaaaaaaaaugcaucccccccccccccccccccccccccccccccaaaggcucuuuucagagccaccagaauu

SEQ ID NO: 673 - RNA, 1991 nt, Artificial Sequence
  mRNA product Design e-1 comprising derived and/or modified sequence from HRSV(A2)__F-del (artificial)
gggagaauauaagcguuggcggagcgucgguuguagcacucugcgcgcccgcucuucugcugcuguuugucuacuuccuccugcuuccccgccgccgccgccgccaucaagcuuaccauggaguugcuaauccucaaagcaaaugcaauuaccacaauccucacugcagucacauuuuguuuugcuucuggucaaaacaucacugaagaauuuuaucaaucaacaugcagugcaguuagcaaaggcuaucuuagugcucugagaacugguugguauaccaguguuauaacuauagaauuaaguaauaucaaggaaaauaaguguaauggaacagaugcuaagguaaaauugauaaaacaagaauuagauaaauauaaaaaugcuguaacagaauugcaguugcucaugcaaagcacaccagcaacaaacaaucgagccagaagagaacuaccaagguuuaugaauuauacacucaacaaugccaaaaaaaccaauguaacauuaagcaagaaaaggaaaagaagauuucuugguuuuuuguuagguguuggaucugcaaucgccaguggcguugcuguaucuaagguccugcaccuagaaggggaagugaacaagaucaaaagugcucuacuauccacaaacaaggcuguagucagcuuaucaaauggaguuagugucuuaaccagcaaaguguuagaccucaaaaacuauauagauaaacaauuguuaccuauugugaacaagcaaagcugcagcauaucaaauauagaaacugugauagaguuccaacaaaagaacaacagacuacuagagauuaccagggaauuuaguguuaaugcagguguaacuacaccuguaagcacuuacauguuaacuaauagugaauuauugucauuaaucaaugauaugccuauaacaaaugaucagaaaaaguuaauguccaacaauguucaaauaguuagacagcaaaguuacucuaucauguccauaauaaaagaggaagucuuagcauauguaguacaauuaccacuauaugguguuauagauacacccuguuggaaacuacacacauccccucuauguacaaccaacacaaaagaaggguccaacaucuguuuaacaagaacugacagaggaugguacugugacaaugcaggaucaguaucuuucuucccacaagcugaaacauguaaaguucaaucaaaucgaguauuuugugacacaaugaacaguuuaacauuaccaagugaaguaaaucucugcaauguugacauauucaaccccaaauaugauuguaaaauuaugacuucaaaaacagauguaagcagcuccguuaucacaucucuaggagccauugugucaugcuauggcaaaacuaaauguacagcauccaauaaaaaucguggaaucauaaagacauuuucuaacgggugcgauuauguaucaaauaaagggguggacacugugucuguagguaacacauuauauuauguaaauaagcaagaagguaaaagucucuauguaaaaggugaaccaauaauaaauuucuaugacccauuaguauuccccucugaugaauuugaugcaucaauaucucaagucaacgagaagauuaaccagagccuagcauuuauucguaaauccgaugaauuauuacauaauguaaaugcugguaaauccaccacaaauaucaugauaacuacuauaauuauagugauuauaguaauauuguuaucauuaauugcuguuggacugcucuuauacuguaaggccagauaaggacuaguguccaccugucccuccugggcugcuggauugucucguuuuccugccaaauaaacaggaucagcgcuuuacagaucuaaaaaaaaaaaaaaaaaaaaaaaaaaaaaaaaaaaaaaaaaaaaaaaaaaaaaaaaaaaaaaaaugcaucccccccccccccccccccccccccccccccaaaggcucuuuucagagccaccagaauu

SEQ ID NO: 674 - RNA, 1991 nt, Artificial Sequence
  mRNA product Design e-1 comprising derived and/or modified sequence from HRSV(A2)__F-del (opt1)
gggagaauauaagcguuggcggagcgucgguuguagcacucugcgcgcccgcucuucugcugcuguuugucuacuuccuccugcuuccccgccgccgccgccgccaucaagcuuaccauggagcugcucauccugaaggccaacgccaucaccaccauccugacggcggugaccuucugcuucgccagcggccagaacaucaccgaggaguucuaccaguccaccugcagcgccgucuccaagggguaccucagcgcccugcggacgggcugguacaccuccgugaucaccaucgagcugagcaacaucaaggagaacaagugcaacgggaccgacgccaaggugaagcucaucaagcaggagcuggacaaguacaagaacgcggucacggagcugcagcuccugaugcaguccaccccggcaaccaacaaccgcgcccggcgcgagcugccccgguucaugaacuacacccucaacaacgccaagaagacgaacgugacccugagcaagaagcgcaagcggcgcuuccugggcuuccuccugggggugggcuccgccaucgcgagcggcgucgccguguccaaggugcugcaccucgagggggaggucaacaagaucaagagcgcccugcuguccaccaacaaggccguggugagccucuccaacggcgucagcgugcugaccuccaaggugcuggaccucaagaacuacaucgacaagcagcugcugcccaucgucaacaagcagagcugcuccaucagcaacaucgagacggugaucgaguuccagcagaagaacaaccggcuccuggagaucacccgcgaguucagcgugaacgccggggucaccacccccguguccacguacaugcugaccaacagcgagcuccugucccugaucaacgacaugccgaucaccaacgaccagaagaagcucaugagcaacaacgugcagaucguccggcagcaguccuacagcaucauguccaucaucaaggaggaggugcuggcguacgugguccagcugccccucuacggcgugaucgacacccccugcuggaagcugcacacgagcccccugugcaccaccaacaccaaggagggguccaacaucugccucacgcgcaccgaccggggcugguacugcgacaacgccggcagcgucuccuucuucccgcaggccgagaccugcaaggugcagagcaaccgcguguucugcgacaccaugaacucccugacgcugcccagcgagguaaaccucugcaacgucgacaucuucaaccccaaguacgacugcaagaucaugaccuccaagaccgacgugagcuccagcgugaucaccucccugggggccaucgucagcugcuacggcaagacgaagugcaccgccagcaacaagaaccgggggaucaucaagaccuucuccaacggcugcgacuacgugagcaacaagggcguggacaccguguccgucgggaacacccuguacuacgugaacaagcaggagggcaagagccucuacgugaagggggagcccaucaucaacuucuacgacccgcuggucuuccccuccgacgaguucgacgcgagcaucucccaggugaacgagaagaucaaccagagccuggccuucauccgcaaguccgacgagcugcuccacaacgugaacgccggcaagagcacgaccaacaucaugaucaccaccaucaucaucgucaucaucgugauccugcugucccucaucgccguggggcugcugcucuacugcaaggcccggugaggacuaguguccaccugucccuccugggcugcuggauugucucguuuuccugccaaauaaacaggaucagcgcuuuacagaucuaaaaaaaaaaaaaaaaaaaaaaaaaaaaaaaaaaaaaaaaaaaaaaaaaaaaaaaaaaaaaaaaugcaucccccccccccccccccccccccccccccccaaaggcucuuuucagagccaccagaauu

SEQ ID NO: 675 - RNA, 1991 nt, Artificial Sequence
  mRNA product Design e-1 comprising derived and/or modified sequence from HRSV(A2)__F-del (opt1)
gggagaauauaagcguuggcggagcgucgguuguagcacucugcgcgcccgcucuucugcugcuguuugucuacuuccuccugcuuccccgccgccgccgccgccaucaagcuuaccauggagcugcucauccugaaggccaacgccaucaccaccauccugacggcggugaccuucugcuucgccagcggccagaacaucaccgaggaguucuaccaguccacgugcagcgccgucuccaagggguaccucagcgcccugcgcaccggcugguacaccuccgugaucaccaucgagcugagcaacaucaaggagaacaagugcaacgggaccgacgccaaggugaagcucaucaagcaggagcuggacaaguacaagaacgcggucacggagcugcagcuccugaugcaguccacccccgccaccaacaaccgggcccgccgggagcugccgcgcuucaugaacuacacccucaacaacgccaagaagacgaacgugacccugagcaagaagcggaagcgccgguuccugggcuuccuccugggggugggcuccgcgaucgccagcggcgucgccguguccaaggugcugcaccucgagggggaggucaacaagaucaagagcgcccugcuguccaccaacaaggccguggugagccucuccaacggcgucagcgugcugaccuccaaggugcuggaccucaagaacuacaucgacaagcagcugcugcccaucgucaacaagcagagcugcuccaucagcaacaucgagacggugaucgaguuccagcagaagaacaaccgccuccuggagaucacccgggaguucagcgugaacgcgggggucaccacccccguguccacguacaugcugaccaacagcgagcuccugucccugaucaacgacaugcccaucaccaacgaccagaagaagcucaugagcaacaacgugcagaucguccgccagcaguccuacagcaucauguccaucaucaaggaggaggugcuggccuacgugguccagcugccgcucuacggcgugaucgacacccccugcuggaagcugcacacgagcccccugugcaccaccaacaccaaggagggguccaacaucugccucacgcggaccgaccgcggcugguacugcgacaacgccggcagcgucuccuucuucccccaggccgagaccugcaaggugcagagcaaccggguguucugcgacaccaugaacucccugacgcugccgagcgaggucaaccucugcaacguggacaucuucaaccccaaguacgacugcaagaucaugaccuccaagaccgacgugagcuccagcgucaucaccucccugggggccaucgugagcugcuacggcaagacgaagugcaccgcgagcaacaagaaccgcgggaucaucaagaccuucuccaacggcugcgacuacgugagcaacaagggcgucgacaccguguccguggggaacacccuguacuacgucaacaagcaggagggcaagagccucuacgugaagggggagcccaucaucaacuucuacgacccccugguguucccguccgacgaguucgacgccagcaucucccaggucaacgagaagaucaaccagagccuggccuucauccggaaguccgacgagcuccugcacaacgugaacgccggcaagagcacgaccaacaucaugaucaccaccaucaucaucgugaucaucgucauccugcugucccucaucgccguggggcugcugcucuacugcaaggcgcgcugaggacuaguguccaccugucccuccugggcugcuggauugucucguuuuccugccaaauaaacaggaucagcgcuuuacagaucuaaaaaaaaaaaaaaaaaaaaaaaaaaaaaaaaaaaaaaaaaaaaaaaaaaaaaaaaaaaaaaaaugcaucccccccccccccccccccccccccccccccaaaggcucuuuucagagccaccagaauu

SEQ ID NO: 676 - RNA, 1991 nt, Artificial Sequence
  mRNA product Design e-1 comprising derived and/or modified sequence from HRSV(A2)__F-del (opt2)
gggagaauauaagcguuggcggagcgucgguuguagcacucugcgcgcccgcucuucugcugcuguuugucuacuuccuccugcuuccccgccgccgccgccgccaucaagcuuaccauggagcuccucauccucaaggccaacgccaucaccaccauccucaccgccgucaccuucugcuucgccuccggccagaacaucaccgaggaguucuaccaguccaccugcuccgccgucuccaagggcuaccucuccgcccuccgcaccggcugguacaccuccgucaucaccaucgagcucuccaacaucaaggagaacaagugcaacggcaccgacgccaaggucaagcucaucaagcaggagcucgacaaguacaagaacgccgucaccgagcuccagcuccucaugcaguccacccccgccaccaacaaccgcgcccgccgcgagcucccccgcuucaugaacuacacccucaacaacgccaagaagaccaacgucacccucuccaagaagcgcaagcgccgcuuccucggcuuccuccucggcgucggcuccgccaucgccuccggcgucgccgucuccaagguccuccaccucgagggcgaggucaacaagaucaaguccgcccuccucuccaccaacaaggccgucgucucccucuccaacggcgucuccguccucaccuccaagguccucgaccucaagaacuacaucgacaagcagcuccuccccaucgucaacaagcaguccugcuccaucuccaacaucgagaccgucaucgaguuccagcagaagaacaaccgccuccucgagaucacccgcgaguucuccgucaacgccggcgucaccacccccgucuccaccuacaugcucaccaacuccgagcuccucucccucaucaacgacaugcccaucaccaacgaccagaagaagcucauguccaacaacguccagaucguccgccagcaguccuacuccaucauguccaucaucaaggaggagguccucgccuacgucguccagcucccccucuacggcgucaucgacacccccugcuggaagcuccacaccuccccccucugcaccaccaacaccaaggagggcuccaacaucugccucacccgcaccgaccgcggcugguacugcgacaacgccggcuccgucuccuucuucccccaggccgagaccugcaagguccaguccaaccgcgucuucugcgacaccaugaacucccucacccuccccuccgaggucaaccucugcaacgucgacaucuucaaccccaaguacgacugcaagaucaugaccuccaagaccgacgucuccuccuccgucaucaccucccucggcgccaucgucuccugcuacggcaagaccaagugcaccgccuccaacaagaaccgcggcaucaucaagaccuucuccaacggcugcgacuacgucuccaacaagggcgucgacaccgucuccgucggcaacacccucuacuacgucaacaagcaggagggcaagucccucuacgucaagggcgagcccaucaucaacuucuacgacccccucgucuuccccuccgacgaguucgacgccuccaucucccaggucaacgagaagaucaaccagucccucgccuucauccgcaaguccgacgagcuccuccacaacgucaacgccggcaaguccaccaccaacaucaugaucaccaccaucaucaucgucaucaucgucauccuccucucccucaucgccgucggccuccuccucuacugcaaggcccgcugaggacuaguguccaccugucccuccugggcugcuggauugucucguuuuccugccaaauaaacaggaucagcgcuuuacagaucuaaaaaaaaaaaaaaaaaaaaaaaaaaaaaaaaaaaaaaaaaaaaaaaaaaaaaaaaaaaaaaaaugcaucccccccccccccccccccccccccccccccaaaggcucuuuucagagccaccagaauu

SEQ ID NO: 677 - RNA, 1991 nt, Artificial Sequence
  mRNA product Design e-1 comprising derived and/or modified sequence from HRSV(A2)__F-del (opt3)
gggagaauauaagcguuggcggagcgucgguuguagcacucugcgcgcccgcucuucugcugcuguuugucuacuuccuccugcuuccccgccgccgccgccgccaucaagcuuaccauggagcugcucauccuuaaggccaacgcuauuaccacaauacugacugcagugacguucugcuuugccagcggccagaauaucaccgaagaguucuaccaauccacauguucugcggucucaaaaggguauuugagugcuuuaagaacuggaugguacaccagcguuauuacaaucgaacuguccaacauuaaggagaauaaaugcaacgguaccgacgccaaggugaaacuaaucaagcaggaacucgauaaguauaaaaaugcaguaacugagcugcagcuucugaugcagucuacacccgccaccaacaauagggcucggcgcgaguugccucgauuuaugaacuacacgcucaauaacgcaaagaaaacuaaugugacccugucgaagaaacguaagagaagguuccugggcuuucucuuaggggucggaucagccauagcuagcggcguggccguuaguaaggugcugcaccuugaaggugaggucaacaaaaucaaguccgcguugcugucuacaaauaaagcagugguaagccuauccaacgggguuucagugcucacuucuaagguccuggaccuuaaaaauuauauugauaagcaacuguugccaaucgugaacaaacagagcuguucuauuuccaacaucgaaaccgugauagaguuccagcagaagaauaaccggcuccuggagauuacacgcgaauuuucagucaaugccggaguuaccacgccggugagcacuuacauguuaacaaacagugagcugcucucucuuaucaaugacaugcccauuaccaacgaucaaaagaaacugauguccaauaacguacagaucgugagacagcagagcuauucgaucaugucuauuauaaaggaagaggucuuggcuuacgugguucaacuaccucuguacggcgugaucgacacuccaugcuggaaacuccauacauccccacuguguaccacgaauaccaaggaaggcucaaacauuugccuuacaaggacugaucgggggugguauugugacaaugccggaagugucagcuucuuuccucaggcagagaccugcaaagugcaguccaaccgcguauucugugauacaaugaauagucugacuuugccaagcgagguuaaccucugcaauguggacaucuuuaaccccaaguacgauuguaagauaaugaccucaaaaacagacgucaguuccagcgugauuaccucucugggugcuaucgucucaugcuauggcaagacuaaaugcacggccaguaacaagaaucgagggaucauuaaaacauucagcaacggaugugauuacguguccaauaagggcguugacaccgugucuguagguaacacuuuauauuacgucaauaagcaagaagggaaaucgcuguaugugaagggagagccuaucauuaacuuuuacgacccccuaguuuucccgagcgaugaauuugacgcguccauaucacaggugaaugagaaaaucaaccagagucucgccuucauuagaaagucugaugaacugcuucacaaugucaacgcaggcaaaagcaccacaaauaucaugaucaccacuauuauaaucgugauuaucguaauuuugcugucccucaucgcugugggccugcuucuguacugcaaggccaggugaggacuaguguccaccugucccuccugggcugcuggauugucucguuuuccugccaaauaaacaggaucagcgcuuuacagaucuaaaaaaaaaaaaaaaaaaaaaaaaaaaaaaaaaaaaaaaaaaaaaaaaaaaaaaaaaaaaaaaaugcaucccccccccccccccccccccccccccccccaaaggcucuuuucagagccaccagaauu

SEQ ID NO: 678 - RNA, 1991 nt, Artificial Sequence
  mRNA product Design e-1 comprising derived and/or modified sequence from HRSV(A2)__F-del (opt4)
gggagaauauaagcguuggcggagcgucgguuguagcacucugcgcgcccgcucuucugcugcuguuugucuacuuccuccugcuuccccgccgccgccgccgccaucaagcuuaccauggagcugcugauccugaaggccaacgccaucaccaccauccugaccgccgugaccuucugcuucgccagcggccagaacaucaccgaggaguucuaccagagcaccugcagcgccgugagcaagggcuaccugagcgcccugagaaccggcugguacaccagcgugaucaccaucgagcugagcaacaucaaggagaacaagugcaacggcaccgacgccaaggugaagcugaucaagcaggagcuggacaaguacaagaacgccgugaccgagcugcagcugcugaugcagagcacccccgccaccaacaacagagccagaagagagcugcccagauucaugaacuacacccugaacaacgccaagaagaccaacgugacccugagcaagaagagaaagagaagauuccugggcuuccugcugggcgugggcagcgccaucgccagcggcguggccgugagcaaggugcugcaccuggagggcgaggugaacaagaucaagagcgcccugcugagcaccaacaaggccguggugagccugagcaacggcgugagcgugcugaccagcaaggugcuggaccugaagaacuacaucgacaagcagcugcugcccaucgugaacaagcagagcugcagcaucagcaacaucgagaccgugaucgaguuccagcagaagaacaacagacugcuggagaucaccagagaguucagcgugaacgccggcgugaccacccccgugagcaccuacaugcugaccaacagcgagcugcugagccugaucaacgacaugcccaucaccaacgaccagaagaagcugaugagcaacaacgugcagaucgugagacagcagagcuacagcaucaugagcaucaucaaggaggaggugcuggccuacguggugcagcugccccuguacggcgugaucgacacccccugcuggaagcugcacaccagcccccugugcaccaccaacaccaaggagggcagcaacaucugccugaccagaaccgacagaggcugguacugcgacaacgccggcagcgugagcuucuucccccaggccgagaccugcaaggugcagagcaacagaguguucugcgacaccaugaacagccugacccugcccagcgaggugaaccugugcaacguggacaucuucaaccccaaguacgacugcaagaucaugaccagcaagaccgacgugagcagcagcgugaucaccagccugggcgccaucgugagcugcuacggcaagaccaagugcaccgccagcaacaagaacagaggcaucaucaagaccuucagcaacggcugcgacuacgugagcaacaagggcguggacaccgugagcgugggcaacacccuguacuacgugaacaagcaggagggcaagagccuguacgugaagggcgagcccaucaucaacuucuacgacccccugguguuccccagcgacgaguucgacgccagcaucagccaggugaacgagaagaucaaccagagccuggccuucaucagaaagagcgacgagcugcugcacaacgugaacgccggcaagagcaccaccaacaucaugaucaccaccaucaucaucgugaucaucgugauccugcugagccugaucgccgugggccugcugcuguacugcaaggccagaugaggacuaguguccaccugucccuccugggcugcuggauugucucguuuuccugccaaauaaacaggaucagcgcuuuacagaucuaaaaaaaaaaaaaaaaaaaaaaaaaaaaaaaaaaaaaaaaaaaaaaaaaaaaaaaaaaaaaaaaugcaucccccccccccccccccccccccccccccccaaaggcucuuuucagagccaccagaauu

SEQ ID NO: 679 - RNA, 1991 nt, Artificial Sequence
  mRNA product Design e-1 comprising derived and/or modified sequence from HRSV(A2)__F-del (opt5)
gggagaauauaagcguuggcggagcgucgguuguagcacucugcgcgcccgcucuucugcugcuguuugucuacuuccuccugcuuccccgccgccgccgccgccaucaagcuuaccauggagcugcucauccugaaggccaacgcuauuaccacaauccuuacggccgugaccuucugcuuugcgagcggccagaauauuacagaagaguucuaccaauccaccuguucugcugucagcaaaggguaucuguccgcccucagaacaggaugguacaccucuguuaucacaauugaacugagcaacaucaaggagaauaaaugcaacggcaccgacgccaaggugaaacuuaucaagcaggaacuggauaaguauaaaaaugcugugacggagcuccagcugcugaugcaguccacccccgccacaaacaaucgggcucgcagagagcucccucgguuuaugaacuacacccugaauaacgccaagaaaacaaaugucacccuuucuaagaaacgcaagagacgguuccugggguuucuccugggagugggcagcgcgauugccuccgggguugcugugagcaagguccuucaccuggaaggagaggugaacaaaaucaagucugcccuccuguccacgaauaaagcuguugugagccugucuaacggcgucuccgugcucacaagcaaggugcuggaccuuaaaaauuauauugauaagcaacugcucccgaucgucaacaaacagucuuguuccauuagcaacaucgaaaccguuauugaguuccagcagaagaauaaccgccugcuugagaucacaagagaauuuuccgugaaugccggcgugaccacccccgucucuacauacaugcugacgaacagcgagcuccugucccugaucaaugacaugccuauuaccaacgaucaaaagaaacucaugagcaauaacgugcagaucguucggcagcagucuuauuccauuaugagcaucauuaaggaagaggugcuggcguacgucgugcaacuuccccuguacgggguuaucgacacaccuugcuggaaacuccauaccucuccccuguguacaaccaauacgaaggaaggaagcaacaucugccuuacacgcaccgauagaggcugguauugugacaaugccggguccgugucuuucuuuccucaggcugagaccugcaaaguccagagcaaccggguguucugugauacaaugaacucccugacccucccgagcgaggucaaucugugcaauguggacauuuuuaaccccaaguacgauuguaagaucaugacaucuaaaacggacguuuccagcucugugauuaccucccugggagccaucgucagcugcuauggcaagacaaaaugcaccgcuuccaacaagaaucgcgggauuaucaaaacauucucuaacggaugugauuacgugagcaauaagggcguugacaccguguccgucggcaacacgcucuauuacgugaauaagcaagaagggaaaucucuguaugugaagggagagccuaucauuaacuuuuacgacccccuuguuuucccuagcgaugaauuugacgccuccaucagccaggucaaugagaaaauuaaccagucucuggccuucaucagaaaguccgaugaacuccugcacaaugugaacgcuggcaaaagcaccacaaauauuaugaucaccacaauuaucaucgugauuaucgucauucugcuuucucucaucgcgguggggcugcugcucuacugcaaggcccggugaggacuaguguccaccugucccuccugggcugcuggauugucucguuuuccugccaaauaaacaggaucagcgcuuuacagaucuaaaaaaaaaaaaaaaaaaaaaaaaaaaaaaaaaaaaaaaaaaaaaaaaaaaaaaaaaaaaaaaaugcaucccccccccccccccccccccccccccccccaaaggcucuuuucagagccaccagaauu

SEQ ID NO: 680 - RNA, 1991 nt, Artificial Sequence
  mRNA product Design e-1 comprising derived and/or modified sequence from HRSV(A2)__F-del (opt6)
gggagaauauaagcguuggcggagcgucgguuguagcacucugcgcgcccgcucuucugcugcuguuugucuacuuccuccugcuuccccgccgccgccgccgccaucaagcuuaccauggaauuacuaauacucaaagccaacgcaauaacaacaauacuaacagcaguaacauucugcuucgcaucaggacaaaacaucacagaagaauuuuaccaaaguacaugcagugcagucucuaaaggauaccucagugccuuacgcacaggaugguacacaucaguaauaacaaucgaacuuucaaacauaaaagaaaacaaaugcaauggaaccgacgccaaaguaaaacuaaucaaacaagaacuagacaaauauaaaaaugcaguaacagaauuacaacuccuaaugcaauccacaccagcaacaaauaacagagcaagacgagaacucccucgauucaugaauuacacauuaaacaacgcaaaaaaaacuaacguaacuuuaucaaaaaaaagaaaacguagauuucuaggauuccuacuaggcguaggguccgccauugcaucaggaguagcaguuagcaaaguauuacauuuagaaggagaaguaaauaaaaucaaaagcgcacuacucucaaccaacaaagcaguaguaucacucucaaacggaguaucaguacuaacauccaaaguacucgaccucaaaaacuacauagacaaacaauuacuacccauaguaaacaaacaaucaugcucuauaucaaauaucgaaacaguaaucgaauuucaacaaaaaaacaaucgacuacuugaaauaacaagagaguucuccgucaaugccggagucaccacaccagucucaacauacaugcuaaccaacucugaacuccuaucacuaauaaaugacaugccaauaacaaacgaccaaaaaaaacuaaugucaaauaacguacaaauaguacgacaacaaaguuauuccauaaugaguauaaucaaagaagaaguguuagcauacguaguccaacuaccauuauauggaguaauagacacaccauguuggaaauuacacaccucaccacucugcacuaccaauacaaaagaaggcucaaauauaugccuaacucgcacagacagaggcugguacugcgauaacgcaggauccguaucuuucuuuccccaagcagaaacuugcaaaguacaaucaaacagagucuucugcgacaccaugaauagucucacauuaccaucugaaguaaaccuauguaacguagauauauucaauccaaaauacgacugcaaaauaaugacaucaaaaaccgacgucucuagcaguguaaucacaucacuaggagcaauaguaagcugcuauggaaaaacaaaauguacagcaucaaacaaaaacaggggaauaauaaaaaccuucucaaacggaugugacuacguaucaaauaaaggcguagacacaguaagcguaggaaacacccuauacuacguuaacaaacaagaagggaaaucauuauacguaaaaggagaaccaauaauaaacuucuacgauccacucguauucccauccgacgaauuugacgccagcauaucccaaguuaacgaaaaaauaaaccaaucacuugcauuuauacgaaaaucugaugaacuucuccacaacguaaaugcaggaaaauccaccaccaauauaaugaucacaacuaucaucauaguaauaaucgucauuuuacuaucauuaauagcaguuggccuacuucuauacugcaaagcaagauaaggacuaguguccaccugucccuccugggcugcuggauugucucguuuuccugccaaauaaacaggaucagcgcuuuacagaucuaaaaaaaaaaaaaaaaaaaaaaaaaaaaaaaaaaaaaaaaaaaaaaaaaaaaaaaaaaaaaaaaugcaucccccccccccccccccccccccccccccccaaaggcucuuuucagagccaccagaauu

SEQ ID NO: 681 - RNA, 1991 nt, Artificial Sequence
  mRNA product Design e-1 comprising derived and/or modified sequence from HRSV(A2)__F-del (opt11)
gggagaauauaagcguuggcggagcgucgguuguagcacucugcgcgcccgcucuucugcugcuguuugucuacuuccuccugcuuccccgccgccgccgccgccaucaagcuuaccauggaacuacuaauccuaaaagccaacgcgaucaccaccauccuaacggcagucaccuucugcuucgcaucaggccaaaacaucacagaagaguucuaccaaagcacaugcuccgccguauccaaaggcuaccucagcgcccuacgcacaggcugguacacaucugucaucaccauagaacucuccaacaucaaagaaaacaaaugcaacggcacugacgccaaaguaaagcugaucaaacaagaacucgacaaauacaaaaacgcagucaccgaacuccaacuacucaugcaauccaccccugcaaccaacaacagggcccgccgcgaacucccccgcuucaugaacuacacuuuaaacaacgccaaaaagaccaacgucacacucagcaagaaacggaaacgacgauuccuaggguuucuccuaggcgucggcucggcaaucgccuccggcgucgccguaagcaaaguacuacaccuagaaggcgaagugaacaaaaucaaaagugcccuucucuccaccaacaaggccguagucucucuauccaacggagucucaguccucaccucaaagguccucgaccucaaaaacuacaucgacaaacaacuacuccccauugucaacaagcagucaugcuccauaucaaacaucgaaaccgucaucgaguuccaacagaaaaacaaccgacuccucgaaauaaccagagaguucucggucaacgccggcgucaccaccccagucagcaccuacaugcucacuaacuccgaacuccuaucccucaucaacgacaugccaauuaccaacgaccaaaagaaacuaaugucgaacaacguucaaaucguccgacaacaaaguuacuccaucaugagcauaaucaaagaagaaguucuagcguacgucguccaacucccacuauacggcgucaucgacacuccgugcuggaaacuccacacaucaccccuauguacaaccaacacaaaagaaggcagcaacaucugccucacccgcaccgaccgagggugguauugcgauaacgcuggcagcgucuccuucuucccccaagccgaaaccugcaaaguccaaucaaacagaguauucugcgacaccaugaacucccuuacucucccuagcgaagucaaccucugcaacguugacauauucaaccccaaauacgacugcaaaaucaugaccuccaagaccgacgucuccuccuccgucaucacaucucuaggugccauugucuccugcuacggaaaaaccaaaugcacagccuccaacaaaaaccgcggcaucauaaaaaccuucuccaacggcugcgacuacgucaguaauaaaggcgucgacacgguauccguugggaauacgcuuuacuacguaaauaaacaagaaggcaaaucccucuacgucaaaggugaacccaucauaaacuucuacgacccgcuuguguucccauccgacgaguucgacgccagcaucagccaggucaacgaaaagaucaaccaaucccuagccuucauccgcaaaagcgacgaacuacuacacaacgucaacgccggaaaauccacaaccaacaucaugaucaccaccaucaucaucgucaucaucguaauccuacucucucucaucgccgucggccuccuacuguacuguaaagcccgauagggacuaguguccaccugucccuccugggcugcuggauugucucguuuuccugccaaauaaacaggaucagcgcuuuacagaucuaaaaaaaaaaaaaaaaaaaaaaaaaaaaaaaaaaaaaaaaaaaaaaaaaaaaaaaaaaaaaaaaugcaucccccccccccccccccccccccccccccccaaaggcucuuuucagagccaccagaauu

SEQ ID NO: 682 - RNA, 1973 nt, Artificial Sequence
  mRNA product Design e-2 comprising derived and/or modified sequence from HRSV(A2)__F-del (artificial)
gggagacccgugacccggaaguuguacggcuacgcgacuuucccucccacaaacccucgcgcccuuccuuuccuacuugggcccggcagaaagcuuaccauggaguugcuaauccucaaagcaaaugcaauuaccacaauccucacugcagucacauuuuguuuugcuucuggucaaaacaucacugaagaauuuuaucaaucaacaugcagugcaguuagcaaaggcuaucuuagugcucugagaacugguugguauaccaguguuauaacuauagaauuaaguaauaucaaggaaaauaaguguaauggaacagaugcuaagguaaaauugauaaaacaagaauuagauaaauauaaaaaugcuguaacagaauugcaguugcucaugcaaagcacaccagcaacaaacaaucgagccagaagagaacuaccaagguuuaugaauuauacacucaacaaugccaaaaaaaccaauguaacauuaagcaagaaaaggaaaagaagauuucuugguuuuuuguuagguguuggaucugcaaucgccaguggcguugcuguaucuaagguccugcaccuagaaggggaagugaacaagaucaaaagugcucuacuauccacaaacaaggcuguagucagcuuaucaaauggaguuagugucuuaaccagcaaaguguuagaccucaaaaacuauauagauaaacaauuguuaccuauugugaacaagcaaagcugcagcauaucaaauauagaaacugugauagaguuccaacaaaagaacaacagacuacuagagauuaccagggaauuuaguguuaaugcagguguaacuacaccuguaagcacuuacauguuaacuaauagugaauuauugucauuaaucaaugauaugccuauaacaaaugaucagaaaaaguuaauguccaacaauguucaaauaguuagacagcaaaguuacucuaucauguccauaauaaaagaggaagucuuagcauauguaguacaauuaccacuauaugguguuauagauacacccuguuggaaacuacacacauccccucuauguacaaccaacacaaaagaaggguccaacaucuguuuaacaagaacugacagaggaugguacugugacaaugcaggaucaguaucuuucuucccacaagcugaaacauguaaaguucaaucaaaucgaguauuuugugacacaaugaacaguuuaacauuaccaagugaaguaaaucucugcaauguugacauauucaaccccaaauaugauuguaaaauuaugacuucaaaaacagauguaagcagcuccguuaucacaucucuaggagccauugugucaugcuauggcaaaacuaaauguacagcauccaauaaaaaucguggaaucauaaagacauuuucuaacgggugcgauuauguaucaaauaaagggguggacacugugucuguagguaacacauuauauuauguaaauaagcaagaagguaaaagucucuauguaaaaggugaaccaauaauaaauuucuaugacccauuaguauuccccucugaugaauuugaugcaucaauaucucaagucaacgagaagauuaaccagagccuagcauuuauucguaaauccgaugaauuauuacauaauguaaaugcugguaaauccaccacaaauaucaugauaacuacuauaauuauagugauuauaguaauauuguuaucauuaauugcuguuggacugcucuuauacuguaaggccagauaaggacuaguguccaccugucccuccugggcugcuggauugucucguuuuccugccaaauaaacaggaucagcgcuuuacagaucuaaaaaaaaaaaaaaaaaaaaaaaaaaaaaaaaaaaaaaaaaaaaaaaaaaaaaaaaaaaaaaaaugcaucccccccccccccccccccccccccccccccaaaggcucuuuucagagccaccagaauu

SEQ ID NO: 683 - RNA, 1973 nt, Artificial Sequence
  mRNA product Design e-2 comprising derived and/or modified sequence from HRSV(A2)__F-del (opt1)
gggagacccgugacccggaaguuguacggcuacgcgacuuucccucccacaaacccucgcgcccuuccuuuccuacuugggcccggcagaaagcuuaccauggagcugcucauccugaaggccaacgccaucaccaccauccugacggcggugaccuucugcuucgccagcggccagaacaucaccgaggaguucuaccaguccaccugcagcgccgucuccaagggguaccucagcgcccugcggacgggcugguacaccuccgugaucaccaucgagcugagcaacaucaaggagaacaagugcaacgggaccgacgccaaggugaagcucaucaagcaggagcuggacaaguacaagaacgcggucacggagcugcagcuccugaugcaguccaccccggcaaccaacaaccgcgcccggcgcgagcugccccgguucaugaacuacacccucaacaacgccaagaagacgaacgugacccugagcaagaagcgcaagcggcgcuuccugggcuuccuccugggggugggcuccgccaucgcgagcggcgucgccguguccaaggugcugcaccucgagggggaggucaacaagaucaagagcgcccugcuguccaccaacaaggccguggugagccucuccaacggcgucagcgugcugaccuccaaggugcuggaccucaagaacuacaucgacaagcagcugcugcccaucgucaacaagcagagcugcuccaucagcaacaucgagacggugaucgaguuccagcagaagaacaaccggcuccuggagaucacccgcgaguucagcgugaacgccggggucaccacccccguguccacguacaugcugaccaacagcgagcuccugucccugaucaacgacaugccgaucaccaacgaccagaagaagcucaugagcaacaacgugcagaucguccggcagcaguccuacagcaucauguccaucaucaaggaggaggugcuggcguacgugguccagcugccccucuacggcgugaucgacacccccugcuggaagcugcacacgagcccccugugcaccaccaacaccaaggagggguccaacaucugccucacgcgcaccgaccggggcugguacugcgacaacgccggcagcgucuccuucuucccgcaggccgagaccugcaaggugcagagcaaccgcguguucugcgacaccaugaacucccugacgcugcccagcgagguaaaccucugcaacgucgacaucuucaaccccaaguacgacugcaagaucaugaccuccaagaccgacgugagcuccagcgugaucaccucccugggggccaucgucagcugcuacggcaagacgaagugcaccgccagcaacaagaaccgggggaucaucaagaccuucuccaacggcugcgacuacgugagcaacaagggcguggacaccguguccgucgggaacacccuguacuacgugaacaagcaggagggcaagagccucuacgugaagggggagcccaucaucaacuucuacgacccgcuggucuuccccuccgacgaguucgacgcgagcaucucccaggugaacgagaagaucaaccagagccuggccuucauccgcaaguccgacgagcugcuccacaacgugaacgccggcaagagcacgaccaacaucaugaucaccaccaucaucaucgucaucaucgugauccugcugucccucaucgccguggggcugcugcucuacugcaaggcccggugaggacuaguguccaccugucccuccugggcugcuggauugucucguuuuccugccaaauaaacaggaucagcgcuuuacagaucuaaaaaaaaaaaaaaaaaaaaaaaaaaaaaaaaaaaaaaaaaaaaaaaaaaaaaaaaaaaaaaaaugcaucccccccccccccccccccccccccccccccaaaggcucuuuucagagccaccagaauu

SEQ ID NO: 684 - RNA, 1973 nt, Artificial Sequence
  mRNA product Design e-2 comprising derived and/or modified sequence from HRSV(A2)__F-del (opt1)
gggagacccgugacccggaaguuguacggcuacgcgacuuucccucccacaaacccucgcgcccuuccuuuccuacuugggcccggcagaaagcuuaccauggagcugcucauccugaaggccaacgccaucaccaccauccugacggcggugaccuucugcuucgccagcggccagaacaucaccgaggaguucuaccaguccacgugcagcgccgucuccaagggguaccucagcgcccugcgcaccggcugguacaccuccgugaucaccaucgagcugagcaacaucaaggagaacaagugcaacgggaccgacgccaaggugaagcucaucaagcaggagcuggacaaguacaagaacgcggucacggagcugcagcuccugaugcaguccacccccgccaccaacaaccgggcccgccgggagcugccgcgcuucaugaacuacacccucaacaacgccaagaagacgaacgugacccugagcaagaagcggaagcgccgguuccugggcuuccuccugggggugggcuccgcgaucgccagcggcgucgccguguccaaggugcugcaccucgagggggaggucaacaagaucaagagcgcccugcuguccaccaacaaggccguggugagccucuccaacggcgucagcgugcugaccuccaaggugcuggaccucaagaacuacaucgacaagcagcugcugcccaucgucaacaagcagagcugcuccaucagcaacaucgagacggugaucgaguuccagcagaagaacaaccgccuccuggagaucacccgggaguucagcgugaacgcgggggucaccacccccguguccacguacaugcugaccaacagcgagcuccugucccugaucaacgacaugcccaucaccaacgaccagaagaagcucaugagcaacaacgugcagaucguccgccagcaguccuacagcaucauguccaucaucaaggaggaggugcuggccuacgugguccagcugccgcucuacggcgugaucgacacccccugcuggaagcugcacacgagcccccugugcaccaccaacaccaaggagggguccaacaucugccucacgcggaccgaccgcggcugguacugcgacaacgccggcagcgucuccuucuucccccaggccgagaccugcaaggugcagagcaaccggguguucugcgacaccaugaacucccugacgcugccgagcgaggucaaccucugcaacguggacaucuucaaccccaaguacgacugcaagaucaugaccuccaagaccgacgugagcuccagcgucaucaccucccugggggccaucgugagcugcuacggcaagacgaagugcaccgcgagcaacaagaaccgcgggaucaucaagaccuucuccaacggcugcgacuacgugagcaacaagggcgucgacaccguguccguggggaacacccuguacuacgucaacaagcaggagggcaagagccucuacgugaagggggagcccaucaucaacuucuacgacccccugguguucccguccgacgaguucgacgccagcaucucccaggucaacgagaagaucaaccagagccuggccuucauccggaaguccgacgagcuccugcacaacgugaacgccggcaagagcacgaccaacaucaugaucaccaccaucaucaucgugaucaucgucauccugcugucccucaucgccguggggcugcugcucuacugcaaggcgcgcugaggacuaguguccaccugucccuccugggcugcuggauugucucguuuuccugccaaauaaacaggaucagcgcuuuacagaucuaaaaaaaaaaaaaaaaaaaaaaaaaaaaaaaaaaaaaaaaaaaaaaaaaaaaaaaaaaaaaaaaugcaucccccccccccccccccccccccccccccccaaaggcucuuuucagagccaccagaauu

SEQ ID NO: 685 - RNA, 1973 nt, Artificial Sequence
  mRNA product Design e-2 comprising derived and/or modified sequence from HRSV(A2)__F-del (opt2)
gggagacccgugacccggaaguuguacggcuacgcgacuuucccucccacaaacccucgcgcccuuccuuuccuacuugggcccggcagaaagcuuaccauggagcuccucauccucaaggccaacgccaucaccaccauccucaccgccgucaccuucugcuucgccuccggccagaacaucaccgaggaguucuaccaguccaccugcuccgccgucuccaagggcuaccucuccgcccuccgcaccggcugguacaccuccgucaucaccaucgagcucuccaacaucaaggagaacaagugcaacggcaccgacgccaaggucaagcucaucaagcaggagcucgacaaguacaagaacgccgucaccgagcuccagcuccucaugcaguccacccccgccaccaacaaccgcgcccgccgcgagcucccccgcuucaugaacuacacccucaacaacgccaagaagaccaacgucacccucuccaagaagcgcaagcgccgcuuccucggcuuccuccucggcgucggcuccgccaucgccuccggcgucgccgucuccaagguccuccaccucgagggcgaggucaacaagaucaaguccgcccuccucuccaccaacaaggccgucgucucccucuccaacggcgucuccguccucaccuccaagguccucgaccucaagaacuacaucgacaagcagcuccuccccaucgucaacaagcaguccugcuccaucuccaacaucgagaccgucaucgaguuccagcagaagaacaaccgccuccucgagaucacccgcgaguucuccgucaacgccggcgucaccacccccgucuccaccuacaugcucaccaacuccgagcuccucucccucaucaacgacaugcccaucaccaacgaccagaagaagcucauguccaacaacguccagaucguccgccagcaguccuacuccaucauguccaucaucaaggaggagguccucgccuacgucguccagcucccccucuacggcgucaucgacacccccugcuggaagcuccacaccuccccccucugcaccaccaacaccaaggagggcuccaacaucugccucacccgcaccgaccgcggcugguacugcgacaacgccggcuccgucuccuucuucccccaggccgagaccugcaagguccaguccaaccgcgucuucugcgacaccaugaacucccucacccuccccuccgaggucaaccucugcaacgucgacaucuucaaccccaaguacgacugcaagaucaugaccuccaagaccgacgucuccuccuccgucaucaccucccucggcgccaucgucuccugcuacggcaagaccaagugcaccgccuccaacaagaaccgcggcaucaucaagaccuucuccaacggcugcgacuacgucuccaacaagggcgucgacaccgucuccgucggcaacacccucuacuacgucaacaagcaggagggcaagucccucuacgucaagggcgagcccaucaucaacuucuacgacccccucgucuuccccuccgacgaguucgacgccuccaucucccaggucaacgagaagaucaaccagucccucgccuucauccgcaaguccgacgagcuccuccacaacgucaacgccggcaaguccaccaccaacaucaugaucaccaccaucaucaucgucaucaucgucauccuccucucccucaucgccgucggccuccuccucuacugcaaggcccgcugaggacuaguguccaccugucccuccugggcugcuggauugucucguuuuccugccaaauaaacaggaucagcgcuuuacagaucuaaaaaaaaaaaaaaaaaaaaaaaaaaaaaaaaaaaaaaaaaaaaaaaaaaaaaaaaaaaaaaaaugcaucccccccccccccccccccccccccccccccaaaggcucuuuucagagccaccagaauu

SEQ ID NO: 686 - RNA, 1973 nt, Artificial Sequence
  mRNA product Design e-2 comprising derived and/or modified sequence from HRSV(A2)__F-del (opt3)
gggagacccgugacccggaaguuguacggcuacgcgacuuucccucccacaaacccucgcgcccuuccuuuccuacuugggcccggcagaaagcuuaccauggagcugcucauccuuaaggccaacgcuauuaccacaauacugacugcagugacguucugcuuugccagcggccagaauaucaccgaagaguucuaccaauccacauguucugcggucucaaaaggguauuugagugcuuuaagaacuggaugguacaccagcguuauuacaaucgaacuguccaacauuaaggagaauaaaugcaacgguaccgacgccaaggugaaacuaaucaagcaggaacucgauaaguauaaaaaugcaguaacugagcugcagcuucugaugcagucuacacccgccaccaacaauagggcucggcgcgaguugccucgauuuaugaacuacacgcucaauaacgcaaagaaaacuaaugugacccugucgaagaaacguaagagaagguuccugggcuuucucuuaggggucggaucagccauagcuagcggcguggccguuaguaaggugcugcaccuugaaggugaggucaacaaaaucaaguccgcguugcugucuacaaauaaagcagugguaagccuauccaacgggguuucagugcucacuucuaagguccuggaccuuaaaaauuauauugauaagcaacuguugccaaucgugaacaaacagagcuguucuauuuccaacaucgaaaccgugauagaguuccagcagaagaauaaccggcuccuggagauuacacgcgaauuuucagucaaugccggaguuaccacgccggugagcacuuacauguuaacaaacagugagcugcucucucuuaucaaugacaugcccauuaccaacgaucaaaagaaacugauguccaauaacguacagaucgugagacagcagagcuauucgaucaugucuauuauaaaggaagaggucuuggcuuacgugguucaacuaccucuguacggcgugaucgacacuccaugcuggaaacuccauacauccccacuguguaccacgaauaccaaggaaggcucaaacauuugccuuacaaggacugaucgggggugguauugugacaaugccggaagugucagcuucuuuccucaggcagagaccugcaaagugcaguccaaccgcguauucugugauacaaugaauagucugacuuugccaagcgagguuaaccucugcaauguggacaucuuuaaccccaaguacgauuguaagauaaugaccucaaaaacagacgucaguuccagcgugauuaccucucugggugcuaucgucucaugcuauggcaagacuaaaugcacggccaguaacaagaaucgagggaucauuaaaacauucagcaacggaugugauuacguguccaauaagggcguugacaccgugucuguagguaacacuuuauauuacgucaauaagcaagaagggaaaucgcuguaugugaagggagagccuaucauuaacuuuuacgacccccuaguuuucccgagcgaugaauuugacgcguccauaucacaggugaaugagaaaaucaaccagagucucgccuucauuagaaagucugaugaacugcuucacaaugucaacgcaggcaaaagcaccacaaauaucaugaucaccacuauuauaaucgugauuaucguaauuuugcugucccucaucgcugugggccugcuucuguacugcaaggccaggugaggacuaguguccaccugucccuccugggcugcuggauugucucguuuuccugccaaauaaacaggaucagcgcuuuacagaucuaaaaaaaaaaaaaaaaaaaaaaaaaaaaaaaaaaaaaaaaaaaaaaaaaaaaaaaaaaaaaaaaugcaucccccccccccccccccccccccccccccccaaaggcucuuuucagagccaccagaauu

SEQ ID NO: 687 - RNA, 1973 nt, Artificial Sequence
  mRNA product Design e-2 comprising derived and/or modified sequence from HRSV(A2)__F-del (opt4)
gggagacccgugacccggaaguuguacggcuacgcgacuuucccucccacaaacccucgcgcccuuccuuuccuacuugggcccggcagaaagcuuaccauggagcugcugauccugaaggccaacgccaucaccaccauccugaccgccgugaccuucugcuucgccagcggccagaacaucaccgaggaguucuaccagagcaccugcagcgccgugagcaagggcuaccugagcgcccugagaaccggcugguacaccagcgugaucaccaucgagcugagcaacaucaaggagaacaagugcaacggcaccgacgccaaggugaagcugaucaagcaggagcuggacaaguacaagaacgccgugaccgagcugcagcugcugaugcagagcacccccgccaccaacaacagagccagaagagagcugcccagauucaugaacuacacccugaacaacgccaagaagaccaacgugacccugagcaagaagagaaagagaagauuccugggcuuccugcugggcgugggcagcgccaucgccagcggcguggccgugagcaaggugcugcaccuggagggcgaggugaacaagaucaagagcgcccugcugagcaccaacaaggccguggugagccugagcaacggcgugagcgugcugaccagcaaggugcuggaccugaagaacuacaucgacaagcagcugcugcccaucgugaacaagcagagcugcagcaucagcaacaucgagaccgugaucgaguuccagcagaagaacaacagacugcuggagaucaccagagaguucagcgugaacgccggcgugaccacccccgugagcaccuacaugcugaccaacagcgagcugcugagccugaucaacgacaugcccaucaccaacgaccagaagaagcugaugagcaacaacgugcagaucgugagacagcagagcuacagcaucaugagcaucaucaaggaggaggugcuggccuacguggugcagcugccccuguacggcgugaucgacacccccugcuggaagcugcacaccagcccccugugcaccaccaacaccaaggagggcagcaacaucugccugaccagaaccgacagaggcugguacugcgacaacgccggcagcgugagcuucuucccccaggccgagaccugcaaggugcagagcaacagaguguucugcgacaccaugaacagccugacccugcccagcgaggugaaccugugcaacguggacaucuucaaccccaaguacgacugcaagaucaugaccagcaagaccgacgugagcagcagcgugaucaccagccugggcgccaucgugagcugcuacggcaagaccaagugcaccgccagcaacaagaacagaggcaucaucaagaccuucagcaacggcugcgacuacgugagcaacaagggcguggacaccgugagcgugggcaacacccuguacuacgugaacaagcaggagggcaagagccuguacgugaagggcgagcccaucaucaacuucuacgacccccugguguuccccagcgacgaguucgacgccagcaucagccaggugaacgagaagaucaaccagagccuggccuucaucagaaagagcgacgagcugcugcacaacgugaacgccggcaagagcaccaccaacaucaugaucaccaccaucaucaucgugaucaucgugauccugcugagccugaucgccgugggccugcugcuguacugcaaggccagaugaggacuaguguccaccugucccuccugggcugcuggauugucucguuuuccugccaaauaaacaggaucagcgcuuuacagaucuaaaaaaaaaaaaaaaaaaaaaaaaaaaaaaaaaaaaaaaaaaaaaaaaaaaaaaaaaaaaaaaaugcaucccccccccccccccccccccccccccccccaaaggcucuuuucagagccaccagaauu

SEQ ID NO: 688 - RNA, 1973 nt, Artificial Sequence
  mRNA product Design e-2 comprising derived and/or modified sequence from HRSV(A2)__F-del (opt5)
gggagacccgugacccggaaguuguacggcuacgcgacuuucccucccacaaacccucgcgcccuuccuuuccuacuugggcccggcagaaagcuuaccauggagcugcucauccugaaggccaacgcuauuaccacaauccuuacggccgugaccuucugcuuugcgagcggccagaauauuacagaagaguucuaccaauccaccuguucugcugucagcaaaggguaucuguccgcccucagaacaggaugguacaccucuguuaucacaauugaacugagcaacaucaaggagaauaaaugcaacggcaccgacgccaaggugaaacuuaucaagcaggaacuggauaaguauaaaaaugcugugacggagcuccagcugcugaugcaguccacccccgccacaaacaaucgggcucgcagagagcucccucgguuuaugaacuacacccugaauaacgccaagaaaacaaaugucacccuuucuaagaaacgcaagagacgguuccugggguuucuccugggagugggcagcgcgauugccuccgggguugcugugagcaagguccuucaccuggaaggagaggugaacaaaaucaagucugcccuccuguccacgaauaaagcuguugugagccugucuaacggcgucuccgugcucacaagcaaggugcuggaccuuaaaaauuauauugauaagcaacugcucccgaucgucaacaaacagucuuguuccauuagcaacaucgaaaccguuauugaguuccagcagaagaauaaccgccugcuugagaucacaagagaauuuuccgugaaugccggcgugaccacccccgucucuacauacaugcugacgaacagcgagcuccugucccugaucaaugacaugccuauuaccaacgaucaaaagaaacucaugagcaauaacgugcagaucguucggcagcagucuuauuccauuaugagcaucauuaaggaagaggugcuggcguacgucgugcaacuuccccuguacgggguuaucgacacaccuugcuggaaacuccauaccucuccccuguguacaaccaauacgaaggaaggaagcaacaucugccuuacacgcaccgauagaggcugguauugugacaaugccggguccgugucuuucuuuccucaggcugagaccugcaaaguccagagcaaccggguguucugugauacaaugaacucccugacccucccgagcgaggucaaucugugcaauguggacauuuuuaaccccaaguacgauuguaagaucaugacaucuaaaacggacguuuccagcucugugauuaccucccugggagccaucgucagcugcuauggcaagacaaaaugcaccgcuuccaacaagaaucgcgggauuaucaaaacauucucuaacggaugugauuacgugagcaauaagggcguugacaccguguccgucggcaacacgcucuauuacgugaauaagcaagaagggaaaucucuguaugugaagggagagccuaucauuaacuuuuacgacccccuuguuuucccuagcgaugaauuugacgccuccaucagccaggucaaugagaaaauuaaccagucucuggccuucaucagaaaguccgaugaacuccugcacaaugugaacgcuggcaaaagcaccacaaauauuaugaucaccacaauuaucaucgugauuaucgucauucugcuuucucucaucgcgguggggcugcugcucuacugcaaggcccggugaggacuaguguccaccugucccuccugggcugcuggauugucucguuuuccugccaaauaaacaggaucagcgcuuuacagaucuaaaaaaaaaaaaaaaaaaaaaaaaaaaaaaaaaaaaaaaaaaaaaaaaaaaaaaaaaaaaaaaaugcaucccccccccccccccccccccccccccccccaaaggcucuuuucagagccaccagaauu

SEQ ID NO: 689 - RNA, 1973 nt, Artificial Sequence
  mRNA product Design e-2 comprising derived and/or modified sequence from HRSV(A2)__F-del (opt6)
gggagacccgugacccggaaguuguacggcuacgcgacuuucccucccacaaacccucgcgcccuuccuuuccuacuugggcccggcagaaagcuuaccauggaauuacuaauacucaaagccaacgcaauaacaacaauacuaacagcaguaacauucugcuucgcaucaggacaaaacaucacagaagaauuuuaccaaaguacaugcagugcagucucuaaaggauaccucagugccuuacgcacaggaugguacacaucaguaauaacaaucgaacuuucaaacauaaaagaaaacaaaugcaauggaaccgacgccaaaguaaaacuaaucaaacaagaacuagacaaauauaaaaaugcaguaacagaauuacaacuccuaaugcaauccacaccagcaacaaauaacagagcaagacgagaacucccucgauucaugaauuacacauuaaacaacgcaaaaaaaacuaacguaacuuuaucaaaaaaaagaaaacguagauuucuaggauuccuacuaggcguaggguccgccauugcaucaggaguagcaguuagcaaaguauuacauuuagaaggagaaguaaauaaaaucaaaagcgcacuacucucaaccaacaaagcaguaguaucacucucaaacggaguaucaguacuaacauccaaaguacucgaccucaaaaacuacauagacaaacaauuacuacccauaguaaacaaacaaucaugcucuauaucaaauaucgaaacaguaaucgaauuucaacaaaaaaacaaucgacuacuugaaauaacaagagaguucuccgucaaugccggagucaccacaccagucucaacauacaugcuaaccaacucugaacuccuaucacuaauaaaugacaugccaauaacaaacgaccaaaaaaaacuaaugucaaauaacguacaaauaguacgacaacaaaguuauuccauaaugaguauaaucaaagaagaaguguuagcauacguaguccaacuaccauuauauggaguaauagacacaccauguuggaaauuacacaccucaccacucugcacuaccaauacaaaagaaggcucaaauauaugccuaacucgcacagacagaggcugguacugcgauaacgcaggauccguaucuuucuuuccccaagcagaaacuugcaaaguacaaucaaacagagucuucugcgacaccaugaauagucucacauuaccaucugaaguaaaccuauguaacguagauauauucaauccaaaauacgacugcaaaauaaugacaucaaaaaccgacgucucuagcaguguaaucacaucacuaggagcaauaguaagcugcuauggaaaaacaaaauguacagcaucaaacaaaaacaggggaauaauaaaaaccuucucaaacggaugugacuacguaucaaauaaaggcguagacacaguaagcguaggaaacacccuauacuacguuaacaaacaagaagggaaaucauuauacguaaaaggagaaccaauaauaaacuucuacgauccacucguauucccauccgacgaauuugacgccagcauaucccaaguuaacgaaaaaauaaaccaaucacuugcauuuauacgaaaaucugaugaacuucuccacaacguaaaugcaggaaaauccaccaccaauauaaugaucacaacuaucaucauaguaauaaucgucauuuuacuaucauuaauagcaguuggccuacuucuauacugcaaagcaagauaaggacuaguguccaccugucccuccugggcugcuggauugucucguuuuccugccaaauaaacaggaucagcgcuuuacagaucuaaaaaaaaaaaaaaaaaaaaaaaaaaaaaaaaaaaaaaaaaaaaaaaaaaaaaaaaaaaaaaaaugcaucccccccccccccccccccccccccccccccaaaggcucuuuucagagccaccagaauu

SEQ ID NO: 690 - RNA, 1973 nt, Artificial Sequence
  mRNA product Design e-2 comprising derived and/or modified sequence from HRSV(A2)__F-del (opt11)
gggagacccgugacccggaaguuguacggcuacgcgacuuucccucccacaaacccucgcgcccuuccuuuccuacuugggcccggcagaaagcuuaccauggaacuacuaauccuaaaagccaacgcgaucaccaccauccuaacggcagucaccuucugcuucgcaucaggccaaaacaucacagaagaguucuaccaaagcacaugcuccgccguauccaaaggcuaccucagcgcccuacgcacaggcugguacacaucugucaucaccauagaacucuccaacaucaaagaaaacaaaugcaacggcacugacgccaaaguaaagcugaucaaacaagaacucgacaaauacaaaaacgcagucaccgaacuccaacuacucaugcaauccaccccugcaaccaacaacagggcccgccgcgaacucccccgcuucaugaacuacacuuuaaacaacgccaaaaagaccaacgucacacucagcaagaaacggaaacgacgauuccuaggguuucuccuaggcgucggcucggcaaucgccuccggcgucgccguaagcaaaguacuacaccuagaaggcgaagugaacaaaaucaaaagugcccuucucuccaccaacaaggccguagucucucuauccaacggagucucaguccucaccucaaagguccucgaccucaaaaacuacaucgacaaacaacuacuccccauugucaacaagcagucaugcuccauaucaaacaucgaaaccgucaucgaguuccaacagaaaaacaaccgacuccucgaaauaaccagagaguucucggucaacgccggcgucaccaccccagucagcaccuacaugcucacuaacuccgaacuccuaucccucaucaacgacaugccaauuaccaacgaccaaaagaaacuaaugucgaacaacguucaaaucguccgacaacaaaguuacuccaucaugagcauaaucaaagaagaaguucuagcguacgucguccaacucccacuauacggcgucaucgacacuccgugcuggaaacuccacacaucaccccuauguacaaccaacacaaaagaaggcagcaacaucugccucacccgcaccgaccgagggugguauugcgauaacgcuggcagcgucuccuucuucccccaagccgaaaccugcaaaguccaaucaaacagaguauucugcgacaccaugaacucccuuacucucccuagcgaagucaaccucugcaacguugacauauucaaccccaaauacgacugcaaaaucaugaccuccaagaccgacgucuccuccuccgucaucacaucucuaggugccauugucuccugcuacggaaaaaccaaaugcacagccuccaacaaaaaccgcggcaucauaaaaaccuucuccaacggcugcgacuacgucaguaauaaaggcgucgacacgguauccguugggaauacgcuuuacuacguaaauaaacaagaaggcaaaucccucuacgucaaaggugaacccaucauaaacuucuacgacccgcuuguguucccauccgacgaguucgacgccagcaucagccaggucaacgaaaagaucaaccaaucccuagccuucauccgcaaaagcgacgaacuacuacacaacgucaacgccggaaaauccacaaccaacaucaugaucaccaccaucaucaucgucaucaucguaauccuacucucucucaucgccgucggccuccuacuguacuguaaagcccgauagggacuaguguccaccugucccuccugggcugcuggauugucucguuuuccugccaaauaaacaggaucagcgcuuuacagaucuaaaaaaaaaaaaaaaaaaaaaaaaaaaaaaaaaaaaaaaaaaaaaaaaaaaaaaaaaaaaaaaaugcaucccccccccccccccccccccccccccccccaaaggcucuuuucagagccaccagaauu

SEQ ID NO: 691 - RNA, 1943 nt, Artificial Sequence
  mRNA product Design e-3 comprising derived and/or modified sequence from HRSV(A2)__F-del (artificial)
gggagacuuucccauucuguagcagaauuugguguugccuguggucuuggucccgcggagaagcuuaccauggaguugcuaauccucaaagcaaaugcaauuaccacaauccucacugcagucacauuuuguuuugcuucuggucaaaacaucacugaagaauuuuaucaaucaacaugcagugcaguuagcaaaggcuaucuuagugcucugagaacugguugguauaccaguguuauaacuauagaauuaaguaauaucaaggaaaauaaguguaauggaacagaugcuaagguaaaauugauaaaacaagaauuagauaaauauaaaaaugcuguaacagaauugcaguugcucaugcaaagcacaccagcaacaaacaaucgagccagaagagaacuaccaagguuuaugaauuauacacucaacaaugccaaaaaaaccaauguaacauuaagcaagaaaaggaaaagaagauuucuugguuuuuuguuagguguuggaucugcaaucgccaguggcguugcuguaucuaagguccugcaccuagaaggggaagugaacaagaucaaaagugcucuacuauccacaaacaaggcuguagucagcuuaucaaauggaguuagugucuuaaccagcaaaguguuagaccucaaaaacuauauagauaaacaauuguuaccuauugugaacaagcaaagcugcagcauaucaaauauagaaacugugauagaguuccaacaaaagaacaacagacuacuagagauuaccagggaauuuaguguuaaugcagguguaacuacaccuguaagcacuuacauguuaacuaauagugaauuauugucauuaaucaaugauaugccuauaacaaaugaucagaaaaaguuaauguccaacaauguucaaauaguuagacagcaaaguuacucuaucauguccauaauaaaagaggaagucuuagcauauguaguacaauuaccacuauaugguguuauagauacacccuguuggaaacuacacacauccccucuauguacaaccaacacaaaagaaggguccaacaucuguuuaacaagaacugacagaggaugguacugugacaaugcaggaucaguaucuuucuucccacaagcugaaacauguaaaguucaaucaaaucgaguauuuugugacacaaugaacaguuuaacauuaccaagugaaguaaaucucugcaauguugacauauucaaccccaaauaugauuguaaaauuaugacuucaaaaacagauguaagcagcuccguuaucacaucucuaggagccauugugucaugcuauggcaaaacuaaauguacagcauccaauaaaaaucguggaaucauaaagacauuuucuaacgggugcgauuauguaucaaauaaagggguggacacugugucuguagguaacacauuauauuauguaaauaagcaagaagguaaaagucucuauguaaaaggugaaccaauaauaaauuucuaugacccauuaguauuccccucugaugaauuugaugcaucaauaucucaagucaacgagaagauuaaccagagccuagcauuuauucguaaauccgaugaauuauuacauaauguaaaugcugguaaauccaccacaaauaucaugauaacuacuauaauuauagugauuauaguaauauuguuaucauuaauugcuguuggacugcucuuauacuguaaggccagauaaggacuaguguccaccugucccuccugggcugcuggauugucucguuuuccugccaaauaaacaggaucagcgcuuuacagaucuaaaaaaaaaaaaaaaaaaaaaaaaaaaaaaaaaaaaaaaaaaaaaaaaaaaaaaaaaaaaaaaaugcaucccccccccccccccccccccccccccccccaaaggcucuuuucagagccaccagaauu

SEQ ID NO: 692 - RNA, 1943 nt, Artificial Sequence
  mRNA product Design e-3 comprising derived and/or modified sequence from HRSV(A2)__F-del (opt1)
gggagacuuucccauucuguagcagaauuugguguugccuguggucuuggucccgcggagaagcuuaccauggagcugcucauccugaaggccaacgccaucaccaccauccugacggcggugaccuucugcuucgccagcggccagaacaucaccgaggaguucuaccaguccaccugcagcgccgucuccaagggguaccucagcgcccugcggacgggcugguacaccuccgugaucaccaucgagcugagcaacaucaaggagaacaagugcaacgggaccgacgccaaggugaagcucaucaagcaggagcuggacaaguacaagaacgcggucacggagcugcagcuccugaugcaguccaccccggcaaccaacaaccgcgcccggcgcgagcugccccgguucaugaacuacacccucaacaacgccaagaagacgaacgugacccugagcaagaagcgcaagcggcgcuuccugggcuuccuccugggggugggcuccgccaucgcgagcggcgucgccguguccaaggugcugcaccucgagggggaggucaacaagaucaagagcgcccugcuguccaccaacaaggccguggugagccucuccaacggcgucagcgugcugaccuccaaggugcuggaccucaagaacuacaucgacaagcagcugcugcccaucgucaacaagcagagcugcuccaucagcaacaucgagacggugaucgaguuccagcagaagaacaaccggcuccuggagaucacccgcgaguucagcgugaacgccggggucaccacccccguguccacguacaugcugaccaacagcgagcuccugucccugaucaacgacaugccgaucaccaacgaccagaagaagcucaugagcaacaacgugcagaucguccggcagcaguccuacagcaucauguccaucaucaaggaggaggugcuggcguacgugguccagcugccccucuacggcgugaucgacacccccugcuggaagcugcacacgagcccccugugcaccaccaacaccaaggagggguccaacaucugccucacgcgcaccgaccggggcugguacugcgacaacgccggcagcgucuccuucuucccgcaggccgagaccugcaaggugcagagcaaccgcguguucugcgacaccaugaacucccugacgcugcccagcgagguaaaccucugcaacgucgacaucuucaaccccaaguacgacugcaagaucaugaccuccaagaccgacgugagcuccagcgugaucaccucccugggggccaucgucagcugcuacggcaagacgaagugcaccgccagcaacaagaaccgggggaucaucaagaccuucuccaacggcugcgacuacgugagcaacaagggcguggacaccguguccgucgggaacacccuguacuacgugaacaagcaggagggcaagagccucuacgugaagggggagcccaucaucaacuucuacgacccgcuggucuuccccuccgacgaguucgacgcgagcaucucccaggugaacgagaagaucaaccagagccuggccuucauccgcaaguccgacgagcugcuccacaacgugaacgccggcaagagcacgaccaacaucaugaucaccaccaucaucaucgucaucaucgugauccugcugucccucaucgccguggggcugcugcucuacugcaaggcccggugaggacuaguguccaccugucccuccugggcugcuggauugucucguuuuccugccaaauaaacaggaucagcgcuuuacagaucuaaaaaaaaaaaaaaaaaaaaaaaaaaaaaaaaaaaaaaaaaaaaaaaaaaaaaaaaaaaaaaaaugcaucccccccccccccccccccccccccccccccaaaggcucuuuucagagccaccagaauu

SEQ ID NO: 693 - RNA, 1943 nt, Artificial Sequence
  mRNA product Design e-3 comprising derived and/or modified sequence from HRSV(A2)__F-del (opt1)
gggagacuuucccauucuguagcagaauuugguguugccuguggucuuggucccgcggagaagcuuaccauggagcugcucauccugaaggccaacgccaucaccaccauccugacggcggugaccuucugcuucgccagcggccagaacaucaccgaggaguucuaccaguccacgugcagcgccgucuccaagggguaccucagcgcccugcgcaccggcugguacaccuccgugaucaccaucgagcugagcaacaucaaggagaacaagugcaacgggaccgacgccaaggugaagcucaucaagcaggagcuggacaaguacaagaacgcggucacggagcugcagcuccugaugcaguccacccccgccaccaacaaccgggcccgccgggagcugccgcgcuucaugaacuacacccucaacaacgccaagaagacgaacgugacccugagcaagaagcggaagcgccgguuccugggcuuccuccugggggugggcuccgcgaucgccagcggcgucgccguguccaaggugcugcaccucgagggggaggucaacaagaucaagagcgcccugcuguccaccaacaaggccguggugagccucuccaacggcgucagcgugcugaccuccaaggugcuggaccucaagaacuacaucgacaagcagcugcugcccaucgucaacaagcagagcugcuccaucagcaacaucgagacggugaucgaguuccagcagaagaacaaccgccuccuggagaucacccgggaguucagcgugaacgcgggggucaccacccccguguccacguacaugcugaccaacagcgagcuccugucccugaucaacgacaugcccaucaccaacgaccagaagaagcucaugagcaacaacgugcagaucguccgccagcaguccuacagcaucauguccaucaucaaggaggaggugcuggccuacgugguccagcugccgcucuacggcgugaucgacacccccugcuggaagcugcacacgagcccccugugcaccaccaacaccaaggagggguccaacaucugccucacgcggaccgaccgcggcugguacugcgacaacgccggcagcgucuccuucuucccccaggccgagaccugcaaggugcagagcaaccggguguucugcgacaccaugaacucccugacgcugccgagcgaggucaaccucugcaacguggacaucuucaaccccaaguacgacugcaagaucaugaccuccaagaccgacgugagcuccagcgucaucaccucccugggggccaucgugagcugcuacggcaagacgaagugcaccgcgagcaacaagaaccgcgggaucaucaagaccuucuccaacggcugcgacuacgugagcaacaagggcgucgacaccguguccguggggaacacccuguacuacgucaacaagcaggagggcaagagccucuacgugaagggggagcccaucaucaacuucuacgacccccugguguucccguccgacgaguucgacgccagcaucucccaggucaacgagaagaucaaccagagccuggccuucauccggaaguccgacgagcuccugcacaacgugaacgccggcaagagcacgaccaacaucaugaucaccaccaucaucaucgugaucaucgucauccugcugucccucaucgccguggggcugcugcucuacugcaaggcgcgcugaggacuaguguccaccugucccuccugggcugcuggauugucucguuuuccugccaaauaaacaggaucagcgcuuuacagaucuaaaaaaaaaaaaaaaaaaaaaaaaaaaaaaaaaaaaaaaaaaaaaaaaaaaaaaaaaaaaaaaaugcaucccccccccccccccccccccccccccccccaaaggcucuuuucagagccaccagaauu

SEQ ID NO: 694 - RNA, 1943 nt, Artificial Sequence
  mRNA product Design e-3 comprising derived and/or modified sequence from HRSV(A2)__F-del (opt2)
gggagacuuucccauucuguagcagaauuugguguugccuguggucuuggucccgcggagaagcuuaccauggagcuccucauccucaaggccaacgccaucaccaccauccucaccgccgucaccuucugcuucgccuccggccagaacaucaccgaggaguucuaccaguccaccugcuccgccgucuccaagggcuaccucuccgcccuccgcaccggcugguacaccuccgucaucaccaucgagcucuccaacaucaaggagaacaagugcaacggcaccgacgccaaggucaagcucaucaagcaggagcucgacaaguacaagaacgccgucaccgagcuccagcuccucaugcaguccacccccgccaccaacaaccgcgcccgccgcgagcucccccgcuucaugaacuacacccucaacaacgccaagaagaccaacgucacccucuccaagaagcgcaagcgccgcuuccucggcuuccuccucggcgucggcuccgccaucgccuccggcgucgccgucuccaagguccuccaccucgagggcgaggucaacaagaucaaguccgcccuccucuccaccaacaaggccgucgucucccucuccaacggcgucuccguccucaccuccaagguccucgaccucaagaacuacaucgacaagcagcuccuccccaucgucaacaagcaguccugcuccaucuccaacaucgagaccgucaucgaguuccagcagaagaacaaccgccuccucgagaucacccgcgaguucuccgucaacgccggcgucaccacccccgucuccaccuacaugcucaccaacuccgagcuccucucccucaucaacgacaugcccaucaccaacgaccagaagaagcucauguccaacaacguccagaucguccgccagcaguccuacuccaucauguccaucaucaaggaggagguccucgccuacgucguccagcucccccucuacggcgucaucgacacccccugcuggaagcuccacaccuccccccucugcaccaccaacaccaaggagggcuccaacaucugccucacccgcaccgaccgcggcugguacugcgacaacgccggcuccgucuccuucuucccccaggccgagaccugcaagguccaguccaaccgcgucuucugcgacaccaugaacucccucacccuccccuccgaggucaaccucugcaacgucgacaucuucaaccccaaguacgacugcaagaucaugaccuccaagaccgacgucuccuccuccgucaucaccucccucggcgccaucgucuccugcuacggcaagaccaagugcaccgccuccaacaagaaccgcggcaucaucaagaccuucuccaacggcugcgacuacgucuccaacaagggcgucgacaccgucuccgucggcaacacccucuacuacgucaacaagcaggagggcaagucccucuacgucaagggcgagcccaucaucaacuucuacgacccccucgucuuccccuccgacgaguucgacgccuccaucucccaggucaacgagaagaucaaccagucccucgccuucauccgcaaguccgacgagcuccuccacaacgucaacgccggcaaguccaccaccaacaucaugaucaccaccaucaucaucgucaucaucgucauccuccucucccucaucgccgucggccuccuccucuacugcaaggcccgcugaggacuaguguccaccugucccuccugggcugcuggauugucucguuuuccugccaaauaaacaggaucagcgcuuuacagaucuaaaaaaaaaaaaaaaaaaaaaaaaaaaaaaaaaaaaaaaaaaaaaaaaaaaaaaaaaaaaaaaaugcaucccccccccccccccccccccccccccccccaaaggcucuuuucagagccaccagaauu

SEQ ID NO: 695 - RNA, 1943 nt, Artificial Sequence
  mRNA product Design e-3 comprising derived and/or modified sequence from HRSV(A2)__F-del (opt3)
gggagacuuucccauucuguagcagaauuugguguugccuguggucuuggucccgcggagaagcuuaccauggagcugcucauccuuaaggccaacgcuauuaccacaauacugacugcagugacguucugcuuugccagcggccagaauaucaccgaagaguucuaccaauccacauguucugcggucucaaaaggguauuugagugcuuuaagaacuggaugguacaccagcguuauuacaaucgaacuguccaacauuaaggagaauaaaugcaacgguaccgacgccaaggugaaacuaaucaagcaggaacucgauaaguauaaaaaugcaguaacugagcugcagcuucugaugcagucuacacccgccaccaacaauagggcucggcgcgaguugccucgauuuaugaacuacacgcucaauaacgcaaagaaaacuaaugugacccugucgaagaaacguaagagaagguuccugggcuuucucuuaggggucggaucagccauagcuagcggcguggccguuaguaaggugcugcaccuugaaggugaggucaacaaaaucaaguccgcguugcugucuacaaauaaagcagugguaagccuauccaacgggguuucagugcucacuucuaagguccuggaccuuaaaaauuauauugauaagcaacuguugccaaucgugaacaaacagagcuguucuauuuccaacaucgaaaccgugauagaguuccagcagaagaauaaccggcuccuggagauuacacgcgaauuuucagucaaugccggaguuaccacgccggugagcacuuacauguuaacaaacagugagcugcucucucuuaucaaugacaugcccauuaccaacgaucaaaagaaacugauguccaauaacguacagaucgugagacagcagagcuauucgaucaugucuauuauaaaggaagaggucuuggcuuacgugguucaacuaccucuguacggcgugaucgacacuccaugcuggaaacuccauacauccccacuguguaccacgaauaccaaggaaggcucaaacauuugccuuacaaggacugaucgggggugguauugugacaaugccggaagugucagcuucuuuccucaggcagagaccugcaaagugcaguccaaccgcguauucugugauacaaugaauagucugacuuugccaagcgagguuaaccucugcaauguggacaucuuuaaccccaaguacgauuguaagauaaugaccucaaaaacagacgucaguuccagcgugauuaccucucugggugcuaucgucucaugcuauggcaagacuaaaugcacggccaguaacaagaaucgagggaucauuaaaacauucagcaacggaugugauuacguguccaauaagggcguugacaccgugucuguagguaacacuuuauauuacgucaauaagcaagaagggaaaucgcuguaugugaagggagagccuaucauuaacuuuuacgacccccuaguuuucccgagcgaugaauuugacgcguccauaucacaggugaaugagaaaaucaaccagagucucgccuucauuagaaagucugaugaacugcuucacaaugucaacgcaggcaaaagcaccacaaauaucaugaucaccacuauuauaaucgugauuaucguaauuuugcugucccucaucgcugugggccugcuucuguacugcaaggccaggugaggacuaguguccaccugucccuccugggcugcuggauugucucguuuuccugccaaauaaacaggaucagcgcuuuacagaucuaaaaaaaaaaaaaaaaaaaaaaaaaaaaaaaaaaaaaaaaaaaaaaaaaaaaaaaaaaaaaaaaugcaucccccccccccccccccccccccccccccccaaaggcucuuuucagagccaccagaauu

SEQ ID NO: 696 - RNA, 1943 nt, Artificial Sequence
  mRNA product Design e-3 comprising derived and/or modified sequence from HRSV(A2)__F-del (opt4)
gggagacuuucccauucuguagcagaauuugguguugccuguggucuuggucccgcggagaagcuuaccauggagcugcugauccugaaggccaacgccaucaccaccauccugaccgccgugaccuucugcuucgccagcggccagaacaucaccgaggaguucuaccagagcaccugcagcgccgugagcaagggcuaccugagcgcccugagaaccggcugguacaccagcgugaucaccaucgagcugagcaacaucaaggagaacaagugcaacggcaccgacgccaaggugaagcugaucaagcaggagcuggacaaguacaagaacgccgugaccgagcugcagcugcugaugcagagcacccccgccaccaacaacagagccagaagagagcugcccagauucaugaacuacacccugaacaacgccaagaagaccaacgugacccugagcaagaagagaaagagaagauuccugggcuuccugcugggcgugggcagcgccaucgccagcggcguggccgugagcaaggugcugcaccuggagggcgaggugaacaagaucaagagcgcccugcugagcaccaacaaggccguggugagccugagcaacggcgugagcgugcugaccagcaaggugcuggaccugaagaacuacaucgacaagcagcugcugcccaucgugaacaagcagagcugcagcaucagcaacaucgagaccgugaucgaguuccagcagaagaacaacagacugcuggagaucaccagagaguucagcgugaacgccggcgugaccacccccgugagcaccuacaugcugaccaacagcgagcugcugagccugaucaacgacaugcccaucaccaacgaccagaagaagcugaugagcaacaacgugcagaucgugagacagcagagcuacagcaucaugagcaucaucaaggaggaggugcuggccuacguggugcagcugccccuguacggcgugaucgacacccccugcuggaagcugcacaccagcccccugugcaccaccaacaccaaggagggcagcaacaucugccugaccagaaccgacagaggcugguacugcgacaacgccggcagcgugagcuucuucccccaggccgagaccugcaaggugcagagcaacagaguguucugcgacaccaugaacagccugacccugcccagcgaggugaaccugugcaacguggacaucuucaaccccaaguacgacugcaagaucaugaccagcaagaccgacgugagcagcagcgugaucaccagccugggcgccaucgugagcugcuacggcaagaccaagugcaccgccagcaacaagaacagaggcaucaucaagaccuucagcaacggcugcgacuacgugagcaacaagggcguggacaccgugagcgugggcaacacccuguacuacgugaacaagcaggagggcaagagccuguacgugaagggcgagcccaucaucaacuucuacgacccccugguguuccccagcgacgaguucgacgccagcaucagccaggugaacgagaagaucaaccagagccuggccuucaucagaaagagcgacgagcugcugcacaacgugaacgccggcaagagcaccaccaacaucaugaucaccaccaucaucaucgugaucaucgugauccugcugagccugaucgccgugggccugcugcuguacugcaaggccagaugaggacuaguguccaccugucccuccugggcugcuggauugucucguuuuccugccaaauaaacaggaucagcgcuuuacagaucuaaaaaaaaaaaaaaaaaaaaaaaaaaaaaaaaaaaaaaaaaaaaaaaaaaaaaaaaaaaaaaaaugcaucccccccccccccccccccccccccccccccaaaggcucuuuucagagccaccagaauu

SEQ ID NO: 697 - RNA, 1943 nt, Artificial Sequence
  mRNA product Design e-3 comprising derived and/or modified sequence from HRSV(A2)__F-del (opt5)
gggagacuuucccauucuguagcagaauuugguguugccuguggucuuggucccgcggagaagcuuaccauggagcugcucauccugaaggccaacgcuauuaccacaauccuuacggccgugaccuucugcuuugcgagcggccagaauauuacagaagaguucuaccaauccaccuguucugcugucagcaaaggguaucuguccgcccucagaacaggaugguacaccucuguuaucacaauugaacugagcaacaucaaggagaauaaaugcaacggcaccgacgccaaggugaaacuuaucaagcaggaacuggauaaguauaaaaaugcugugacggagcuccagcugcugaugcaguccacccccgccacaaacaaucgggcucgcagagagcucccucgguuuaugaacuacacccugaauaacgccaagaaaacaaaugucacccuuucuaagaaacgcaagagacgguuccugggguuucuccugggagugggcagcgcgauugccuccgggguugcugugagcaagguccuucaccuggaaggagaggugaacaaaaucaagucugcccuccuguccacgaauaaagcuguugugagccugucuaacggcgucuccgugcucacaagcaaggugcuggaccuuaaaaauuauauugauaagcaacugcucccgaucgucaacaaacagucuuguuccauuagcaacaucgaaaccguuauugaguuccagcagaagaauaaccgccugcuugagaucacaagagaauuuuccgugaaugccggcgugaccacccccgucucuacauacaugcugacgaacagcgagcuccugucccugaucaaugacaugccuauuaccaacgaucaaaagaaacucaugagcaauaacgugcagaucguucggcagcagucuuauuccauuaugagcaucauuaaggaagaggugcuggcguacgucgugcaacuuccccuguacgggguuaucgacacaccuugcuggaaacuccauaccucuccccuguguacaaccaauacgaaggaaggaagcaacaucugccuuacacgcaccgauagaggcugguauugugacaaugccggguccgugucuuucuuuccucaggcugagaccugcaaaguccagagcaaccggguguucugugauacaaugaacucccugacccucccgagcgaggucaaucugugcaauguggacauuuuuaaccccaaguacgauuguaagaucaugacaucuaaaacggacguuuccagcucugugauuaccucccugggagccaucgucagcugcuauggcaagacaaaaugcaccgcuuccaacaagaaucgcgggauuaucaaaacauucucuaacggaugugauuacgugagcaauaagggcguugacaccguguccgucggcaacacgcucuauuacgugaauaagcaagaagggaaaucucuguaugugaagggagagccuaucauuaacuuuuacgacccccuuguuuucccuagcgaugaauuugacgccuccaucagccaggucaaugagaaaauuaaccagucucuggccuucaucagaaaguccgaugaacuccugcacaaugugaacgcuggcaaaagcaccacaaauauuaugaucaccacaauuaucaucgugauuaucgucauucugcuuucucucaucgcgguggggcugcugcucuacugcaaggcccggugaggacuaguguccaccugucccuccugggcugcuggauugucucguuuuccugccaaauaaacaggaucagcgcuuuacagaucuaaaaaaaaaaaaaaaaaaaaaaaaaaaaaaaaaaaaaaaaaaaaaaaaaaaaaaaaaaaaaaaaugcaucccccccccccccccccccccccccccccccaaaggcucuuuucagagccaccagaauu

SEQ ID NO: 698 - RNA, 1943 nt, Artificial Sequence
  mRNA product Design e-3 comprising derived and/or modified sequence from HRSV(A2)__F-del (opt6)
gggagacuuucccauucuguagcagaauuugguguugccuguggucuuggucccgcggagaagcuuaccauggaauuacuaauacucaaagccaacgcaauaacaacaauacuaacagcaguaacauucugcuucgcaucaggacaaaacaucacagaagaauuuuaccaaaguacaugcagugcagucucuaaaggauaccucagugccuuacgcacaggaugguacacaucaguaauaacaaucgaacuuucaaacauaaaagaaaacaaaugcaauggaaccgacgccaaaguaaaacuaaucaaacaagaacuagacaaauauaaaaaugcaguaacagaauuacaacuccuaaugcaauccacaccagcaacaaauaacagagcaagacgagaacucccucgauucaugaauuacacauuaaacaacgcaaaaaaaacuaacguaacuuuaucaaaaaaaagaaaacguagauuucuaggauuccuacuaggcguaggguccgccauugcaucaggaguagcaguuagcaaaguauuacauuuagaaggagaaguaaauaaaaucaaaagcgcacuacucucaaccaacaaagcaguaguaucacucucaaacggaguaucaguacuaacauccaaaguacucgaccucaaaaacuacauagacaaacaauuacuacccauaguaaacaaacaaucaugcucuauaucaaauaucgaaacaguaaucgaauuucaacaaaaaaacaaucgacuacuugaaauaacaagagaguucuccgucaaugccggagucaccacaccagucucaacauacaugcuaaccaacucugaacuccuaucacuaauaaaugacaugccaauaacaaacgaccaaaaaaaacuaaugucaaauaacguacaaauaguacgacaacaaaguuauuccauaaugaguauaaucaaagaagaaguguuagcauacguaguccaacuaccauuauauggaguaauagacacaccauguuggaaauuacacaccucaccacucugcacuaccaauacaaaagaaggcucaaauauaugccuaacucgcacagacagaggcugguacugcgauaacgcaggauccguaucuuucuuuccccaagcagaaacuugcaaaguacaaucaaacagagucuucugcgacaccaugaauagucucacauuaccaucugaaguaaaccuauguaacguagauauauucaauccaaaauacgacugcaaaauaaugacaucaaaaaccgacgucucuagcaguguaaucacaucacuaggagcaauaguaagcugcuauggaaaaacaaaauguacagcaucaaacaaaaacaggggaauaauaaaaaccuucucaaacggaugugacuacguaucaaauaaaggcguagacacaguaagcguaggaaacacccuauacuacguuaacaaacaagaagggaaaucauuauacguaaaaggagaaccaauaauaaacuucuacgauccacucguauucccauccgacgaauuugacgccagcauaucccaaguuaacgaaaaaauaaaccaaucacuugcauuuauacgaaaaucugaugaacuucuccacaacguaaaugcaggaaaauccaccaccaauauaaugaucacaacuaucaucauaguaauaaucgucauuuuacuaucauuaauagcaguuggccuacuucuauacugcaaagcaagauaaggacuaguguccaccugucccuccugggcugcuggauugucucguuuuccugccaaauaaacaggaucagcgcuuuacagaucuaaaaaaaaaaaaaaaaaaaaaaaaaaaaaaaaaaaaaaaaaaaaaaaaaaaaaaaaaaaaaaaaugcaucccccccccccccccccccccccccccccccaaaggcucuuuucagagccaccagaauu

SEQ ID NO: 699 - RNA, 1943 nt, Artificial Sequence
  mRNA product Design e-3 comprising derived and/or modified sequence from HRSV(A2)__F-del (opt11)
gggagacuuucccauucuguagcagaauuugguguugccuguggucuuggucccgcggagaagcuuaccauggaacuacuaauccuaaaagccaacgcgaucaccaccauccuaacggcagucaccuucugcuucgcaucaggccaaaacaucacagaagaguucuaccaaagcacaugcuccgccguauccaaaggcuaccucagcgcccuacgcacaggcugguacacaucugucaucaccauagaacucuccaacaucaaagaaaacaaaugcaacggcacugacgccaaaguaaagcugaucaaacaagaacucgacaaauacaaaaacgcagucaccgaacuccaacuacucaugcaauccaccccugcaaccaacaacagggcccgccgcgaacucccccgcuucaugaacuacacuuuaaacaacgccaaaaagaccaacgucacacucagcaagaaacggaaacgacgauuccuaggguuucuccuaggcgucggcucggcaaucgccuccggcgucgccguaagcaaaguacuacaccuagaaggcgaagugaacaaaaucaaaagugcccuucucuccaccaacaaggccguagucucucuauccaacggagucucaguccucaccucaaagguccucgaccucaaaaacuacaucgacaaacaacuacuccccauugucaacaagcagucaugcuccauaucaaacaucgaaaccgucaucgaguuccaacagaaaaacaaccgacuccucgaaauaaccagagaguucucggucaacgccggcgucaccaccccagucagcaccuacaugcucacuaacuccgaacuccuaucccucaucaacgacaugccaauuaccaacgaccaaaagaaacuaaugucgaacaacguucaaaucguccgacaacaaaguuacuccaucaugagcauaaucaaagaagaaguucuagcguacgucguccaacucccacuauacggcgucaucgacacuccgugcuggaaacuccacacaucaccccuauguacaaccaacacaaaagaaggcagcaacaucugccucacccgcaccgaccgagggugguauugcgauaacgcuggcagcgucuccuucuucccccaagccgaaaccugcaaaguccaaucaaacagaguauucugcgacaccaugaacucccuuacucucccuagcgaagucaaccucugcaacguugacauauucaaccccaaauacgacugcaaaaucaugaccuccaagaccgacgucuccuccuccgucaucacaucucuaggugccauugucuccugcuacggaaaaaccaaaugcacagccuccaacaaaaaccgcggcaucauaaaaaccuucuccaacggcugcgacuacgucaguaauaaaggcgucgacacgguauccguugggaauacgcuuuacuacguaaauaaacaagaaggcaaaucccucuacgucaaaggugaacccaucauaaacuucuacgacccgcuuguguucccauccgacgaguucgacgccagcaucagccaggucaacgaaaagaucaaccaaucccuagccuucauccgcaaaagcgacgaacuacuacacaacgucaacgccggaaaauccacaaccaacaucaugaucaccaccaucaucaucgucaucaucguaauccuacucucucucaucgccgucggccuccuacuguacuguaaagcccgauagggacuaguguccaccugucccuccugggcugcuggauugucucguuuuccugccaaauaaacaggaucagcgcuuuacagaucuaaaaaaaaaaaaaaaaaaaaaaaaaaaaaaaaaaaaaaaaaaaaaaaaaaaaaaaaaaaaaaaaugcaucccccccccccccccccccccccccccccccaaaggcucuuuucagagccaccagaauu

SEQ ID NO: 700 - RNA, 1997 nt, Artificial Sequence
  mRNA product Design e-4 comprising derived and/or modified sequence from HRSV(A2)__F-del (artificial)
gggagacuccugucgggcggaaguaggaggaguagaguuuaaaaacaguacucuuuuuccgguucgggacguaguugaagcaacgacaagccggauaaccgcucuugagacaggaagcuuaccauggaguugcuaauccucaaagcaaaugcaauuaccacaauccucacugcagucacauuuuguuuugcuucuggucaaaacaucacugaagaauuuuaucaaucaacaugcagugcaguuagcaaaggcuaucuuagugcucugagaacugguugguauaccaguguuauaacuauagaauuaaguaauaucaaggaaaauaaguguaauggaacagaugcuaagguaaaauugauaaaacaagaauuagauaaauauaaaaaugcuguaacagaauugcaguugcucaugcaaagcacaccagcaacaaacaaucgagccagaagagaacuaccaagguuuaugaauuauacacucaacaaugccaaaaaaaccaauguaacauuaagcaagaaaaggaaaagaagauuucuugguuuuuuguuagguguuggaucugcaaucgccaguggcguugcuguaucuaagguccugcaccuagaaggggaagugaacaagaucaaaagugcucuacuauccacaaacaaggcuguagucagcuuaucaaauggaguuagugucuuaaccagcaaaguguuagaccucaaaaacuauauagauaaacaauuguuaccuauugugaacaagcaaagcugcagcauaucaaauauagaaacugugauagaguuccaacaaaagaacaacagacuacuagagauuaccagggaauuuaguguuaaugcagguguaacuacaccuguaagcacuuacauguuaacuaauagugaauuauugucauuaaucaaugauaugccuauaacaaaugaucagaaaaaguuaauguccaacaauguucaaauaguuagacagcaaaguuacucuaucauguccauaauaaaagaggaagucuuagcauauguaguacaauuaccacuauaugguguuauagauacacccuguuggaaacuacacacauccccucuauguacaaccaacacaaaagaaggguccaacaucuguuuaacaagaacugacagaggaugguacugugacaaugcaggaucaguaucuuucuucccacaagcugaaacauguaaaguucaaucaaaucgaguauuuugugacacaaugaacaguuuaacauuaccaagugaaguaaaucucugcaauguugacauauucaaccccaaauaugauuguaaaauuaugacuucaaaaacagauguaagcagcuccguuaucacaucucuaggagccauugugucaugcuauggcaaaacuaaauguacagcauccaauaaaaaucguggaaucauaaagacauuuucuaacgggugcgauuauguaucaaauaaagggguggacacugugucuguagguaacacauuauauuauguaaauaagcaagaagguaaaagucucuauguaaaaggugaaccaauaauaaauuucuaugacccauuaguauuccccucugaugaauuugaugcaucaauaucucaagucaacgagaagauuaaccagagccuagcauuuauucguaaauccgaugaauuauuacauaauguaaaugcugguaaauccaccacaaauaucaugauaacuacuauaauuauagugauuauaguaauauuguuaucauuaauugcuguuggacugcucuuauacuguaaggccagauaaggacuaguguccaccugucccuccugggcugcuggauugucucguuuuccugccaaauaaacaggaucagcgcuuuacagaucuaaaaaaaaaaaaaaaaaaaaaaaaaaaaaaaaaaaaaaaaaaaaaaaaaaaaaaaaaaaaaaaaugcaucccccccccccccccccccccccccccccccaaaggcucuuuucagagccaccagaauu

SEQ ID NO: 701 - RNA, 1997 nt, Artificial Sequence
  mRNA product Design e-4 comprising derived and/or modified sequence from HRSV(A2)__F-del (opt1)
gggagacuccugucgggcggaaguaggaggaguagaguuuaaaaacaguacucuuuuuccgguucgggacguaguugaagcaacgacaagccggauaaccgcucuugagacaggaagcuuaccauggagcugcucauccugaaggccaacgccaucaccaccauccugacggcggugaccuucugcuucgccagcggccagaacaucaccgaggaguucuaccaguccaccugcagcgccgucuccaagggguaccucagcgcccugcggacgggcugguacaccuccgugaucaccaucgagcugagcaacaucaaggagaacaagugcaacgggaccgacgccaaggugaagcucaucaagcaggagcuggacaaguacaagaacgcggucacggagcugcagcuccugaugcaguccaccccggcaaccaacaaccgcgcccggcgcgagcugccccgguucaugaacuacacccucaacaacgccaagaagacgaacgugacccugagcaagaagcgcaagcggcgcuuccugggcuuccuccugggggugggcuccgccaucgcgagcggcgucgccguguccaaggugcugcaccucgagggggaggucaacaagaucaagagcgcccugcuguccaccaacaaggccguggugagccucuccaacggcgucagcgugcugaccuccaaggugcuggaccucaagaacuacaucgacaagcagcugcugcccaucgucaacaagcagagcugcuccaucagcaacaucgagacggugaucgaguuccagcagaagaacaaccggcuccuggagaucacccgcgaguucagcgugaacgccggggucaccacccccguguccacguacaugcugaccaacagcgagcuccugucccugaucaacgacaugccgaucaccaacgaccagaagaagcucaugagcaacaacgugcagaucguccggcagcaguccuacagcaucauguccaucaucaaggaggaggugcuggcguacgugguccagcugccccucuacggcgugaucgacacccccugcuggaagcugcacacgagcccccugugcaccaccaacaccaaggagggguccaacaucugccucacgcgcaccgaccggggcugguacugcgacaacgccggcagcgucuccuucuucccgcaggccgagaccugcaaggugcagagcaaccgcguguucugcgacaccaugaacucccugacgcugcccagcgagguaaaccucugcaacgucgacaucuucaaccccaaguacgacugcaagaucaugaccuccaagaccgacgugagcuccagcgugaucaccucccugggggccaucgucagcugcuacggcaagacgaagugcaccgccagcaacaagaaccgggggaucaucaagaccuucuccaacggcugcgacuacgugagcaacaagggcguggacaccguguccgucgggaacacccuguacuacgugaacaagcaggagggcaagagccucuacgugaagggggagcccaucaucaacuucuacgacccgcuggucuuccccuccgacgaguucgacgcgagcaucucccaggugaacgagaagaucaaccagagccuggccuucauccgcaaguccgacgagcugcuccacaacgugaacgccggcaagagcacgaccaacaucaugaucaccaccaucaucaucgucaucaucgugauccugcugucccucaucgccguggggcugcugcucuacugcaaggcccggugaggacuaguguccaccugucccuccugggcugcuggauugucucguuuuccugccaaauaaacaggaucagcgcuuuacagaucuaaaaaaaaaaaaaaaaaaaaaaaaaaaaaaaaaaaaaaaaaaaaaaaaaaaaaaaaaaaaaaaaugcaucccccccccccccccccccccccccccccccaaaggcucuuuucagagccaccagaauu

SEQ ID NO: 702 - RNA, 1997 nt, Artificial Sequence
  mRNA product Design e-4 comprising derived and/or modified sequence from HRSV(A2)__F-del (opt1)
gggagacuccugucgggcggaaguaggaggaguagaguuuaaaaacaguacucuuuuuccgguucgggacguaguugaagcaacgacaagccggauaaccgcucuugagacaggaagcuuaccauggagcugcucauccugaaggccaacgccaucaccaccauccugacggcggugaccuucugcuucgccagcggccagaacaucaccgaggaguucuaccaguccacgugcagcgccgucuccaagggguaccucagcgcccugcgcaccggcugguacaccuccgugaucaccaucgagcugagcaacaucaaggagaacaagugcaacgggaccgacgccaaggugaagcucaucaagcaggagcuggacaaguacaagaacgcggucacggagcugcagcuccugaugcaguccacccccgccaccaacaaccgggcccgccgggagcugccgcgcuucaugaacuacacccucaacaacgccaagaagacgaacgugacccugagcaagaagcggaagcgccgguuccugggcuuccuccugggggugggcuccgcgaucgccagcggcgucgccguguccaaggugcugcaccucgagggggaggucaacaagaucaagagcgcccugcuguccaccaacaaggccguggugagccucuccaacggcgucagcgugcugaccuccaaggugcuggaccucaagaacuacaucgacaagcagcugcugcccaucgucaacaagcagagcugcuccaucagcaacaucgagacggugaucgaguuccagcagaagaacaaccgccuccuggagaucacccgggaguucagcgugaacgcgggggucaccacccccguguccacguacaugcugaccaacagcgagcuccugucccugaucaacgacaugcccaucaccaacgaccagaagaagcucaugagcaacaacgugcagaucguccgccagcaguccuacagcaucauguccaucaucaaggaggaggugcuggccuacgugguccagcugccgcucuacggcgugaucgacacccccugcuggaagcugcacacgagcccccugugcaccaccaacaccaaggagggguccaacaucugccucacgcggaccgaccgcggcugguacugcgacaacgccggcagcgucuccuucuucccccaggccgagaccugcaaggugcagagcaaccggguguucugcgacaccaugaacucccugacgcugccgagcgaggucaaccucugcaacguggacaucuucaaccccaaguacgacugcaagaucaugaccuccaagaccgacgugagcuccagcgucaucaccucccugggggccaucgugagcugcuacggcaagacgaagugcaccgcgagcaacaagaaccgcgggaucaucaagaccuucuccaacggcugcgacuacgugagcaacaagggcgucgacaccguguccguggggaacacccuguacuacgucaacaagcaggagggcaagagccucuacgugaagggggagcccaucaucaacuucuacgacccccugguguucccguccgacgaguucgacgccagcaucucccaggucaacgagaagaucaaccagagccuggccuucauccggaaguccgacgagcuccugcacaacgugaacgccggcaagagcacgaccaacaucaugaucaccaccaucaucaucgugaucaucgucauccugcugucccucaucgccguggggcugcugcucuacugcaaggcgcgcugaggacuaguguccaccugucccuccugggcugcuggauugucucguuuuccugccaaauaaacaggaucagcgcuuuacagaucuaaaaaaaaaaaaaaaaaaaaaaaaaaaaaaaaaaaaaaaaaaaaaaaaaaaaaaaaaaaaaaaaugcaucccccccccccccccccccccccccccccccaaaggcucuuuucagagccaccagaauu

SEQ ID NO: 703 - RNA, 1997 nt, Artificial Sequence
  mRNA product Design e-4 comprising derived and/or modified sequence from HRSV(A2)__F-del (opt2)
gggagacuccugucgggcggaaguaggaggaguagaguuuaaaaacaguacucuuuuuccgguucgggacguaguugaagcaacgacaagccggauaaccgcucuugagacaggaagcuuaccauggagcuccucauccucaaggccaacgccaucaccaccauccucaccgccgucaccuucugcuucgccuccggccagaacaucaccgaggaguucuaccaguccaccugcuccgccgucuccaagggcuaccucuccgcccuccgcaccggcugguacaccuccgucaucaccaucgagcucuccaacaucaaggagaacaagugcaacggcaccgacgccaaggucaagcucaucaagcaggagcucgacaaguacaagaacgccgucaccgagcuccagcuccucaugcaguccacccccgccaccaacaaccgcgcccgccgcgagcucccccgcuucaugaacuacacccucaacaacgccaagaagaccaacgucacccucuccaagaagcgcaagcgccgcuuccucggcuuccuccucggcgucggcuccgccaucgccuccggcgucgccgucuccaagguccuccaccucgagggcgaggucaacaagaucaaguccgcccuccucuccaccaacaaggccgucgucucccucuccaacggcgucuccguccucaccuccaagguccucgaccucaagaacuacaucgacaagcagcuccuccccaucgucaacaagcaguccugcuccaucuccaacaucgagaccgucaucgaguuccagcagaagaacaaccgccuccucgagaucacccgcgaguucuccgucaacgccggcgucaccacccccgucuccaccuacaugcucaccaacuccgagcuccucucccucaucaacgacaugcccaucaccaacgaccagaagaagcucauguccaacaacguccagaucguccgccagcaguccuacuccaucauguccaucaucaaggaggagguccucgccuacgucguccagcucccccucuacggcgucaucgacacccccugcuggaagcuccacaccuccccccucugcaccaccaacaccaaggagggcuccaacaucugccucacccgcaccgaccgcggcugguacugcgacaacgccggcuccgucuccuucuucccccaggccgagaccugcaagguccaguccaaccgcgucuucugcgacaccaugaacucccucacccuccccuccgaggucaaccucugcaacgucgacaucuucaaccccaaguacgacugcaagaucaugaccuccaagaccgacgucuccuccuccgucaucaccucccucggcgccaucgucuccugcuacggcaagaccaagugcaccgccuccaacaagaaccgcggcaucaucaagaccuucuccaacggcugcgacuacgucuccaacaagggcgucgacaccgucuccgucggcaacacccucuacuacgucaacaagcaggagggcaagucccucuacgucaagggcgagcccaucaucaacuucuacgacccccucgucuuccccuccgacgaguucgacgccuccaucucccaggucaacgagaagaucaaccagucccucgccuucauccgcaaguccgacgagcuccuccacaacgucaacgccggcaaguccaccaccaacaucaugaucaccaccaucaucaucgucaucaucgucauccuccucucccucaucgccgucggccuccuccucuacugcaaggcccgcugaggacuaguguccaccugucccuccugggcugcuggauugucucguuuuccugccaaauaaacaggaucagcgcuuuacagaucuaaaaaaaaaaaaaaaaaaaaaaaaaaaaaaaaaaaaaaaaaaaaaaaaaaaaaaaaaaaaaaaaugcaucccccccccccccccccccccccccccccccaaaggcucuuuucagagccaccagaauu

SEQ ID NO: 704 - RNA, 1997 nt, Artificial Sequence
  mRNA product Design e-4 comprising derived and/or modified sequence from HRSV(A2)__F-del (opt3)
gggagacuccugucgggcggaaguaggaggaguagaguuuaaaaacaguacucuuuuuccgguucgggacguaguugaagcaacgacaagccggauaaccgcucuugagacaggaagcuuaccauggagcugcucauccuuaaggccaacgcuauuaccacaauacugacugcagugacguucugcuuugccagcggccagaauaucaccgaagaguucuaccaauccacauguucugcggucucaaaaggguauuugagugcuuuaagaacuggaugguacaccagcguuauuacaaucgaacuguccaacauuaaggagaauaaaugcaacgguaccgacgccaaggugaaacuaaucaagcaggaacucgauaaguauaaaaaugcaguaacugagcugcagcuucugaugcagucuacacccgccaccaacaauagggcucggcgcgaguugccucgauuuaugaacuacacgcucaauaacgcaaagaaaacuaaugugacccugucgaagaaacguaagagaagguuccugggcuuucucuuaggggucggaucagccauagcuagcggcguggccguuaguaaggugcugcaccuugaaggugaggucaacaaaaucaaguccgcguugcugucuacaaauaaagcagugguaagccuauccaacgggguuucagugcucacuucuaagguccuggaccuuaaaaauuauauugauaagcaacuguugccaaucgugaacaaacagagcuguucuauuuccaacaucgaaaccgugauagaguuccagcagaagaauaaccggcuccuggagauuacacgcgaauuuucagucaaugccggaguuaccacgccggugagcacuuacauguuaacaaacagugagcugcucucucuuaucaaugacaugcccauuaccaacgaucaaaagaaacugauguccaauaacguacagaucgugagacagcagagcuauucgaucaugucuauuauaaaggaagaggucuuggcuuacgugguucaacuaccucuguacggcgugaucgacacuccaugcuggaaacuccauacauccccacuguguaccacgaauaccaaggaaggcucaaacauuugccuuacaaggacugaucgggggugguauugugacaaugccggaagugucagcuucuuuccucaggcagagaccugcaaagugcaguccaaccgcguauucugugauacaaugaauagucugacuuugccaagcgagguuaaccucugcaauguggacaucuuuaaccccaaguacgauuguaagauaaugaccucaaaaacagacgucaguuccagcgugauuaccucucugggugcuaucgucucaugcuauggcaagacuaaaugcacggccaguaacaagaaucgagggaucauuaaaacauucagcaacggaugugauuacguguccaauaagggcguugacaccgugucuguagguaacacuuuauauuacgucaauaagcaagaagggaaaucgcuguaugugaagggagagccuaucauuaacuuuuacgacccccuaguuuucccgagcgaugaauuugacgcguccauaucacaggugaaugagaaaaucaaccagagucucgccuucauuagaaagucugaugaacugcuucacaaugucaacgcaggcaaaagcaccacaaauaucaugaucaccacuauuauaaucgugauuaucguaauuuugcugucccucaucgcugugggccugcuucuguacugcaaggccaggugaggacuaguguccaccugucccuccugggcugcuggauugucucguuuuccugccaaauaaacaggaucagcgcuuuacagaucuaaaaaaaaaaaaaaaaaaaaaaaaaaaaaaaaaaaaaaaaaaaaaaaaaaaaaaaaaaaaaaaaugcaucccccccccccccccccccccccccccccccaaaggcucuuuucagagccaccagaauu

SEQ ID NO: 705 - RNA, 1997 nt, Artificial Sequence
  mRNA product Design e-4 comprising derived and/or modified sequence from HRSV(A2)__F-del (opt4)
gggagacuccugucgggcggaaguaggaggaguagaguuuaaaaacaguacucuuuuuccgguucgggacguaguugaagcaacgacaagccggauaaccgcucuugagacaggaagcuuaccauggagcugcugauccugaaggccaacgccaucaccaccauccugaccgccgugaccuucugcuucgccagcggccagaacaucaccgaggaguucuaccagagcaccugcagcgccgugagcaagggcuaccugagcgcccugagaaccggcugguacaccagcgugaucaccaucgagcugagcaacaucaaggagaacaagugcaacggcaccgacgccaaggugaagcugaucaagcaggagcuggacaaguacaagaacgccgugaccgagcugcagcugcugaugcagagcacccccgccaccaacaacagagccagaagagagcugcccagauucaugaacuacacccugaacaacgccaagaagaccaacgugacccugagcaagaagagaaagagaagauuccugggcuuccugcugggcgugggcagcgccaucgccagcggcguggccgugagcaaggugcugcaccuggagggcgaggugaacaagaucaagagcgcccugcugagcaccaacaaggccguggugagccugagcaacggcgugagcgugcugaccagcaaggugcuggaccugaagaacuacaucgacaagcagcugcugcccaucgugaacaagcagagcugcagcaucagcaacaucgagaccgugaucgaguuccagcagaagaacaacagacugcuggagaucaccagagaguucagcgugaacgccggcgugaccacccccgugagcaccuacaugcugaccaacagcgagcugcugagccugaucaacgacaugcccaucaccaacgaccagaagaagcugaugagcaacaacgugcagaucgugagacagcagagcuacagcaucaugagcaucaucaaggaggaggugcuggccuacguggugcagcugccccuguacggcgugaucgacacccccugcuggaagcugcacaccagcccccugugcaccaccaacaccaaggagggcagcaacaucugccugaccagaaccgacagaggcugguacugcgacaacgccggcagcgugagcuucuucccccaggccgagaccugcaaggugcagagcaacagaguguucugcgacaccaugaacagccugacccugcccagcgaggugaaccugugcaacguggacaucuucaaccccaaguacgacugcaagaucaugaccagcaagaccgacgugagcagcagcgugaucaccagccugggcgccaucgugagcugcuacggcaagaccaagugcaccgccagcaacaagaacagaggcaucaucaagaccuucagcaacggcugcgacuacgugagcaacaagggcguggacaccgugagcgugggcaacacccuguacuacgugaacaagcaggagggcaagagccuguacgugaagggcgagcccaucaucaacuucuacgacccccugguguuccccagcgacgaguucgacgccagcaucagccaggugaacgagaagaucaaccagagccuggccuucaucagaaagagcgacgagcugcugcacaacgugaacgccggcaagagcaccaccaacaucaugaucaccaccaucaucaucgugaucaucgugauccugcugagccugaucgccgugggccugcugcuguacugcaaggccagaugaggacuaguguccaccugucccuccugggcugcuggauugucucguuuuccugccaaauaaacaggaucagcgcuuuacagaucuaaaaaaaaaaaaaaaaaaaaaaaaaaaaaaaaaaaaaaaaaaaaaaaaaaaaaaaaaaaaaaaaugcaucccccccccccccccccccccccccccccccaaaggcucuuuucagagccaccagaauu

SEQ ID NO: 706 - RNA, 1997 nt, Artificial Sequence
  mRNA product Design e-4 comprising derived and/or modified sequence from HRSV(A2)__F-del (opt5)
gggagacuccugucgggcggaaguaggaggaguagaguuuaaaaacaguacucuuuuuccgguucgggacguaguugaagcaacgacaagccggauaaccgcucuugagacaggaagcuuaccauggagcugcucauccugaaggccaacgcuauuaccacaauccuuacggccgugaccuucugcuuugcgagcggccagaauauuacagaagaguucuaccaauccaccuguucugcugucagcaaaggguaucuguccgcccucagaacaggaugguacaccucuguuaucacaauugaacugagcaacaucaaggagaauaaaugcaacggcaccgacgccaaggugaaacuuaucaagcaggaacuggauaaguauaaaaaugcugugacggagcuccagcugcugaugcaguccacccccgccacaaacaaucgggcucgcagagagcucccucgguuuaugaacuacacccugaauaacgccaagaaaacaaaugucacccuuucuaagaaacgcaagagacgguuccugggguuucuccugggagugggcagcgcgauugccuccgggguugcugugagcaagguccuucaccuggaaggagaggugaacaaaaucaagucugcccuccuguccacgaauaaagcuguugugagccugucuaacggcgucuccgugcucacaagcaaggugcuggaccuuaaaaauuauauugauaagcaacugcucccgaucgucaacaaacagucuuguuccauuagcaacaucgaaaccguuauugaguuccagcagaagaauaaccgccugcuugagaucacaagagaauuuuccgugaaugccggcgugaccacccccgucucuacauacaugcugacgaacagcgagcuccugucccugaucaaugacaugccuauuaccaacgaucaaaagaaacucaugagcaauaacgugcagaucguucggcagcagucuuauuccauuaugagcaucauuaaggaagaggugcuggcguacgucgugcaacuuccccuguacgggguuaucgacacaccuugcuggaaacuccauaccucuccccuguguacaaccaauacgaaggaaggaagcaacaucugccuuacacgcaccgauagaggcugguauugugacaaugccggguccgugucuuucuuuccucaggcugagaccugcaaaguccagagcaaccggguguucugugauacaaugaacucccugacccucccgagcgaggucaaucugugcaauguggacauuuuuaaccccaaguacgauuguaagaucaugacaucuaaaacggacguuuccagcucugugauuaccucccugggagccaucgucagcugcuauggcaagacaaaaugcaccgcuuccaacaagaaucgcgggauuaucaaaacauucucuaacggaugugauuacgugagcaauaagggcguugacaccguguccgucggcaacacgcucuauuacgugaauaagcaagaagggaaaucucuguaugugaagggagagccuaucauuaacuuuuacgacccccuuguuuucccuagcgaugaauuugacgccuccaucagccaggucaaugagaaaauuaaccagucucuggccuucaucagaaaguccgaugaacuccugcacaaugugaacgcuggcaaaagcaccacaaauauuaugaucaccacaauuaucaucgugauuaucgucauucugcuuucucucaucgcgguggggcugcugcucuacugcaaggcccggugaggacuaguguccaccugucccuccugggcugcuggauugucucguuuuccugccaaauaaacaggaucagcgcuuuacagaucuaaaaaaaaaaaaaaaaaaaaaaaaaaaaaaaaaaaaaaaaaaaaaaaaaaaaaaaaaaaaaaaaugcaucccccccccccccccccccccccccccccccaaaggcucuuuucagagccaccagaauu

SEQ ID NO: 707 - RNA, 1997 nt, Artificial Sequence
  mRNA product Design e-4 comprising derived and/or modified sequence from HRSV(A2)__F-del (opt6)
gggagacuccugucgggcggaaguaggaggaguagaguuuaaaaacaguacucuuuuuccgguucgggacguaguugaagcaacgacaagccggauaaccgcucuugagacaggaagcuuaccauggaauuacuaauacucaaagccaacgcaauaacaacaauacuaacagcaguaacauucugcuucgcaucaggacaaaacaucacagaagaauuuuaccaaaguacaugcagugcagucucuaaaggauaccucagugccuuacgcacaggaugguacacaucaguaauaacaaucgaacuuucaaacauaaaagaaaacaaaugcaauggaaccgacgccaaaguaaaacuaaucaaacaagaacuagacaaauauaaaaaugcaguaacagaauuacaacuccuaaugcaauccacaccagcaacaaauaacagagcaagacgagaacucccucgauucaugaauuacacauuaaacaacgcaaaaaaaacuaacguaacuuuaucaaaaaaaagaaaacguagauuucuaggauuccuacuaggcguaggguccgccauugcaucaggaguagcaguuagcaaaguauuacauuuagaaggagaaguaaauaaaaucaaaagcgcacuacucucaaccaacaaagcaguaguaucacucucaaacggaguaucaguacuaacauccaaaguacucgaccucaaaaacuacauagacaaacaauuacuacccauaguaaacaaacaaucaugcucuauaucaaauaucgaaacaguaaucgaauuucaacaaaaaaacaaucgacuacuugaaauaacaagagaguucuccgucaaugccggagucaccacaccagucucaacauacaugcuaaccaacucugaacuccuaucacuaauaaaugacaugccaauaacaaacgaccaaaaaaaacuaaugucaaauaacguacaaauaguacgacaacaaaguuauuccauaaugaguauaaucaaagaagaaguguuagcauacguaguccaacuaccauuauauggaguaauagacacaccauguuggaaauuacacaccucaccacucugcacuaccaauacaaaagaaggcucaaauauaugccuaacucgcacagacagaggcugguacugcgauaacgcaggauccguaucuuucuuuccccaagcagaaacuugcaaaguacaaucaaacagagucuucugcgacaccaugaauagucucacauuaccaucugaaguaaaccuauguaacguagauauauucaauccaaaauacgacugcaaaauaaugacaucaaaaaccgacgucucuagcaguguaaucacaucacuaggagcaauaguaagcugcuauggaaaaacaaaauguacagcaucaaacaaaaacaggggaauaauaaaaaccuucucaaacggaugugacuacguaucaaauaaaggcguagacacaguaagcguaggaaacacccuauacuacguuaacaaacaagaagggaaaucauuauacguaaaaggagaaccaauaauaaacuucuacgauccacucguauucccauccgacgaauuugacgccagcauaucccaaguuaacgaaaaaauaaaccaaucacuugcauuuauacgaaaaucugaugaacuucuccacaacguaaaugcaggaaaauccaccaccaauauaaugaucacaacuaucaucauaguaauaaucgucauuuuacuaucauuaauagcaguuggccuacuucuauacugcaaagcaagauaaggacuaguguccaccugucccuccugggcugcuggauugucucguuuuccugccaaauaaacaggaucagcgcuuuacagaucuaaaaaaaaaaaaaaaaaaaaaaaaaaaaaaaaaaaaaaaaaaaaaaaaaaaaaaaaaaaaaaaaugcaucccccccccccccccccccccccccccccccaaaggcucuuuucagagccaccagaauu

SEQ ID NO: 708 - RNA, 1997 nt, Artificial Sequence
  mRNA product Design e-4 comprising derived and/or modified sequence from HRSV(A2)__F-del (opt11)
gggagacuccugucgggcggaaguaggaggaguagaguuuaaaaacaguacucuuuuuccgguucgggacguaguugaagcaacgacaagccggauaaccgcucuugagacaggaagcuuaccauggaacuacuaauccuaaaagccaacgcgaucaccaccauccuaacggcagucaccuucugcuucgcaucaggccaaaacaucacagaagaguucuaccaaagcacaugcuccgccguauccaaaggcuaccucagcgcccuacgcacaggcugguacacaucugucaucaccauagaacucuccaacaucaaagaaaacaaaugcaacggcacugacgccaaaguaaagcugaucaaacaagaacucgacaaauacaaaaacgcagucaccgaacuccaacuacucaugcaauccaccccugcaaccaacaacagggcccgccgcgaacucccccgcuucaugaacuacacuuuaaacaacgccaaaaagaccaacgucacacucagcaagaaacggaaacgacgauuccuaggguuucuccuaggcgucggcucggcaaucgccuccggcgucgccguaagcaaaguacuacaccuagaaggcgaagugaacaaaaucaaaagugcccuucucuccaccaacaaggccguagucucucuauccaacggagucucaguccucaccucaaagguccucgaccucaaaaacuacaucgacaaacaacuacuccccauugucaacaagcagucaugcuccauaucaaacaucgaaaccgucaucgaguuccaacagaaaaacaaccgacuccucgaaauaaccagagaguucucggucaacgccggcgucaccaccccagucagcaccuacaugcucacuaacuccgaacuccuaucccucaucaacgacaugccaauuaccaacgaccaaaagaaacuaaugucgaacaacguucaaaucguccgacaacaaaguuacuccaucaugagcauaaucaaagaagaaguucuagcguacgucguccaacucccacuauacggcgucaucgacacuccgugcuggaaacuccacacaucaccccuauguacaaccaacacaaaagaaggcagcaacaucugccucacccgcaccgaccgagggugguauugcgauaacgcuggcagcgucuccuucuucccccaagccgaaaccugcaaaguccaaucaaacagaguauucugcgacaccaugaacucccuuacucucccuagcgaagucaaccucugcaacguugacauauucaaccccaaauacgacugcaaaaucaugaccuccaagaccgacgucuccuccuccgucaucacaucucuaggugccauugucuccugcuacggaaaaaccaaaugcacagccuccaacaaaaaccgcggcaucauaaaaaccuucuccaacggcugcgacuacgucaguaauaaaggcgucgacacgguauccguugggaauacgcuuuacuacguaaauaaacaagaaggcaaaucccucuacgucaaaggugaacccaucauaaacuucuacgacccgcuuguguucccauccgacgaguucgacgccagcaucagccaggucaacgaaaagaucaaccaaucccuagccuucauccgcaaaagcgacgaacuacuacacaacgucaacgccggaaaauccacaaccaacaucaugaucaccaccaucaucaucgucaucaucguaauccuacucucucucaucgccgucggccuccuacuguacuguaaagcccgauagggacuaguguccaccugucccuccugggcugcuggauugucucguuuuccugccaaauaaacaggaucagcgcuuuacagaucuaaaaaaaaaaaaaaaaaaaaaaaaaaaaaaaaaaaaaaaaaaaaaaaaaaaaaaaaaaaaaaaaugcaucccccccccccccccccccccccccccccccaaaggcucuuuucagagccaccagaauu

SEQ ID NO: 709 - RNA, 1964 nt, Artificial Sequence
  mRNA product Design e-5 comprising derived and/or modified sequence from HRSV(A2)__F-del (artificial)
gggagagcggcucggccauuuugucccagucaguccggaggcugcggcugcagaaguaccgccugcggaguaacugcaaagaagcuuaccauggaguugcuaauccucaaagcaaaugcaauuaccacaauccucacugcagucacauuuuguuuugcuucuggucaaaacaucacugaagaauuuuaucaaucaacaugcagugcaguuagcaaaggcuaucuuagugcucugagaacugguugguauaccaguguuauaacuauagaauuaaguaauaucaaggaaaauaaguguaauggaacagaugcuaagguaaaauugauaaaacaagaauuagauaaauauaaaaaugcuguaacagaauugcaguugcucaugcaaagcacaccagcaacaaacaaucgagccagaagagaacuaccaagguuuaugaauuauacacucaacaaugccaaaaaaaccaauguaacauuaagcaagaaaaggaaaagaagauuucuugguuuuuuguuagguguuggaucugcaaucgccaguggcguugcuguaucuaagguccugcaccuagaaggggaagugaacaagaucaaaagugcucuacuauccacaaacaaggcuguagucagcuuaucaaauggaguuagugucuuaaccagcaaaguguuagaccucaaaaacuauauagauaaacaauuguuaccuauugugaacaagcaaagcugcagcauaucaaauauagaaacugugauagaguuccaacaaaagaacaacagacuacuagagauuaccagggaauuuaguguuaaugcagguguaacuacaccuguaagcacuuacauguuaacuaauagugaauuauugucauuaaucaaugauaugccuauaacaaaugaucagaaaaaguuaauguccaacaauguucaaauaguuagacagcaaaguuacucuaucauguccauaauaaaagaggaagucuuagcauauguaguacaauuaccacuauaugguguuauagauacacccuguuggaaacuacacacauccccucuauguacaaccaacacaaaagaaggguccaacaucuguuuaacaagaacugacagaggaugguacugugacaaugcaggaucaguaucuuucuucccacaagcugaaacauguaaaguucaaucaaaucgaguauuuugugacacaaugaacaguuuaacauuaccaagugaaguaaaucucugcaauguugacauauucaaccccaaauaugauuguaaaauuaugacuucaaaaacagauguaagcagcuccguuaucacaucucuaggagccauugugucaugcuauggcaaaacuaaauguacagcauccaauaaaaaucguggaaucauaaagacauuuucuaacgggugcgauuauguaucaaauaaagggguggacacugugucuguagguaacacauuauauuauguaaauaagcaagaagguaaaagucucuauguaaaaggugaaccaauaauaaauuucuaugacccauuaguauuccccucugaugaauuugaugcaucaauaucucaagucaacgagaagauuaaccagagccuagcauuuauucguaaauccgaugaauuauuacauaauguaaaugcugguaaauccaccacaaauaucaugauaacuacuauaauuauagugauuauaguaauauuguuaucauuaauugcuguuggacugcucuuauacuguaaggccagauaaggacuaguguccaccugucccuccugggcugcuggauugucucguuuuccugccaaauaaacaggaucagcgcuuuacagaucuaaaaaaaaaaaaaaaaaaaaaaaaaaaaaaaaaaaaaaaaaaaaaaaaaaaaaaaaaaaaaaaaugcaucccccccccccccccccccccccccccccccaaaggcucuuuucagagccaccagaauu

SEQ ID NO: 710 - RNA, 1964 nt, Artificial Sequence
  mRNA product Design e-5 comprising derived and/or modified sequence from HRSV(A2)__F-del (opt1)
gggagagcggcucggccauuuugucccagucaguccggaggcugcggcugcagaaguaccgccugcggaguaacugcaaagaagcuuaccauggagcugcucauccugaaggccaacgccaucaccaccauccugacggcggugaccuucugcuucgccagcggccagaacaucaccgaggaguucuaccaguccaccugcagcgccgucuccaagggguaccucagcgcccugcggacgggcugguacaccuccgugaucaccaucgagcugagcaacaucaaggagaacaagugcaacgggaccgacgccaaggugaagcucaucaagcaggagcuggacaaguacaagaacgcggucacggagcugcagcuccugaugcaguccaccccggcaaccaacaaccgcgcccggcgcgagcugccccgguucaugaacuacacccucaacaacgccaagaagacgaacgugacccugagcaagaagcgcaagcggcgcuuccugggcuuccuccugggggugggcuccgccaucgcgagcggcgucgccguguccaaggugcugcaccucgagggggaggucaacaagaucaagagcgcccugcuguccaccaacaaggccguggugagccucuccaacggcgucagcgugcugaccuccaaggugcuggaccucaagaacuacaucgacaagcagcugcugcccaucgucaacaagcagagcugcuccaucagcaacaucgagacggugaucgaguuccagcagaagaacaaccggcuccuggagaucacccgcgaguucagcgugaacgccggggucaccacccccguguccacguacaugcugaccaacagcgagcuccugucccugaucaacgacaugccgaucaccaacgaccagaagaagcucaugagcaacaacgugcagaucguccggcagcaguccuacagcaucauguccaucaucaaggaggaggugcuggcguacgugguccagcugccccucuacggcgugaucgacacccccugcuggaagcugcacacgagcccccugugcaccaccaacaccaaggagggguccaacaucugccucacgcgcaccgaccggggcugguacugcgacaacgccggcagcgucuccuucuucccgcaggccgagaccugcaaggugcagagcaaccgcguguucugcgacaccaugaacucccugacgcugcccagcgagguaaaccucugcaacgucgacaucuucaaccccaaguacgacugcaagaucaugaccuccaagaccgacgugagcuccagcgugaucaccucccugggggccaucgucagcugcuacggcaagacgaagugcaccgccagcaacaagaaccgggggaucaucaagaccuucuccaacggcugcgacuacgugagcaacaagggcguggacaccguguccgucgggaacacccuguacuacgugaacaagcaggagggcaagagccucuacgugaagggggagcccaucaucaacuucuacgacccgcuggucuuccccuccgacgaguucgacgcgagcaucucccaggugaacgagaagaucaaccagagccuggccuucauccgcaaguccgacgagcugcuccacaacgugaacgccggcaagagcacgaccaacaucaugaucaccaccaucaucaucgucaucaucgugauccugcugucccucaucgccguggggcugcugcucuacugcaaggcccggugaggacuaguguccaccugucccuccugggcugcuggauugucucguuuuccugccaaauaaacaggaucagcgcuuuacagaucuaaaaaaaaaaaaaaaaaaaaaaaaaaaaaaaaaaaaaaaaaaaaaaaaaaaaaaaaaaaaaaaaugcaucccccccccccccccccccccccccccccccaaaggcucuuuucagagccaccagaauu

SEQ ID NO: 711 - RNA, 1964 nt, Artificial Sequence
  mRNA product Design e-5 comprising derived and/or modified sequence from HRSV(A2)__F-del (opt1)
gggagagcggcucggccauuuugucccagucaguccggaggcugcggcugcagaaguaccgccugcggaguaacugcaaagaagcuuaccauggagcugcucauccugaaggccaacgccaucaccaccauccugacggcggugaccuucugcuucgccagcggccagaacaucaccgaggaguucuaccaguccacgugcagcgccgucuccaagggguaccucagcgcccugcgcaccggcugguacaccuccgugaucaccaucgagcugagcaacaucaaggagaacaagugcaacgggaccgacgccaaggugaagcucaucaagcaggagcuggacaaguacaagaacgcggucacggagcugcagcuccugaugcaguccacccccgccaccaacaaccgggcccgccgggagcugccgcgcuucaugaacuacacccucaacaacgccaagaagacgaacgugacccugagcaagaagcggaagcgccgguuccugggcuuccuccugggggugggcuccgcgaucgccagcggcgucgccguguccaaggugcugcaccucgagggggaggucaacaagaucaagagcgcccugcuguccaccaacaaggccguggugagccucuccaacggcgucagcgugcugaccuccaaggugcuggaccucaagaacuacaucgacaagcagcugcugcccaucgucaacaagcagagcugcuccaucagcaacaucgagacggugaucgaguuccagcagaagaacaaccgccuccuggagaucacccgggaguucagcgugaacgcgggggucaccacccccguguccacguacaugcugaccaacagcgagcuccugucccugaucaacgacaugcccaucaccaacgaccagaagaagcucaugagcaacaacgugcagaucguccgccagcaguccuacagcaucauguccaucaucaaggaggaggugcuggccuacgugguccagcugccgcucuacggcgugaucgacacccccugcuggaagcugcacacgagcccccugugcaccaccaacaccaaggagggguccaacaucugccucacgcggaccgaccgcggcugguacugcgacaacgccggcagcgucuccuucuucccccaggccgagaccugcaaggugcagagcaaccggguguucugcgacaccaugaacucccugacgcugccgagcgaggucaaccucugcaacguggacaucuucaaccccaaguacgacugcaagaucaugaccuccaagaccgacgugagcuccagcgucaucaccucccugggggccaucgugagcugcuacggcaagacgaagugcaccgcgagcaacaagaaccgcgggaucaucaagaccuucuccaacggcugcgacuacgugagcaacaagggcgucgacaccguguccguggggaacacccuguacuacgucaacaagcaggagggcaagagccucuacgugaagggggagcccaucaucaacuucuacgacccccugguguucccguccgacgaguucgacgccagcaucucccaggucaacgagaagaucaaccagagccuggccuucauccggaaguccgacgagcuccugcacaacgugaacgccggcaagagcacgaccaacaucaugaucaccaccaucaucaucgugaucaucgucauccugcugucccucaucgccguggggcugcugcucuacugcaaggcgcgcugaggacuaguguccaccugucccuccugggcugcuggauugucucguuuuccugccaaauaaacaggaucagcgcuuuacagaucuaaaaaaaaaaaaaaaaaaaaaaaaaaaaaaaaaaaaaaaaaaaaaaaaaaaaaaaaaaaaaaaaugcaucccccccccccccccccccccccccccccccaaaggcucuuuucagagccaccagaauu

SEQ ID NO: 712 - RNA, 1964 nt, Artificial Sequence
  mRNA product Design e-5 comprising derived and/or modified sequence from HRSV(A2)__F-del (opt2)
gggagagcggcucggccauuuugucccagucaguccggaggcugcggcugcagaaguaccgccugcggaguaacugcaaagaagcuuaccauggagcuccucauccucaaggccaacgccaucaccaccauccucaccgccgucaccuucugcuucgccuccggccagaacaucaccgaggaguucuaccaguccaccugcuccgccgucuccaagggcuaccucuccgcccuccgcaccggcugguacaccuccgucaucaccaucgagcucuccaacaucaaggagaacaagugcaacggcaccgacgccaaggucaagcucaucaagcaggagcucgacaaguacaagaacgccgucaccgagcuccagcuccucaugcaguccacccccgccaccaacaaccgcgcccgccgcgagcucccccgcuucaugaacuacacccucaacaacgccaagaagaccaacgucacccucuccaagaagcgcaagcgccgcuuccucggcuuccuccucggcgucggcuccgccaucgccuccggcgucgccgucuccaagguccuccaccucgagggcgaggucaacaagaucaaguccgcccuccucuccaccaacaaggccgucgucucccucuccaacggcgucuccguccucaccuccaagguccucgaccucaagaacuacaucgacaagcagcuccuccccaucgucaacaagcaguccugcuccaucuccaacaucgagaccgucaucgaguuccagcagaagaacaaccgccuccucgagaucacccgcgaguucuccgucaacgccggcgucaccacccccgucuccaccuacaugcucaccaacuccgagcuccucucccucaucaacgacaugcccaucaccaacgaccagaagaagcucauguccaacaacguccagaucguccgccagcaguccuacuccaucauguccaucaucaaggaggagguccucgccuacgucguccagcucccccucuacggcgucaucgacacccccugcuggaagcuccacaccuccccccucugcaccaccaacaccaaggagggcuccaacaucugccucacccgcaccgaccgcggcugguacugcgacaacgccggcuccgucuccuucuucccccaggccgagaccugcaagguccaguccaaccgcgucuucugcgacaccaugaacucccucacccuccccuccgaggucaaccucugcaacgucgacaucuucaaccccaaguacgacugcaagaucaugaccuccaagaccgacgucuccuccuccgucaucaccucccucggcgccaucgucuccugcuacggcaagaccaagugcaccgccuccaacaagaaccgcggcaucaucaagaccuucuccaacggcugcgacuacgucuccaacaagggcgucgacaccgucuccgucggcaacacccucuacuacgucaacaagcaggagggcaagucccucuacgucaagggcgagcccaucaucaacuucuacgacccccucgucuuccccuccgacgaguucgacgccuccaucucccaggucaacgagaagaucaaccagucccucgccuucauccgcaaguccgacgagcuccuccacaacgucaacgccggcaaguccaccaccaacaucaugaucaccaccaucaucaucgucaucaucgucauccuccucucccucaucgccgucggccuccuccucuacugcaaggcccgcugaggacuaguguccaccugucccuccugggcugcuggauugucucguuuuccugccaaauaaacaggaucagcgcuuuacagaucuaaaaaaaaaaaaaaaaaaaaaaaaaaaaaaaaaaaaaaaaaaaaaaaaaaaaaaaaaaaaaaaaugcaucccccccccccccccccccccccccccccccaaaggcucuuuucagagccaccagaauu

SEQ ID NO: 713 - RNA, 1964 nt, Artificial Sequence
  mRNA product Design e-5 comprising derived and/or modified sequence from HRSV(A2)__F-del (opt3)
gggagagcggcucggccauuuugucccagucaguccggaggcugcggcugcagaaguaccgccugcggaguaacugcaaagaagcuuaccauggagcugcucauccuuaaggccaacgcuauuaccacaauacugacugcagugacguucugcuuugccagcggccagaauaucaccgaagaguucuaccaauccacauguucugcggucucaaaaggguauuugagugcuuuaagaacuggaugguacaccagcguuauuacaaucgaacuguccaacauuaaggagaauaaaugcaacgguaccgacgccaaggugaaacuaaucaagcaggaacucgauaaguauaaaaaugcaguaacugagcugcagcuucugaugcagucuacacccgccaccaacaauagggcucggcgcgaguugccucgauuuaugaacuacacgcucaauaacgcaaagaaaacuaaugugacccugucgaagaaacguaagagaagguuccugggcuuucucuuaggggucggaucagccauagcuagcggcguggccguuaguaaggugcugcaccuugaaggugaggucaacaaaaucaaguccgcguugcugucuacaaauaaagcagugguaagccuauccaacgggguuucagugcucacuucuaagguccuggaccuuaaaaauuauauugauaagcaacuguugccaaucgugaacaaacagagcuguucuauuuccaacaucgaaaccgugauagaguuccagcagaagaauaaccggcuccuggagauuacacgcgaauuuucagucaaugccggaguuaccacgccggugagcacuuacauguuaacaaacagugagcugcucucucuuaucaaugacaugcccauuaccaacgaucaaaagaaacugauguccaauaacguacagaucgugagacagcagagcuauucgaucaugucuauuauaaaggaagaggucuuggcuuacgugguucaacuaccucuguacggcgugaucgacacuccaugcuggaaacuccauacauccccacuguguaccacgaauaccaaggaaggcucaaacauuugccuuacaaggacugaucgggggugguauugugacaaugccggaagugucagcuucuuuccucaggcagagaccugcaaagugcaguccaaccgcguauucugugauacaaugaauagucugacuuugccaagcgagguuaaccucugcaauguggacaucuuuaaccccaaguacgauuguaagauaaugaccucaaaaacagacgucaguuccagcgugauuaccucucugggugcuaucgucucaugcuauggcaagacuaaaugcacggccaguaacaagaaucgagggaucauuaaaacauucagcaacggaugugauuacguguccaauaagggcguugacaccgugucuguagguaacacuuuauauuacgucaauaagcaagaagggaaaucgcuguaugugaagggagagccuaucauuaacuuuuacgacccccuaguuuucccgagcgaugaauuugacgcguccauaucacaggugaaugagaaaaucaaccagagucucgccuucauuagaaagucugaugaacugcuucacaaugucaacgcaggcaaaagcaccacaaauaucaugaucaccacuauuauaaucgugauuaucguaauuuugcugucccucaucgcugugggccugcuucuguacugcaaggccaggugaggacuaguguccaccugucccuccugggcugcuggauugucucguuuuccugccaaauaaacaggaucagcgcuuuacagaucuaaaaaaaaaaaaaaaaaaaaaaaaaaaaaaaaaaaaaaaaaaaaaaaaaaaaaaaaaaaaaaaaugcaucccccccccccccccccccccccccccccccaaaggcucuuuucagagccaccagaauu

SEQ ID NO: 714 - RNA, 1964 nt, Artificial Sequence
  mRNA product Design e-5 comprising derived and/or modified sequence from HRSV(A2)__F-del (opt4)
gggagagcggcucggccauuuugucccagucaguccggaggcugcggcugcagaaguaccgccugcggaguaacugcaaagaagcuuaccauggagcugcugauccugaaggccaacgccaucaccaccauccugaccgccgugaccuucugcuucgccagcggccagaacaucaccgaggaguucuaccagagcaccugcagcgccgugagcaagggcuaccugagcgcccugagaaccggcugguacaccagcgugaucaccaucgagcugagcaacaucaaggagaacaagugcaacggcaccgacgccaaggugaagcugaucaagcaggagcuggacaaguacaagaacgccgugaccgagcugcagcugcugaugcagagcacccccgccaccaacaacagagccagaagagagcugcccagauucaugaacuacacccugaacaacgccaagaagaccaacgugacccugagcaagaagagaaagagaagauuccugggcuuccugcugggcgugggcagcgccaucgccagcggcguggccgugagcaaggugcugcaccuggagggcgaggugaacaagaucaagagcgcccugcugagcaccaacaaggccguggugagccugagcaacggcgugagcgugcugaccagcaaggugcuggaccugaagaacuacaucgacaagcagcugcugcccaucgugaacaagcagagcugcagcaucagcaacaucgagaccgugaucgaguuccagcagaagaacaacagacugcuggagaucaccagagaguucagcgugaacgccggcgugaccacccccgugagcaccuacaugcugaccaacagcgagcugcugagccugaucaacgacaugcccaucaccaacgaccagaagaagcugaugagcaacaacgugcagaucgugagacagcagagcuacagcaucaugagcaucaucaaggaggaggugcuggccuacguggugcagcugccccuguacggcgugaucgacacccccugcuggaagcugcacaccagcccccugugcaccaccaacaccaaggagggcagcaacaucugccugaccagaaccgacagaggcugguacugcgacaacgccggcagcgugagcuucuucccccaggccgagaccugcaaggugcagagcaacagaguguucugcgacaccaugaacagccugacccugcccagcgaggugaaccugugcaacguggacaucuucaaccccaaguacgacugcaagaucaugaccagcaagaccgacgugagcagcagcgugaucaccagccugggcgccaucgugagcugcuacggcaagaccaagugcaccgccagcaacaagaacagaggcaucaucaagaccuucagcaacggcugcgacuacgugagcaacaagggcguggacaccgugagcgugggcaacacccuguacuacgugaacaagcaggagggcaagagccuguacgugaagggcgagcccaucaucaacuucuacgacccccugguguuccccagcgacgaguucgacgccagcaucagccaggugaacgagaagaucaaccagagccuggccuucaucagaaagagcgacgagcugcugcacaacgugaacgccggcaagagcaccaccaacaucaugaucaccaccaucaucaucgugaucaucgugauccugcugagccugaucgccgugggccugcugcuguacugcaaggccagaugaggacuaguguccaccugucccuccugggcugcuggauugucucguuuuccugccaaauaaacaggaucagcgcuuuacagaucuaaaaaaaaaaaaaaaaaaaaaaaaaaaaaaaaaaaaaaaaaaaaaaaaaaaaaaaaaaaaaaaaugcaucccccccccccccccccccccccccccccccaaaggcucuuuucagagccaccagaauu

SEQ ID NO: 715 - RNA, 1964 nt, Artificial Sequence
  mRNA product Design e-5 comprising derived and/or modified sequence from HRSV(A2)__F-del (opt5)
gggagagcggcucggccauuuugucccagucaguccggaggcugcggcugcagaaguaccgccugcggaguaacugcaaagaagcuuaccauggagcugcucauccugaaggccaacgcuauuaccacaauccuuacggccgugaccuucugcuuugcgagcggccagaauauuacagaagaguucuaccaauccaccuguucugcugucagcaaaggguaucuguccgcccucagaacaggaugguacaccucuguuaucacaauugaacugagcaacaucaaggagaauaaaugcaacggcaccgacgccaaggugaaacuuaucaagcaggaacuggauaaguauaaaaaugcugugacggagcuccagcugcugaugcaguccacccccgccacaaacaaucgggcucgcagagagcucccucgguuuaugaacuacacccugaauaacgccaagaaaacaaaugucacccuuucuaagaaacgcaagagacgguuccugggguuucuccugggagugggcagcgcgauugccuccgggguugcugugagcaagguccuucaccuggaaggagaggugaacaaaaucaagucugcccuccuguccacgaauaaagcuguugugagccugucuaacggcgucuccgugcucacaagcaaggugcuggaccuuaaaaauuauauugauaagcaacugcucccgaucgucaacaaacagucuuguuccauuagcaacaucgaaaccguuauugaguuccagcagaagaauaaccgccugcuugagaucacaagagaauuuuccgugaaugccggcgugaccacccccgucucuacauacaugcugacgaacagcgagcuccugucccugaucaaugacaugccuauuaccaacgaucaaaagaaacucaugagcaauaacgugcagaucguucggcagcagucuuauuccauuaugagcaucauuaaggaagaggugcuggcguacgucgugcaacuuccccuguacgggguuaucgacacaccuugcuggaaacuccauaccucuccccuguguacaaccaauacgaaggaaggaagcaacaucugccuuacacgcaccgauagaggcugguauugugacaaugccggguccgugucuuucuuuccucaggcugagaccugcaaaguccagagcaaccggguguucugugauacaaugaacucccugacccucccgagcgaggucaaucugugcaauguggacauuuuuaaccccaaguacgauuguaagaucaugacaucuaaaacggacguuuccagcucugugauuaccucccugggagccaucgucagcugcuauggcaagacaaaaugcaccgcuuccaacaagaaucgcgggauuaucaaaacauucucuaacggaugugauuacgugagcaauaagggcguugacaccguguccgucggcaacacgcucuauuacgugaauaagcaagaagggaaaucucuguaugugaagggagagccuaucauuaacuuuuacgacccccuuguuuucccuagcgaugaauuugacgccuccaucagccaggucaaugagaaaauuaaccagucucuggccuucaucagaaaguccgaugaacuccugcacaaugugaacgcuggcaaaagcaccacaaauauuaugaucaccacaauuaucaucgugauuaucgucauucugcuuucucucaucgcgguggggcugcugcucuacugcaaggcccggugaggacuaguguccaccugucccuccugggcugcuggauugucucguuuuccugccaaauaaacaggaucagcgcuuuacagaucuaaaaaaaaaaaaaaaaaaaaaaaaaaaaaaaaaaaaaaaaaaaaaaaaaaaaaaaaaaaaaaaaugcaucccccccccccccccccccccccccccccccaaaggcucuuuucagagccaccagaauu

SEQ ID NO: 716 - RNA, 1964 nt, Artificial Sequence
  mRNA product Design e-5 comprising derived and/or modified sequence from HRSV(A2)__F-del (opt6)
gggagagcggcucggccauuuugucccagucaguccggaggcugcggcugcagaaguaccgccugcggaguaacugcaaagaagcuuaccauggaauuacuaauacucaaagccaacgcaauaacaacaauacuaacagcaguaacauucugcuucgcaucaggacaaaacaucacagaagaauuuuaccaaaguacaugcagugcagucucuaaaggauaccucagugccuuacgcacaggaugguacacaucaguaauaacaaucgaacuuucaaacauaaaagaaaacaaaugcaauggaaccgacgccaaaguaaaacuaaucaaacaagaacuagacaaauauaaaaaugcaguaacagaauuacaacuccuaaugcaauccacaccagcaacaaauaacagagcaagacgagaacucccucgauucaugaauuacacauuaaacaacgcaaaaaaaacuaacguaacuuuaucaaaaaaaagaaaacguagauuucuaggauuccuacuaggcguaggguccgccauugcaucaggaguagcaguuagcaaaguauuacauuuagaaggagaaguaaauaaaaucaaaagcgcacuacucucaaccaacaaagcaguaguaucacucucaaacggaguaucaguacuaacauccaaaguacucgaccucaaaaacuacauagacaaacaauuacuacccauaguaaacaaacaaucaugcucuauaucaaauaucgaaacaguaaucgaauuucaacaaaaaaacaaucgacuacuugaaauaacaagagaguucuccgucaaugccggagucaccacaccagucucaacauacaugcuaaccaacucugaacuccuaucacuaauaaaugacaugccaauaacaaacgaccaaaaaaaacuaaugucaaauaacguacaaauaguacgacaacaaaguuauuccauaaugaguauaaucaaagaagaaguguuagcauacguaguccaacuaccauuauauggaguaauagacacaccauguuggaaauuacacaccucaccacucugcacuaccaauacaaaagaaggcucaaauauaugccuaacucgcacagacagaggcugguacugcgauaacgcaggauccguaucuuucuuuccccaagcagaaacuugcaaaguacaaucaaacagagucuucugcgacaccaugaauagucucacauuaccaucugaaguaaaccuauguaacguagauauauucaauccaaaauacgacugcaaaauaaugacaucaaaaaccgacgucucuagcaguguaaucacaucacuaggagcaauaguaagcugcuauggaaaaacaaaauguacagcaucaaacaaaaacaggggaauaauaaaaaccuucucaaacggaugugacuacguaucaaauaaaggcguagacacaguaagcguaggaaacacccuauacuacguuaacaaacaagaagggaaaucauuauacguaaaaggagaaccaauaauaaacuucuacgauccacucguauucccauccgacgaauuugacgccagcauaucccaaguuaacgaaaaaauaaaccaaucacuugcauuuauacgaaaaucugaugaacuucuccacaacguaaaugcaggaaaauccaccaccaauauaaugaucacaacuaucaucauaguaauaaucgucauuuuacuaucauuaauagcaguuggccuacuucuauacugcaaagcaagauaaggacuaguguccaccugucccuccugggcugcuggauugucucguuuuccugccaaauaaacaggaucagcgcuuuacagaucuaaaaaaaaaaaaaaaaaaaaaaaaaaaaaaaaaaaaaaaaaaaaaaaaaaaaaaaaaaaaaaaaugcaucccccccccccccccccccccccccccccccaaaggcucuuuucagagccaccagaauu

SEQ ID NO: 717 - RNA, 1964 nt, Artificial Sequence
  mRNA product Design e-5 comprising derived and/or modified sequence from HRSV(A2)__F-del (opt11)
gggagagcggcucggccauuuugucccagucaguccggaggcugcggcugcagaaguaccgccugcggaguaacugcaaagaagcuuaccauggaacuacuaauccuaaaagccaacgcgaucaccaccauccuaacggcagucaccuucugcuucgcaucaggccaaaacaucacagaagaguucuaccaaagcacaugcuccgccguauccaaaggcuaccucagcgcccuacgcacaggcugguacacaucugucaucaccauagaacucuccaacaucaaagaaaacaaaugcaacggcacugacgccaaaguaaagcugaucaaacaagaacucgacaaauacaaaaacgcagucaccgaacuccaacuacucaugcaauccaccccugcaaccaacaacagggcccgccgcgaacucccccgcuucaugaacuacacuuuaaacaacgccaaaaagaccaacgucacacucagcaagaaacggaaacgacgauuccuaggguuucuccuaggcgucggcucggcaaucgccuccggcgucgccguaagcaaaguacuacaccuagaaggcgaagugaacaaaaucaaaagugcccuucucuccaccaacaaggccguagucucucuauccaacggagucucaguccucaccucaaagguccucgaccucaaaaacuacaucgacaaacaacuacuccccauugucaacaagcagucaugcuccauaucaaacaucgaaaccgucaucgaguuccaacagaaaaacaaccgacuccucgaaauaaccagagaguucucggucaacgccggcgucaccaccccagucagcaccuacaugcucacuaacuccgaacuccuaucccucaucaacgacaugccaauuaccaacgaccaaaagaaacuaaugucgaacaacguucaaaucguccgacaacaaaguuacuccaucaugagcauaaucaaagaagaaguucuagcguacgucguccaacucccacuauacggcgucaucgacacuccgugcuggaaacuccacacaucaccccuauguacaaccaacacaaaagaaggcagcaacaucugccucacccgcaccgaccgagggugguauugcgauaacgcuggcagcgucuccuucuucccccaagccgaaaccugcaaaguccaaucaaacagaguauucugcgacaccaugaacucccuuacucucccuagcgaagucaaccucugcaacguugacauauucaaccccaaauacgacugcaaaaucaugaccuccaagaccgacgucuccuccuccgucaucacaucucuaggugccauugucuccugcuacggaaaaaccaaaugcacagccuccaacaaaaaccgcggcaucauaaaaaccuucuccaacggcugcgacuacgucaguaauaaaggcgucgacacgguauccguugggaauacgcuuuacuacguaaauaaacaagaaggcaaaucccucuacgucaaaggugaacccaucauaaacuucuacgacccgcuuguguucccauccgacgaguucgacgccagcaucagccaggucaacgaaaagaucaaccaaucccuagccuucauccgcaaaagcgacgaacuacuacacaacgucaacgccggaaaauccacaaccaacaucaugaucaccaccaucaucaucgucaucaucguaauccuacucucucucaucgccgucggccuccuacuguacuguaaagcccgauagggacuaguguccaccugucccuccugggcugcuggauugucucguuuuccugccaaauaaacaggaucagcgcuuuacagaucuaaaaaaaaaaaaaaaaaaaaaaaaaaaaaaaaaaaaaaaaaaaaaaaaaaaaaaaaaaaaaaaaugcaucccccccccccccccccccccccccccccccaaaggcucuuuucagagccaccagaauu

SEQ ID NO: 718 - RNA, 2031 nt, Artificial Sequence
  mRNA product Design e-6 comprising derived and/or modified sequence from HRSV(A2)__F-del (artificial)
gggagagcggcucggccauuuugucccagucaguccggaggcugcggcugcagaaguaccgccugcggaguaacugcaaagaagcuuaccauggaguugcuaauccucaaagcaaaugcaauuaccacaauccucacugcagucacauuuuguuuugcuucuggucaaaacaucacugaagaauuuuaucaaucaacaugcagugcaguuagcaaaggcuaucuuagugcucugagaacugguugguauaccaguguuauaacuauagaauuaaguaauaucaaggaaaauaaguguaauggaacagaugcuaagguaaaauugauaaaacaagaauuagauaaauauaaaaaugcuguaacagaauugcaguugcucaugcaaagcacaccagcaacaaacaaucgagccagaagagaacuaccaagguuuaugaauuauacacucaacaaugccaaaaaaaccaauguaacauuaagcaagaaaaggaaaagaagauuucuugguuuuuuguuagguguuggaucugcaaucgccaguggcguugcuguaucuaagguccugcaccuagaaggggaagugaacaagaucaaaagugcucuacuauccacaaacaaggcuguagucagcuuaucaaauggaguuagugucuuaaccagcaaaguguuagaccucaaaaacuauauagauaaacaauuguuaccuauugugaacaagcaaagcugcagcauaucaaauauagaaacugugauagaguuccaacaaaagaacaacagacuacuagagauuaccagggaauuuaguguuaaugcagguguaacuacaccuguaagcacuuacauguuaacuaauagugaauuauugucauuaaucaaugauaugccuauaacaaaugaucagaaaaaguuaauguccaacaauguucaaauaguuagacagcaaaguuacucuaucauguccauaauaaaagaggaagucuuagcauauguaguacaauuaccacuauaugguguuauagauacacccuguuggaaacuacacacauccccucuauguacaaccaacacaaaagaaggguccaacaucuguuuaacaagaacugacagaggaugguacugugacaaugcaggaucaguaucuuucuucccacaagcugaaacauguaaaguucaaucaaaucgaguauuuugugacacaaugaacaguuuaacauuaccaagugaaguaaaucucugcaauguugacauauucaaccccaaauaugauuguaaaauuaugacuucaaaaacagauguaagcagcuccguuaucacaucucuaggagccauugugucaugcuauggcaaaacuaaauguacagcauccaauaaaaaucguggaaucauaaagacauuuucuaacgggugcgauuauguaucaaauaaagggguggacacugugucuguagguaacacauuauauuauguaaauaagcaagaagguaaaagucucuauguaaaaggugaaccaauaauaaauuucuaugacccauuaguauuccccucugaugaauuugaugcaucaauaucucaagucaacgagaagauuaaccagagccuagcauuuauucguaaauccgaugaauuauuacauaauguaaaugcugguaaauccaccacaaauaucaugauaacuacuauaauuauagugauuauaguaauauuguuaucauuaauugcuguuggacugcucuuauacuguaaggccagauaaggacuaguacuggcugcaucucccuuuccucuguccuccauccuucucccaggauggugaagggggaccugguacccagugauccccaccccaggauccuaaaucaugacuuaccugcuaauaaaaacucauuggaaaagugagaagaucuaaaaaaaaaaaaaaaaaaaaaaaaaaaaaaaaaaaaaaaaaaaaaaaaaaaaaaaaaaaaaaaaugcaucccccccccccccccccccccccccccccccaaaggcucuuuucagagccaccagaauu

SEQ ID NO: 719 - RNA, 2031 nt, Artificial Sequence
  mRNA product Design e-6 comprising derived and/or modified sequence from HRSV(A2)__F-del (opt1)
gggagagcggcucggccauuuugucccagucaguccggaggcugcggcugcagaaguaccgccugcggaguaacugcaaagaagcuuaccauggagcugcucauccugaaggccaacgccaucaccaccauccugacggcggugaccuucugcuucgccagcggccagaacaucaccgaggaguucuaccaguccaccugcagcgccgucuccaagggguaccucagcgcccugcggacgggcugguacaccuccgugaucaccaucgagcugagcaacaucaaggagaacaagugcaacgggaccgacgccaaggugaagcucaucaagcaggagcuggacaaguacaagaacgcggucacggagcugcagcuccugaugcaguccaccccggcaaccaacaaccgcgcccggcgcgagcugccccgguucaugaacuacacccucaacaacgccaagaagacgaacgugacccugagcaagaagcgcaagcggcgcuuccugggcuuccuccugggggugggcuccgccaucgcgagcggcgucgccguguccaaggugcugcaccucgagggggaggucaacaagaucaagagcgcccugcuguccaccaacaaggccguggugagccucuccaacggcgucagcgugcugaccuccaaggugcuggaccucaagaacuacaucgacaagcagcugcugcccaucgucaacaagcagagcugcuccaucagcaacaucgagacggugaucgaguuccagcagaagaacaaccggcuccuggagaucacccgcgaguucagcgugaacgccggggucaccacccccguguccacguacaugcugaccaacagcgagcuccugucccugaucaacgacaugccgaucaccaacgaccagaagaagcucaugagcaacaacgugcagaucguccggcagcaguccuacagcaucauguccaucaucaaggaggaggugcuggcguacgugguccagcugccccucuacggcgugaucgacacccccugcuggaagcugcacacgagcccccugugcaccaccaacaccaaggagggguccaacaucugccucacgcgcaccgaccggggcugguacugcgacaacgccggcagcgucuccuucuucccgcaggccgagaccugcaaggugcagagcaaccgcguguucugcgacaccaugaacucccugacgcugcccagcgagguaaaccucugcaacgucgacaucuucaaccccaaguacgacugcaagaucaugaccuccaagaccgacgugagcuccagcgugaucaccucccugggggccaucgucagcugcuacggcaagacgaagugcaccgccagcaacaagaaccgggggaucaucaagaccuucuccaacggcugcgacuacgugagcaacaagggcguggacaccguguccgucgggaacacccuguacuacgugaacaagcaggagggcaagagccucuacgugaagggggagcccaucaucaacuucuacgacccgcuggucuuccccuccgacgaguucgacgcgagcaucucccaggugaacgagaagaucaaccagagccuggccuucauccgcaaguccgacgagcugcuccacaacgugaacgccggcaagagcacgaccaacaucaugaucaccaccaucaucaucgucaucaucgugauccugcugucccucaucgccguggggcugcugcucuacugcaaggcccggugaggacuaguacuggcugcaucucccuuuccucuguccuccauccuucucccaggauggugaagggggaccugguacccagugauccccaccccaggauccuaaaucaugacuuaccugcuaauaaaaacucauuggaaaagugagaagaucuaaaaaaaaaaaaaaaaaaaaaaaaaaaaaaaaaaaaaaaaaaaaaaaaaaaaaaaaaaaaaaaaugcaucccccccccccccccccccccccccccccccaaaggcucuuuucagagccaccagaauu

SEQ ID NO: 720 - RNA, 2031 nt, Artificial Sequence
  mRNA product Design e-6 comprising derived and/or modified sequence from HRSV(A2)__F-del (opt1)
gggagagcggcucggccauuuugucccagucaguccggaggcugcggcugcagaaguaccgccugcggaguaacugcaaagaagcuuaccauggagcugcucauccugaaggccaacgccaucaccaccauccugacggcggugaccuucugcuucgccagcggccagaacaucaccgaggaguucuaccaguccacgugcagcgccgucuccaagggguaccucagcgcccugcgcaccggcugguacaccuccgugaucaccaucgagcugagcaacaucaaggagaacaagugcaacgggaccgacgccaaggugaagcucaucaagcaggagcuggacaaguacaagaacgcggucacggagcugcagcuccugaugcaguccacccccgccaccaacaaccgggcccgccgggagcugccgcgcuucaugaacuacacccucaacaacgccaagaagacgaacgugacccugagcaagaagcggaagcgccgguuccugggcuuccuccugggggugggcuccgcgaucgccagcggcgucgccguguccaaggugcugcaccucgagggggaggucaacaagaucaagagcgcccugcuguccaccaacaaggccguggugagccucuccaacggcgucagcgugcugaccuccaaggugcuggaccucaagaacuacaucgacaagcagcugcugcccaucgucaacaagcagagcugcuccaucagcaacaucgagacggugaucgaguuccagcagaagaacaaccgccuccuggagaucacccgggaguucagcgugaacgcgggggucaccacccccguguccacguacaugcugaccaacagcgagcuccugucccugaucaacgacaugcccaucaccaacgaccagaagaagcucaugagcaacaacgugcagaucguccgccagcaguccuacagcaucauguccaucaucaaggaggaggugcuggccuacgugguccagcugccgcucuacggcgugaucgacacccccugcuggaagcugcacacgagcccccugugcaccaccaacaccaaggagggguccaacaucugccucacgcggaccgaccgcggcugguacugcgacaacgccggcagcgucuccuucuucccccaggccgagaccugcaaggugcagagcaaccggguguucugcgacaccaugaacucccugacgcugccgagcgaggucaaccucugcaacguggacaucuucaaccccaaguacgacugcaagaucaugaccuccaagaccgacgugagcuccagcgucaucaccucccugggggccaucgugagcugcuacggcaagacgaagugcaccgcgagcaacaagaaccgcgggaucaucaagaccuucuccaacggcugcgacuacgugagcaacaagggcgucgacaccguguccguggggaacacccuguacuacgucaacaagcaggagggcaagagccucuacgugaagggggagcccaucaucaacuucuacgacccccugguguucccguccgacgaguucgacgccagcaucucccaggucaacgagaagaucaaccagagccuggccuucauccggaaguccgacgagcuccugcacaacgugaacgccggcaagagcacgaccaacaucaugaucaccaccaucaucaucgugaucaucgucauccugcugucccucaucgccguggggcugcugcucuacugcaaggcgcgcugaggacuaguacuggcugcaucucccuuuccucuguccuccauccuucucccaggauggugaagggggaccugguacccagugauccccaccccaggauccuaaaucaugacuuaccugcuaauaaaaacucauuggaaaagugagaagaucuaaaaaaaaaaaaaaaaaaaaaaaaaaaaaaaaaaaaaaaaaaaaaaaaaaaaaaaaaaaaaaaaugcaucccccccccccccccccccccccccccccccaaaggcucuuuucagagccaccagaauu

SEQ ID NO: 721 - RNA, 2031 nt, Artificial Sequence
  mRNA product Design e-6 comprising derived and/or modified sequence from HRSV(A2)__F-del (opt2)
gggagagcggcucggccauuuugucccagucaguccggaggcugcggcugcagaaguaccgccugcggaguaacugcaaagaagcuuaccauggagcuccucauccucaaggccaacgccaucaccaccauccucaccgccgucaccuucugcuucgccuccggccagaacaucaccgaggaguucuaccaguccaccugcuccgccgucuccaagggcuaccucuccgcccuccgcaccggcugguacaccuccgucaucaccaucgagcucuccaacaucaaggagaacaagugcaacggcaccgacgccaaggucaagcucaucaagcaggagcucgacaaguacaagaacgccgucaccgagcuccagcuccucaugcaguccacccccgccaccaacaaccgcgcccgccgcgagcucccccgcuucaugaacuacacccucaacaacgccaagaagaccaacgucacccucuccaagaagcgcaagcgccgcuuccucggcuuccuccucggcgucggcuccgccaucgccuccggcgucgccgucuccaagguccuccaccucgagggcgaggucaacaagaucaaguccgcccuccucuccaccaacaaggccgucgucucccucuccaacggcgucuccguccucaccuccaagguccucgaccucaagaacuacaucgacaagcagcuccuccccaucgucaacaagcaguccugcuccaucuccaacaucgagaccgucaucgaguuccagcagaagaacaaccgccuccucgagaucacccgcgaguucuccgucaacgccggcgucaccacccccgucuccaccuacaugcucaccaacuccgagcuccucucccucaucaacgacaugcccaucaccaacgaccagaagaagcucauguccaacaacguccagaucguccgccagcaguccuacuccaucauguccaucaucaaggaggagguccucgccuacgucguccagcucccccucuacggcgucaucgacacccccugcuggaagcuccacaccuccccccucugcaccaccaacaccaaggagggcuccaacaucugccucacccgcaccgaccgcggcugguacugcgacaacgccggcuccgucuccuucuucccccaggccgagaccugcaagguccaguccaaccgcgucuucugcgacaccaugaacucccucacccuccccuccgaggucaaccucugcaacgucgacaucuucaaccccaaguacgacugcaagaucaugaccuccaagaccgacgucuccuccuccgucaucaccucccucggcgccaucgucuccugcuacggcaagaccaagugcaccgccuccaacaagaaccgcggcaucaucaagaccuucuccaacggcugcgacuacgucuccaacaagggcgucgacaccgucuccgucggcaacacccucuacuacgucaacaagcaggagggcaagucccucuacgucaagggcgagcccaucaucaacuucuacgacccccucgucuuccccuccgacgaguucgacgccuccaucucccaggucaacgagaagaucaaccagucccucgccuucauccgcaaguccgacgagcuccuccacaacgucaacgccggcaaguccaccaccaacaucaugaucaccaccaucaucaucgucaucaucgucauccuccucucccucaucgccgucggccuccuccucuacugcaaggcccgcugaggacuaguacuggcugcaucucccuuuccucuguccuccauccuucucccaggauggugaagggggaccugguacccagugauccccaccccaggauccuaaaucaugacuuaccugcuaauaaaaacucauuggaaaagugagaagaucuaaaaaaaaaaaaaaaaaaaaaaaaaaaaaaaaaaaaaaaaaaaaaaaaaaaaaaaaaaaaaaaaugcaucccccccccccccccccccccccccccccccaaaggcucuuuucagagccaccagaauu

SEQ ID NO: 722 - RNA, 2031 nt, Artificial Sequence
  mRNA product Design e-6 comprising derived and/or modified sequence from HRSV(A2)__F-del (opt3)
gggagagcggcucggccauuuugucccagucaguccggaggcugcggcugcagaaguaccgccugcggaguaacugcaaagaagcuuaccauggagcugcucauccuuaaggccaacgcuauuaccacaauacugacugcagugacguucugcuuugccagcggccagaauaucaccgaagaguucuaccaauccacauguucugcggucucaaaaggguauuugagugcuuuaagaacuggaugguacaccagcguuauuacaaucgaacuguccaacauuaaggagaauaaaugcaacgguaccgacgccaaggugaaacuaaucaagcaggaacucgauaaguauaaaaaugcaguaacugagcugcagcuucugaugcagucuacacccgccaccaacaauagggcucggcgcgaguugccucgauuuaugaacuacacgcucaauaacgcaaagaaaacuaaugugacccugucgaagaaacguaagagaagguuccugggcuuucucuuaggggucggaucagccauagcuagcggcguggccguuaguaaggugcugcaccuugaaggugaggucaacaaaaucaaguccgcguugcugucuacaaauaaagcagugguaagccuauccaacgggguuucagugcucacuucuaagguccuggaccuuaaaaauuauauugauaagcaacuguugccaaucgugaacaaacagagcuguucuauuuccaacaucgaaaccgugauagaguuccagcagaagaauaaccggcuccuggagauuacacgcgaauuuucagucaaugccggaguuaccacgccggugagcacuuacauguuaacaaacagugagcugcucucucuuaucaaugacaugcccauuaccaacgaucaaaagaaacugauguccaauaacguacagaucgugagacagcagagcuauucgaucaugucuauuauaaaggaagaggucuuggcuuacgugguucaacuaccucuguacggcgugaucgacacuccaugcuggaaacuccauacauccccacuguguaccacgaauaccaaggaaggcucaaacauuugccuuacaaggacugaucgggggugguauugugacaaugccggaagugucagcuucuuuccucaggcagagaccugcaaagugcaguccaaccgcguauucugugauacaaugaauagucugacuuugccaagcgagguuaaccucugcaauguggacaucuuuaaccccaaguacgauuguaagauaaugaccucaaaaacagacgucaguuccagcgugauuaccucucugggugcuaucgucucaugcuauggcaagacuaaaugcacggccaguaacaagaaucgagggaucauuaaaacauucagcaacggaugugauuacguguccaauaagggcguugacaccgugucuguagguaacacuuuauauuacgucaauaagcaagaagggaaaucgcuguaugugaagggagagccuaucauuaacuuuuacgacccccuaguuuucccgagcgaugaauuugacgcguccauaucacaggugaaugagaaaaucaaccagagucucgccuucauuagaaagucugaugaacugcuucacaaugucaacgcaggcaaaagcaccacaaauaucaugaucaccacuauuauaaucgugauuaucguaauuuugcugucccucaucgcugugggccugcuucuguacugcaaggccaggugaggacuaguacuggcugcaucucccuuuccucuguccuccauccuucucccaggauggugaagggggaccugguacccagugauccccaccccaggauccuaaaucaugacuuaccugcuaauaaaaacucauuggaaaagugagaagaucuaaaaaaaaaaaaaaaaaaaaaaaaaaaaaaaaaaaaaaaaaaaaaaaaaaaaaaaaaaaaaaaaugcaucccccccccccccccccccccccccccccccaaaggcucuuuucagagccaccagaauu

SEQ ID NO: 723 - RNA, 2031 nt, Artificial Sequence
  mRNA product Design e-6 comprising derived and/or modified sequence from HRSV(A2)__F-del (opt4)
gggagagcggcucggccauuuugucccagucaguccggaggcugcggcugcagaaguaccgccugcggaguaacugcaaagaagcuuaccauggagcugcugauccugaaggccaacgccaucaccaccauccugaccgccgugaccuucugcuucgccagcggccagaacaucaccgaggaguucuaccagagcaccugcagcgccgugagcaagggcuaccugagcgcccugagaaccggcugguacaccagcgugaucaccaucgagcugagcaacaucaaggagaacaagugcaacggcaccgacgccaaggugaagcugaucaagcaggagcuggacaaguacaagaacgccgugaccgagcugcagcugcugaugcagagcacccccgccaccaacaacagagccagaagagagcugcccagauucaugaacuacacccugaacaacgccaagaagaccaacgugacccugagcaagaagagaaagagaagauuccugggcuuccugcugggcgugggcagcgccaucgccagcggcguggccgugagcaaggugcugcaccuggagggcgaggugaacaagaucaagagcgcccugcugagcaccaacaaggccguggugagccugagcaacggcgugagcgugcugaccagcaaggugcuggaccugaagaacuacaucgacaagcagcugcugcccaucgugaacaagcagagcugcagcaucagcaacaucgagaccgugaucgaguuccagcagaagaacaacagacugcuggagaucaccagagaguucagcgugaacgccggcgugaccacccccgugagcaccuacaugcugaccaacagcgagcugcugagccugaucaacgacaugcccaucaccaacgaccagaagaagcugaugagcaacaacgugcagaucgugagacagcagagcuacagcaucaugagcaucaucaaggaggaggugcuggccuacguggugcagcugccccuguacggcgugaucgacacccccugcuggaagcugcacaccagcccccugugcaccaccaacaccaaggagggcagcaacaucugccugaccagaaccgacagaggcugguacugcgacaacgccggcagcgugagcuucuucccccaggccgagaccugcaaggugcagagcaacagaguguucugcgacaccaugaacagccugacccugcccagcgaggugaaccugugcaacguggacaucuucaaccccaaguacgacugcaagaucaugaccagcaagaccgacgugagcagcagcgugaucaccagccugggcgccaucgugagcugcuacggcaagaccaagugcaccgccagcaacaagaacagaggcaucaucaagaccuucagcaacggcugcgacuacgugagcaacaagggcguggacaccgugagcgugggcaacacccuguacuacgugaacaagcaggagggcaagagccuguacgugaagggcgagcccaucaucaacuucuacgacccccugguguuccccagcgacgaguucgacgccagcaucagccaggugaacgagaagaucaaccagagccuggccuucaucagaaagagcgacgagcugcugcacaacgugaacgccggcaagagcaccaccaacaucaugaucaccaccaucaucaucgugaucaucgugauccugcugagccugaucgccgugggccugcugcuguacugcaaggccagaugaggacuaguacuggcugcaucucccuuuccucuguccuccauccuucucccaggauggugaagggggaccugguacccagugauccccaccccaggauccuaaaucaugacuuaccugcuaauaaaaacucauuggaaaagugagaagaucuaaaaaaaaaaaaaaaaaaaaaaaaaaaaaaaaaaaaaaaaaaaaaaaaaaaaaaaaaaaaaaaaugcaucccccccccccccccccccccccccccccccaaaggcucuuuucagagccaccagaauu

SEQ ID NO: 724 - RNA, 2031 nt, Artificial Sequence
  mRNA product Design e-6 comprising derived and/or modified sequence from HRSV(A2)__F-del (opt5)
gggagagcggcucggccauuuugucccagucaguccggaggcugcggcugcagaaguaccgccugcggaguaacugcaaagaagcuuaccauggagcugcucauccugaaggccaacgcuauuaccacaauccuuacggccgugaccuucugcuuugcgagcggccagaauauuacagaagaguucuaccaauccaccuguucugcugucagcaaaggguaucuguccgcccucagaacaggaugguacaccucuguuaucacaauugaacugagcaacaucaaggagaauaaaugcaacggcaccgacgccaaggugaaacuuaucaagcaggaacuggauaaguauaaaaaugcugugacggagcuccagcugcugaugcaguccacccccgccacaaacaaucgggcucgcagagagcucccucgguuuaugaacuacacccugaauaacgccaagaaaacaaaugucacccuuucuaagaaacgcaagagacgguuccugggguuucuccugggagugggcagcgcgauugccuccgggguugcugugagcaagguccuucaccuggaaggagaggugaacaaaaucaagucugcccuccuguccacgaauaaagcuguugugagccugucuaacggcgucuccgugcucacaagcaaggugcuggaccuuaaaaauuauauugauaagcaacugcucccgaucgucaacaaacagucuuguuccauuagcaacaucgaaaccguuauugaguuccagcagaagaauaaccgccugcuugagaucacaagagaauuuuccgugaaugccggcgugaccacccccgucucuacauacaugcugacgaacagcgagcuccugucccugaucaaugacaugccuauuaccaacgaucaaaagaaacucaugagcaauaacgugcagaucguucggcagcagucuuauuccauuaugagcaucauuaaggaagaggugcuggcguacgucgugcaacuuccccuguacgggguuaucgacacaccuugcuggaaacuccauaccucuccccuguguacaaccaauacgaaggaaggaagcaacaucugccuuacacgcaccgauagaggcugguauugugacaaugccggguccgugucuuucuuuccucaggcugagaccugcaaaguccagagcaaccggguguucugugauacaaugaacucccugacccucccgagcgaggucaaucugugcaauguggacauuuuuaaccccaaguacgauuguaagaucaugacaucuaaaacggacguuuccagcucugugauuaccucccugggagccaucgucagcugcuauggcaagacaaaaugcaccgcuuccaacaagaaucgcgggauuaucaaaacauucucuaacggaugugauuacgugagcaauaagggcguugacaccguguccgucggcaacacgcucuauuacgugaauaagcaagaagggaaaucucuguaugugaagggagagccuaucauuaacuuuuacgacccccuuguuuucccuagcgaugaauuugacgccuccaucagccaggucaaugagaaaauuaaccagucucuggccuucaucagaaaguccgaugaacuccugcacaaugugaacgcuggcaaaagcaccacaaauauuaugaucaccacaauuaucaucgugauuaucgucauucugcuuucucucaucgcgguggggcugcugcucuacugcaaggcccggugaggacuaguacuggcugcaucucccuuuccucuguccuccauccuucucccaggauggugaagggggaccugguacccagugauccccaccccaggauccuaaaucaugacuuaccugcuaauaaaaacucauuggaaaagugagaagaucuaaaaaaaaaaaaaaaaaaaaaaaaaaaaaaaaaaaaaaaaaaaaaaaaaaaaaaaaaaaaaaaaugcaucccccccccccccccccccccccccccccccaaaggcucuuuucagagccaccagaauu

SEQ ID NO: 725 - RNA, 2031 nt, Artificial Sequence
  mRNA product Design e-6 comprising derived and/or modified sequence from HRSV(A2)__F-del (opt6)
gggagagcggcucggccauuuugucccagucaguccggaggcugcggcugcagaaguaccgccugcggaguaacugcaaagaagcuuaccauggaauuacuaauacucaaagccaacgcaauaacaacaauacuaacagcaguaacauucugcuucgcaucaggacaaaacaucacagaagaauuuuaccaaaguacaugcagugcagucucuaaaggauaccucagugccuuacgcacaggaugguacacaucaguaauaacaaucgaacuuucaaacauaaaagaaaacaaaugcaauggaaccgacgccaaaguaaaacuaaucaaacaagaacuagacaaauauaaaaaugcaguaacagaauuacaacuccuaaugcaauccacaccagcaacaaauaacagagcaagacgagaacucccucgauucaugaauuacacauuaaacaacgcaaaaaaaacuaacguaacuuuaucaaaaaaaagaaaacguagauuucuaggauuccuacuaggcguaggguccgccauugcaucaggaguagcaguuagcaaaguauuacauuuagaaggagaaguaaauaaaaucaaaagcgcacuacucucaaccaacaaagcaguaguaucacucucaaacggaguaucaguacuaacauccaaaguacucgaccucaaaaacuacauagacaaacaauuacuacccauaguaaacaaacaaucaugcucuauaucaaauaucgaaacaguaaucgaauuucaacaaaaaaacaaucgacuacuugaaauaacaagagaguucuccgucaaugccggagucaccacaccagucucaacauacaugcuaaccaacucugaacuccuaucacuaauaaaugacaugccaauaacaaacgaccaaaaaaaacuaaugucaaauaacguacaaauaguacgacaacaaaguuauuccauaaugaguauaaucaaagaagaaguguuagcauacguaguccaacuaccauuauauggaguaauagacacaccauguuggaaauuacacaccucaccacucugcacuaccaauacaaaagaaggcucaaauauaugccuaacucgcacagacagaggcugguacugcgauaacgcaggauccguaucuuucuuuccccaagcagaaacuugcaaaguacaaucaaacagagucuucugcgacaccaugaauagucucacauuaccaucugaaguaaaccuauguaacguagauauauucaauccaaaauacgacugcaaaauaaugacaucaaaaaccgacgucucuagcaguguaaucacaucacuaggagcaauaguaagcugcuauggaaaaacaaaauguacagcaucaaacaaaaacaggggaauaauaaaaaccuucucaaacggaugugacuacguaucaaauaaaggcguagacacaguaagcguaggaaacacccuauacuacguuaacaaacaagaagggaaaucauuauacguaaaaggagaaccaauaauaaacuucuacgauccacucguauucccauccgacgaauuugacgccagcauaucccaaguuaacgaaaaaauaaaccaaucacuugcauuuauacgaaaaucugaugaacuucuccacaacguaaaugcaggaaaauccaccaccaauauaaugaucacaacuaucaucauaguaauaaucgucauuuuacuaucauuaauagcaguuggccuacuucuauacugcaaagcaagauaaggacuaguacuggcugcaucucccuuuccucuguccuccauccuucucccaggauggugaagggggaccugguacccagugauccccaccccaggauccuaaaucaugacuuaccugcuaauaaaaacucauuggaaaagugagaagaucuaaaaaaaaaaaaaaaaaaaaaaaaaaaaaaaaaaaaaaaaaaaaaaaaaaaaaaaaaaaaaaaaugcaucccccccccccccccccccccccccccccccaaaggcucuuuucagagccaccagaauu

SEQ ID NO: 726 - RNA, 2031 nt, Artificial Sequence
  mRNA product Design e-6 comprising derived and/or modified sequence from HRSV(A2)__F-del (opt11)
gggagagcggcucggccauuuugucccagucaguccggaggcugcggcugcagaaguaccgccugcggaguaacugcaaagaagcuuaccauggaacuacuaauccuaaaagccaacgcgaucaccaccauccuaacggcagucaccuucugcuucgcaucaggccaaaacaucacagaagaguucuaccaaagcacaugcuccgccguauccaaaggcuaccucagcgcccuacgcacaggcugguacacaucugucaucaccauagaacucuccaacaucaaagaaaacaaaugcaacggcacugacgccaaaguaaagcugaucaaacaagaacucgacaaauacaaaaacgcagucaccgaacuccaacuacucaugcaauccaccccugcaaccaacaacagggcccgccgcgaacucccccgcuucaugaacuacacuuuaaacaacgccaaaaagaccaacgucacacucagcaagaaacggaaacgacgauuccuaggguuucuccuaggcgucggcucggcaaucgccuccggcgucgccguaagcaaaguacuacaccuagaaggcgaagugaacaaaaucaaaagugcccuucucuccaccaacaaggccguagucucucuauccaacggagucucaguccucaccucaaagguccucgaccucaaaaacuacaucgacaaacaacuacuccccauugucaacaagcagucaugcuccauaucaaacaucgaaaccgucaucgaguuccaacagaaaaacaaccgacuccucgaaauaaccagagaguucucggucaacgccggcgucaccaccccagucagcaccuacaugcucacuaacuccgaacuccuaucccucaucaacgacaugccaauuaccaacgaccaaaagaaacuaaugucgaacaacguucaaaucguccgacaacaaaguuacuccaucaugagcauaaucaaagaagaaguucuagcguacgucguccaacucccacuauacggcgucaucgacacuccgugcuggaaacuccacacaucaccccuauguacaaccaacacaaaagaaggcagcaacaucugccucacccgcaccgaccgagggugguauugcgauaacgcuggcagcgucuccuucuucccccaagccgaaaccugcaaaguccaaucaaacagaguauucugcgacaccaugaacucccuuacucucccuagcgaagucaaccucugcaacguugacauauucaaccccaaauacgacugcaaaaucaugaccuccaagaccgacgucuccuccuccgucaucacaucucuaggugccauugucuccugcuacggaaaaaccaaaugcacagccuccaacaaaaaccgcggcaucauaaaaaccuucuccaacggcugcgacuacgucaguaauaaaggcgucgacacgguauccguugggaauacgcuuuacuacguaaauaaacaagaaggcaaaucccucuacgucaaaggugaacccaucauaaacuucuacgacccgcuuguguucccauccgacgaguucgacgccagcaucagccaggucaacgaaaagaucaaccaaucccuagccuucauccgcaaaagcgacgaacuacuacacaacgucaacgccggaaaauccacaaccaacaucaugaucaccaccaucaucaucgucaucaucguaauccuacucucucucaucgccgucggccuccuacuguacuguaaagcccgauagggacuaguacuggcugcaucucccuuuccucuguccuccauccuucucccaggauggugaagggggaccugguacccagugauccccaccccaggauccuaaaucaugacuuaccugcuaauaaaaacucauuggaaaagugagaagaucuaaaaaaaaaaaaaaaaaaaaaaaaaaaaaaaaaaaaaaaaaaaaaaaaaaaaaaaaaaaaaaaaugcaucccccccccccccccccccccccccccccccaaaggcucuuuucagagccaccagaauu

SEQ ID NO: 727 - RNA, 2247 nt, Artificial Sequence
  mRNA product Design f-1 comprising derived and/or modified sequence from HRSV(A2)__F-del (artificial)
gggagagcggcucggccauuuugucccagucaguccggaggcugcggcugcagaaguaccgccugcggaguaacugcaaagaagcuuaccauggaguugcuaauccucaaagcaaaugcaauuaccacaauccucacugcagucacauuuuguuuugcuucuggucaaaacaucacugaagaauuuuaucaaucaacaugcagugcaguuagcaaaggcuaucuuagugcucugagaacugguugguauaccaguguuauaacuauagaauuaaguaauaucaaggaaaauaaguguaauggaacagaugcuaagguaaaauugauaaaacaagaauuagauaaauauaaaaaugcuguaacagaauugcaguugcucaugcaaagcacaccagcaacaaacaaucgagccagaagagaacuaccaagguuuaugaauuauacacucaacaaugccaaaaaaaccaauguaacauuaagcaagaaaaggaaaagaagauuucuugguuuuuuguuagguguuggaucugcaaucgccaguggcguugcuguaucuaagguccugcaccuagaaggggaagugaacaagaucaaaagugcucuacuauccacaaacaaggcuguagucagcuuaucaaauggaguuagugucuuaaccagcaaaguguuagaccucaaaaacuauauagauaaacaauuguuaccuauugugaacaagcaaagcugcagcauaucaaauauagaaacugugauagaguuccaacaaaagaacaacagacuacuagagauuaccagggaauuuaguguuaaugcagguguaacuacaccuguaagcacuuacauguuaacuaauagugaauuauugucauuaaucaaugauaugccuauaacaaaugaucagaaaaaguuaauguccaacaauguucaaauaguuagacagcaaaguuacucuaucauguccauaauaaaagaggaagucuuagcauauguaguacaauuaccacuauaugguguuauagauacacccuguuggaaacuacacacauccccucuauguacaaccaacacaaaagaaggguccaacaucuguuuaacaagaacugacagaggaugguacugugacaaugcaggaucaguaucuuucuucccacaagcugaaacauguaaaguucaaucaaaucgaguauuuugugacacaaugaacaguuuaacauuaccaagugaaguaaaucucugcaauguugacauauucaaccccaaauaugauuguaaaauuaugacuucaaaaacagauguaagcagcuccguuaucacaucucuaggagccauugugucaugcuauggcaaaacuaaauguacagcauccaauaaaaaucguggaaucauaaagacauuuucuaacgggugcgauuauguaucaaauaaagggguggacacugugucuguagguaacacauuauauuauguaaauaagcaagaagguaaaagucucuauguaaaaggugaaccaauaauaaauuucuaugacccauuaguauuccccucugaugaauuugaugcaucaauaucucaagucaacgagaagauuaaccagagccuagcauuuauucguaaauccgaugaauuauuacauaauguaaaugcugguaaauccaccacaaauaucaugauaacuacuauaauuauagugauuauaguaauauuguuaucauuaauugcuguuggacugcucuuauacuguaaggccagauaaggacuagugaagggaacacccaaauuuaauucagccuuaagcacaauuaauuaagagugaaacguaauuguacaagcaguuggucacccaccauagggcaugaucaacaccgcaaccuuuccuuuuucccccagugauucugaaaaaccccucuucccuucagcuugcuuagauguuccaaauuuaguaagcuuaaggcggccuacagaagaaaaagaaaaaaaaggccacaaaaguucccucucacuuucaguaaauaaaauaaaagcagcaacagaaauaaagaaauaaaugaaauucaaaaugaaauaaauauuguguugugcagcauuaaaaaaucaauaaaaauuaaaaaugagcaagaucuaaaaaaaaaaaaaaaaaaaaaaaaaaaaaaaaaaaaaaaaaaaaaaaaaaaaaaaaaaaaaaaaugcaucccccccccccccccccccccccccccccccaaaggcucuuuucagagccaccagaauu

SEQ ID NO: 728 - RNA, 2247 nt, Artificial Sequence
  mRNA product Design f-1 comprising derived and/or modified sequence from HRSV(A2)__F-del (opt1)
gggagagcggcucggccauuuugucccagucaguccggaggcugcggcugcagaaguaccgccugcggaguaacugcaaagaagcuuaccauggagcugcucauccugaaggccaacgccaucaccaccauccugacggcggugaccuucugcuucgccagcggccagaacaucaccgaggaguucuaccaguccaccugcagcgccgucuccaagggguaccucagcgcccugcggacgggcugguacaccuccgugaucaccaucgagcugagcaacaucaaggagaacaagugcaacgggaccgacgccaaggugaagcucaucaagcaggagcuggacaaguacaagaacgcggucacggagcugcagcuccugaugcaguccaccccggcaaccaacaaccgcgcccggcgcgagcugccccgguucaugaacuacacccucaacaacgccaagaagacgaacgugacccugagcaagaagcgcaagcggcgcuuccugggcuuccuccugggggugggcuccgccaucgcgagcggcgucgccguguccaaggugcugcaccucgagggggaggucaacaagaucaagagcgcccugcuguccaccaacaaggccguggugagccucuccaacggcgucagcgugcugaccuccaaggugcuggaccucaagaacuacaucgacaagcagcugcugcccaucgucaacaagcagagcugcuccaucagcaacaucgagacggugaucgaguuccagcagaagaacaaccggcuccuggagaucacccgcgaguucagcgugaacgccggggucaccacccccguguccacguacaugcugaccaacagcgagcuccugucccugaucaacgacaugccgaucaccaacgaccagaagaagcucaugagcaacaacgugcagaucguccggcagcaguccuacagcaucauguccaucaucaaggaggaggugcuggcguacgugguccagcugccccucuacggcgugaucgacacccccugcuggaagcugcacacgagcccccugugcaccaccaacaccaaggagggguccaacaucugccucacgcgcaccgaccggggcugguacugcgacaacgccggcagcgucuccuucuucccgcaggccgagaccugcaaggugcagagcaaccgcguguucugcgacaccaugaacucccugacgcugcccagcgagguaaaccucugcaacgucgacaucuucaaccccaaguacgacugcaagaucaugaccuccaagaccgacgugagcuccagcgugaucaccucccugggggccaucgucagcugcuacggcaagacgaagugcaccgccagcaacaagaaccgggggaucaucaagaccuucuccaacggcugcgacuacgugagcaacaagggcguggacaccguguccgucgggaacacccuguacuacgugaacaagcaggagggcaagagccucuacgugaagggggagcccaucaucaacuucuacgacccgcuggucuuccccuccgacgaguucgacgcgagcaucucccaggugaacgagaagaucaaccagagccuggccuucauccgcaaguccgacgagcugcuccacaacgugaacgccggcaagagcacgaccaacaucaugaucaccaccaucaucaucgucaucaucgugauccugcugucccucaucgccguggggcugcugcucuacugcaaggcccggugaggacuagugaagggaacacccaaauuuaauucagccuuaagcacaauuaauuaagagugaaacguaauuguacaagcaguuggucacccaccauagggcaugaucaacaccgcaaccuuuccuuuuucccccagugauucugaaaaaccccucuucccuucagcuugcuuagauguuccaaauuuaguaagcuuaaggcggccuacagaagaaaaagaaaaaaaaggccacaaaaguucccucucacuuucaguaaauaaaauaaaagcagcaacagaaauaaagaaauaaaugaaauucaaaaugaaauaaauauuguguugugcagcauuaaaaaaucaauaaaaauuaaaaaugagcaagaucuaaaaaaaaaaaaaaaaaaaaaaaaaaaaaaaaaaaaaaaaaaaaaaaaaaaaaaaaaaaaaaaaugcaucccccccccccccccccccccccccccccccaaaggcucuuuucagagccaccagaauu

SEQ ID NO: 729 - RNA, 2247 nt, Artificial Sequence
  mRNA product Design f-1 comprising derived and/or modified sequence from HRSV(A2)__F-del (opt1)
gggagagcggcucggccauuuugucccagucaguccggaggcugcggcugcagaaguaccgccugcggaguaacugcaaagaagcuuaccauggagcugcucauccugaaggccaacgccaucaccaccauccugacggcggugaccuucugcuucgccagcggccagaacaucaccgaggaguucuaccaguccacgugcagcgccgucuccaagggguaccucagcgcccugcgcaccggcugguacaccuccgugaucaccaucgagcugagcaacaucaaggagaacaagugcaacgggaccgacgccaaggugaagcucaucaagcaggagcuggacaaguacaagaacgcggucacggagcugcagcuccugaugcaguccacccccgccaccaacaaccgggcccgccgggagcugccgcgcuucaugaacuacacccucaacaacgccaagaagacgaacgugacccugagcaagaagcggaagcgccgguuccugggcuuccuccugggggugggcuccgcgaucgccagcggcgucgccguguccaaggugcugcaccucgagggggaggucaacaagaucaagagcgcccugcuguccaccaacaaggccguggugagccucuccaacggcgucagcgugcugaccuccaaggugcuggaccucaagaacuacaucgacaagcagcugcugcccaucgucaacaagcagagcugcuccaucagcaacaucgagacggugaucgaguuccagcagaagaacaaccgccuccuggagaucacccgggaguucagcgugaacgcgggggucaccacccccguguccacguacaugcugaccaacagcgagcuccugucccugaucaacgacaugcccaucaccaacgaccagaagaagcucaugagcaacaacgugcagaucguccgccagcaguccuacagcaucauguccaucaucaaggaggaggugcuggccuacgugguccagcugccgcucuacggcgugaucgacacccccugcuggaagcugcacacgagcccccugugcaccaccaacaccaaggagggguccaacaucugccucacgcggaccgaccgcggcugguacugcgacaacgccggcagcgucuccuucuucccccaggccgagaccugcaaggugcagagcaaccggguguucugcgacaccaugaacucccugacgcugccgagcgaggucaaccucugcaacguggacaucuucaaccccaaguacgacugcaagaucaugaccuccaagaccgacgugagcuccagcgucaucaccucccugggggccaucgugagcugcuacggcaagacgaagugcaccgcgagcaacaagaaccgcgggaucaucaagaccuucuccaacggcugcgacuacgugagcaacaagggcgucgacaccguguccguggggaacacccuguacuacgucaacaagcaggagggcaagagccucuacgugaagggggagcccaucaucaacuucuacgacccccugguguucccguccgacgaguucgacgccagcaucucccaggucaacgagaagaucaaccagagccuggccuucauccggaaguccgacgagcuccugcacaacgugaacgccggcaagagcacgaccaacaucaugaucaccaccaucaucaucgugaucaucgucauccugcugucccucaucgccguggggcugcugcucuacugcaaggcgcgcugaggacuagugaagggaacacccaaauuuaauucagccuuaagcacaauuaauuaagagugaaacguaauuguacaagcaguuggucacccaccauagggcaugaucaacaccgcaaccuuuccuuuuucccccagugauucugaaaaaccccucuucccuucagcuugcuuagauguuccaaauuuaguaagcuuaaggcggccuacagaagaaaaagaaaaaaaaggccacaaaaguucccucucacuuucaguaaauaaaauaaaagcagcaacagaaauaaagaaauaaaugaaauucaaaaugaaauaaauauuguguugugcagcauuaaaaaaucaauaaaaauuaaaaaugagcaagaucuaaaaaaaaaaaaaaaaaaaaaaaaaaaaaaaaaaaaaaaaaaaaaaaaaaaaaaaaaaaaaaaaugcaucccccccccccccccccccccccccccccccaaaggcucuuuucagagccaccagaauu

SEQ ID NO: 730 - RNA, 2247 nt, Artificial Sequence
  mRNA product Design f-1 comprising derived and/or modified sequence from HRSV(A2)__F-del (opt2)
gggagagcggcucggccauuuugucccagucaguccggaggcugcggcugcagaaguaccgccugcggaguaacugcaaagaagcuuaccauggagcuccucauccucaaggccaacgccaucaccaccauccucaccgccgucaccuucugcuucgccuccggccagaacaucaccgaggaguucuaccaguccaccugcuccgccgucuccaagggcuaccucuccgcccuccgcaccggcugguacaccuccgucaucaccaucgagcucuccaacaucaaggagaacaagugcaacggcaccgacgccaaggucaagcucaucaagcaggagcucgacaaguacaagaacgccgucaccgagcuccagcuccucaugcaguccacccccgccaccaacaaccgcgcccgccgcgagcucccccgcuucaugaacuacacccucaacaacgccaagaagaccaacgucacccucuccaagaagcgcaagcgccgcuuccucggcuuccuccucggcgucggcuccgccaucgccuccggcgucgccgucuccaagguccuccaccucgagggcgaggucaacaagaucaaguccgcccuccucuccaccaacaaggccgucgucucccucuccaacggcgucuccguccucaccuccaagguccucgaccucaagaacuacaucgacaagcagcuccuccccaucgucaacaagcaguccugcuccaucuccaacaucgagaccgucaucgaguuccagcagaagaacaaccgccuccucgagaucacccgcgaguucuccgucaacgccggcgucaccacccccgucuccaccuacaugcucaccaacuccgagcuccucucccucaucaacgacaugcccaucaccaacgaccagaagaagcucauguccaacaacguccagaucguccgccagcaguccuacuccaucauguccaucaucaaggaggagguccucgccuacgucguccagcucccccucuacggcgucaucgacacccccugcuggaagcuccacaccuccccccucugcaccaccaacaccaaggagggcuccaacaucugccucacccgcaccgaccgcggcugguacugcgacaacgccggcuccgucuccuucuucccccaggccgagaccugcaagguccaguccaaccgcgucuucugcgacaccaugaacucccucacccuccccuccgaggucaaccucugcaacgucgacaucuucaaccccaaguacgacugcaagaucaugaccuccaagaccgacgucuccuccuccgucaucaccucccucggcgccaucgucuccugcuacggcaagaccaagugcaccgccuccaacaagaaccgcggcaucaucaagaccuucuccaacggcugcgacuacgucuccaacaagggcgucgacaccgucuccgucggcaacacccucuacuacgucaacaagcaggagggcaagucccucuacgucaagggcgagcccaucaucaacuucuacgacccccucgucuuccccuccgacgaguucgacgccuccaucucccaggucaacgagaagaucaaccagucccucgccuucauccgcaaguccgacgagcuccuccacaacgucaacgccggcaaguccaccaccaacaucaugaucaccaccaucaucaucgucaucaucgucauccuccucucccucaucgccgucggccuccuccucuacugcaaggcccgcugaggacuagugaagggaacacccaaauuuaauucagccuuaagcacaauuaauuaagagugaaacguaauuguacaagcaguuggucacccaccauagggcaugaucaacaccgcaaccuuuccuuuuucccccagugauucugaaaaaccccucuucccuucagcuugcuuagauguuccaaauuuaguaagcuuaaggcggccuacagaagaaaaagaaaaaaaaggccacaaaaguucccucucacuuucaguaaauaaaauaaaagcagcaacagaaauaaagaaauaaaugaaauucaaaaugaaauaaauauuguguugugcagcauuaaaaaaucaauaaaaauuaaaaaugagcaagaucuaaaaaaaaaaaaaaaaaaaaaaaaaaaaaaaaaaaaaaaaaaaaaaaaaaaaaaaaaaaaaaaaugcaucccccccccccccccccccccccccccccccaaaggcucuuuucagagccaccagaauu

SEQ ID NO: 731 - RNA, 2247 nt, Artificial Sequence
  mRNA product Design f-1 comprising derived and/or modified sequence from HRSV(A2)__F-del (opt3)
gggagagcggcucggccauuuugucccagucaguccggaggcugcggcugcagaaguaccgccugcggaguaacugcaaagaagcuuaccauggagcugcucauccuuaaggccaacgcuauuaccacaauacugacugcagugacguucugcuuugccagcggccagaauaucaccgaagaguucuaccaauccacauguucugcggucucaaaaggguauuugagugcuuuaagaacuggaugguacaccagcguuauuacaaucgaacuguccaacauuaaggagaauaaaugcaacgguaccgacgccaaggugaaacuaaucaagcaggaacucgauaaguauaaaaaugcaguaacugagcugcagcuucugaugcagucuacacccgccaccaacaauagggcucggcgcgaguugccucgauuuaugaacuacacgcucaauaacgcaaagaaaacuaaugugacccugucgaagaaacguaagagaagguuccugggcuuucucuuaggggucggaucagccauagcuagcggcguggccguuaguaaggugcugcaccuugaaggugaggucaacaaaaucaaguccgcguugcugucuacaaauaaagcagugguaagccuauccaacgggguuucagugcucacuucuaagguccuggaccuuaaaaauuauauugauaagcaacuguugccaaucgugaacaaacagagcuguucuauuuccaacaucgaaaccgugauagaguuccagcagaagaauaaccggcuccuggagauuacacgcgaauuuucagucaaugccggaguuaccacgccggugagcacuuacauguuaacaaacagugagcugcucucucuuaucaaugacaugcccauuaccaacgaucaaaagaaacugauguccaauaacguacagaucgugagacagcagagcuauucgaucaugucuauuauaaaggaagaggucuuggcuuacgugguucaacuaccucuguacggcgugaucgacacuccaugcuggaaacuccauacauccccacuguguaccacgaauaccaaggaaggcucaaacauuugccuuacaaggacugaucgggggugguauugugacaaugccggaagugucagcuucuuuccucaggcagagaccugcaaagugcaguccaaccgcguauucugugauacaaugaauagucugacuuugccaagcgagguuaaccucugcaauguggacaucuuuaaccccaaguacgauuguaagauaaugaccucaaaaacagacgucaguuccagcgugauuaccucucugggugcuaucgucucaugcuauggcaagacuaaaugcacggccaguaacaagaaucgagggaucauuaaaacauucagcaacggaugugauuacguguccaauaagggcguugacaccgugucuguagguaacacuuuauauuacgucaauaagcaagaagggaaaucgcuguaugugaagggagagccuaucauuaacuuuuacgacccccuaguuuucccgagcgaugaauuugacgcguccauaucacaggugaaugagaaaaucaaccagagucucgccuucauuagaaagucugaugaacugcuucacaaugucaacgcaggcaaaagcaccacaaauaucaugaucaccacuauuauaaucgugauuaucguaauuuugcugucccucaucgcugugggccugcuucuguacugcaaggccaggugaggacuagugaagggaacacccaaauuuaauucagccuuaagcacaauuaauuaagagugaaacguaauuguacaagcaguuggucacccaccauagggcaugaucaacaccgcaaccuuuccuuuuucccccagugauucugaaaaaccccucuucccuucagcuugcuuagauguuccaaauuuaguaagcuuaaggcggccuacagaagaaaaagaaaaaaaaggccacaaaaguucccucucacuuucaguaaauaaaauaaaagcagcaacagaaauaaagaaauaaaugaaauucaaaaugaaauaaauauuguguugugcagcauuaaaaaaucaauaaaaauuaaaaaugagcaagaucuaaaaaaaaaaaaaaaaaaaaaaaaaaaaaaaaaaaaaaaaaaaaaaaaaaaaaaaaaaaaaaaaugcaucccccccccccccccccccccccccccccccaaaggcucuuuucagagccaccagaauu

SEQ ID NO: 732 - RNA, 2247 nt, Artificial Sequence
  mRNA product Design f-1 comprising derived and/or modified sequence from HRSV(A2)__F-del (opt4)
gggagagcggcucggccauuuugucccagucaguccggaggcugcggcugcagaaguaccgccugcggaguaacugcaaagaagcuuaccauggagcugcugauccugaaggccaacgccaucaccaccauccugaccgccgugaccuucugcuucgccagcggccagaacaucaccgaggaguucuaccagagcaccugcagcgccgugagcaagggcuaccugagcgcccugagaaccggcugguacaccagcgugaucaccaucgagcugagcaacaucaaggagaacaagugcaacggcaccgacgccaaggugaagcugaucaagcaggagcuggacaaguacaagaacgccgugaccgagcugcagcugcugaugcagagcacccccgccaccaacaacagagccagaagagagcugcccagauucaugaacuacacccugaacaacgccaagaagaccaacgugacccugagcaagaagagaaagagaagauuccugggcuuccugcugggcgugggcagcgccaucgccagcggcguggccgugagcaaggugcugcaccuggagggcgaggugaacaagaucaagagcgcccugcugagcaccaacaaggccguggugagccugagcaacggcgugagcgugcugaccagcaaggugcuggaccugaagaacuacaucgacaagcagcugcugcccaucgugaacaagcagagcugcagcaucagcaacaucgagaccgugaucgaguuccagcagaagaacaacagacugcuggagaucaccagagaguucagcgugaacgccggcgugaccacccccgugagcaccuacaugcugaccaacagcgagcugcugagccugaucaacgacaugcccaucaccaacgaccagaagaagcugaugagcaacaacgugcagaucgugagacagcagagcuacagcaucaugagcaucaucaaggaggaggugcuggccuacguggugcagcugccccuguacggcgugaucgacacccccugcuggaagcugcacaccagcccccugugcaccaccaacaccaaggagggcagcaacaucugccugaccagaaccgacagaggcugguacugcgacaacgccggcagcgugagcuucuucccccaggccgagaccugcaaggugcagagcaacagaguguucugcgacaccaugaacagccugacccugcccagcgaggugaaccugugcaacguggacaucuucaaccccaaguacgacugcaagaucaugaccagcaagaccgacgugagcagcagcgugaucaccagccugggcgccaucgugagcugcuacggcaagaccaagugcaccgccagcaacaagaacagaggcaucaucaagaccuucagcaacggcugcgacuacgugagcaacaagggcguggacaccgugagcgugggcaacacccuguacuacgugaacaagcaggagggcaagagccuguacgugaagggcgagcccaucaucaacuucuacgacccccugguguuccccagcgacgaguucgacgccagcaucagccaggugaacgagaagaucaaccagagccuggccuucaucagaaagagcgacgagcugcugcacaacgugaacgccggcaagagcaccaccaacaucaugaucaccaccaucaucaucgugaucaucgugauccugcugagccugaucgccgugggccugcugcuguacugcaaggccagaugaggacuagugaagggaacacccaaauuuaauucagccuuaagcacaauuaauuaagagugaaacguaauuguacaagcaguuggucacccaccauagggcaugaucaacaccgcaaccuuuccuuuuucccccagugauucugaaaaaccccucuucccuucagcuugcuuagauguuccaaauuuaguaagcuuaaggcggccuacagaagaaaaagaaaaaaaaggccacaaaaguucccucucacuuucaguaaauaaaauaaaagcagcaacagaaauaaagaaauaaaugaaauucaaaaugaaauaaauauuguguugugcagcauuaaaaaaucaauaaaaauuaaaaaugagcaagaucuaaaaaaaaaaaaaaaaaaaaaaaaaaaaaaaaaaaaaaaaaaaaaaaaaaaaaaaaaaaaaaaaugcaucccccccccccccccccccccccccccccccaaaggcucuuuucagagccaccagaauu

SEQ ID NO: 733 - RNA, 2247 nt, Artificial Sequence
  mRNA product Design f-1 comprising derived and/or modified sequence from HRSV(A2)__F-del (opt5)
gggagagcggcucggccauuuugucccagucaguccggaggcugcggcugcagaaguaccgccugcggaguaacugcaaagaagcuuaccauggagcugcucauccugaaggccaacgcuauuaccacaauccuuacggccgugaccuucugcuuugcgagcggccagaauauuacagaagaguucuaccaauccaccuguucugcugucagcaaaggguaucuguccgcccucagaacaggaugguacaccucuguuaucacaauugaacugagcaacaucaaggagaauaaaugcaacggcaccgacgccaaggugaaacuuaucaagcaggaacuggauaaguauaaaaaugcugugacggagcuccagcugcugaugcaguccacccccgccacaaacaaucgggcucgcagagagcucccucgguuuaugaacuacacccugaauaacgccaagaaaacaaaugucacccuuucuaagaaacgcaagagacgguuccugggguuucuccugggagugggcagcgcgauugccuccgggguugcugugagcaagguccuucaccuggaaggagaggugaacaaaaucaagucugcccuccuguccacgaauaaagcuguugugagccugucuaacggcgucuccgugcucacaagcaaggugcuggaccuuaaaaauuauauugauaagcaacugcucccgaucgucaacaaacagucuuguuccauuagcaacaucgaaaccguuauugaguuccagcagaagaauaaccgccugcuugagaucacaagagaauuuuccgugaaugccggcgugaccacccccgucucuacauacaugcugacgaacagcgagcuccugucccugaucaaugacaugccuauuaccaacgaucaaaagaaacucaugagcaauaacgugcagaucguucggcagcagucuuauuccauuaugagcaucauuaaggaagaggugcuggcguacgucgugcaacuuccccuguacgggguuaucgacacaccuugcuggaaacuccauaccucuccccuguguacaaccaauacgaaggaaggaagcaacaucugccuuacacgcaccgauagaggcugguauugugacaaugccggguccgugucuuucuuuccucaggcugagaccugcaaaguccagagcaaccggguguucugugauacaaugaacucccugacccucccgagcgaggucaaucugugcaauguggacauuuuuaaccccaaguacgauuguaagaucaugacaucuaaaacggacguuuccagcucugugauuaccucccugggagccaucgucagcugcuauggcaagacaaaaugcaccgcuuccaacaagaaucgcgggauuaucaaaacauucucuaacggaugugauuacgugagcaauaagggcguugacaccguguccgucggcaacacgcucuauuacgugaauaagcaagaagggaaaucucuguaugugaagggagagccuaucauuaacuuuuacgacccccuuguuuucccuagcgaugaauuugacgccuccaucagccaggucaaugagaaaauuaaccagucucuggccuucaucagaaaguccgaugaacuccugcacaaugugaacgcuggcaaaagcaccacaaauauuaugaucaccacaauuaucaucgugauuaucgucauucugcuuucucucaucgcgguggggcugcugcucuacugcaaggcccggugaggacuagugaagggaacacccaaauuuaauucagccuuaagcacaauuaauuaagagugaaacguaauuguacaagcaguuggucacccaccauagggcaugaucaacaccgcaaccuuuccuuuuucccccagugauucugaaaaaccccucuucccuucagcuugcuuagauguuccaaauuuaguaagcuuaaggcggccuacagaagaaaaagaaaaaaaaggccacaaaaguucccucucacuuucaguaaauaaaauaaaagcagcaacagaaauaaagaaauaaaugaaauucaaaaugaaauaaauauuguguugugcagcauuaaaaaaucaauaaaaauuaaaaaugagcaagaucuaaaaaaaaaaaaaaaaaaaaaaaaaaaaaaaaaaaaaaaaaaaaaaaaaaaaaaaaaaaaaaaaugcaucccccccccccccccccccccccccccccccaaaggcucuuuucagagccaccagaauu

SEQ ID NO: 734 - RNA, 2247 nt, Artificial Sequence
  mRNA product Design f-1 comprising derived and/or modified sequence from HRSV(A2)__F-del (opt6)
gggagagcggcucggccauuuugucccagucaguccggaggcugcggcugcagaaguaccgccugcggaguaacugcaaagaagcuuaccauggaauuacuaauacucaaagccaacgcaauaacaacaauacuaacagcaguaacauucugcuucgcaucaggacaaaacaucacagaagaauuuuaccaaaguacaugcagugcagucucuaaaggauaccucagugccuuacgcacaggaugguacacaucaguaauaacaaucgaacuuucaaacauaaaagaaaacaaaugcaauggaaccgacgccaaaguaaaacuaaucaaacaagaacuagacaaauauaaaaaugcaguaacagaauuacaacuccuaaugcaauccacaccagcaacaaauaacagagcaagacgagaacucccucgauucaugaauuacacauuaaacaacgcaaaaaaaacuaacguaacuuuaucaaaaaaaagaaaacguagauuucuaggauuccuacuaggcguaggguccgccauugcaucaggaguagcaguuagcaaaguauuacauuuagaaggagaaguaaauaaaaucaaaagcgcacuacucucaaccaacaaagcaguaguaucacucucaaacggaguaucaguacuaacauccaaaguacucgaccucaaaaacuacauagacaaacaauuacuacccauaguaaacaaacaaucaugcucuauaucaaauaucgaaacaguaaucgaauuucaacaaaaaaacaaucgacuacuugaaauaacaagagaguucuccgucaaugccggagucaccacaccagucucaacauacaugcuaaccaacucugaacuccuaucacuaauaaaugacaugccaauaacaaacgaccaaaaaaaacuaaugucaaauaacguacaaauaguacgacaacaaaguuauuccauaaugaguauaaucaaagaagaaguguuagcauacguaguccaacuaccauuauauggaguaauagacacaccauguuggaaauuacacaccucaccacucugcacuaccaauacaaaagaaggcucaaauauaugccuaacucgcacagacagaggcugguacugcgauaacgcaggauccguaucuuucuuuccccaagcagaaacuugcaaaguacaaucaaacagagucuucugcgacaccaugaauagucucacauuaccaucugaaguaaaccuauguaacguagauauauucaauccaaaauacgacugcaaaauaaugacaucaaaaaccgacgucucuagcaguguaaucacaucacuaggagcaauaguaagcugcuauggaaaaacaaaauguacagcaucaaacaaaaacaggggaauaauaaaaaccuucucaaacggaugugacuacguaucaaauaaaggcguagacacaguaagcguaggaaacacccuauacuacguuaacaaacaagaagggaaaucauuauacguaaaaggagaaccaauaauaaacuucuacgauccacucguauucccauccgacgaauuugacgccagcauaucccaaguuaacgaaaaaauaaaccaaucacuugcauuuauacgaaaaucugaugaacuucuccacaacguaaaugcaggaaaauccaccaccaauauaaugaucacaacuaucaucauaguaauaaucgucauuuuacuaucauuaauagcaguuggccuacuucuauacugcaaagcaagauaaggacuagugaagggaacacccaaauuuaauucagccuuaagcacaauuaauuaagagugaaacguaauuguacaagcaguuggucacccaccauagggcaugaucaacaccgcaaccuuuccuuuuucccccagugauucugaaaaaccccucuucccuucagcuugcuuagauguuccaaauuuaguaagcuuaaggcggccuacagaagaaaaagaaaaaaaaggccacaaaaguucccucucacuuucaguaaauaaaauaaaagcagcaacagaaauaaagaaauaaaugaaauucaaaaugaaauaaauauuguguugugcagcauuaaaaaaucaauaaaaauuaaaaaugagcaagaucuaaaaaaaaaaaaaaaaaaaaaaaaaaaaaaaaaaaaaaaaaaaaaaaaaaaaaaaaaaaaaaaaugcaucccccccccccccccccccccccccccccccaaaggcucuuuucagagccaccagaauu

SEQ ID NO: 735 - RNA, 2247 nt, Artificial Sequence
  mRNA product Design f-1 comprising derived and/or modified sequence from HRSV(A2)__F-del (opt11)
gggagagcggcucggccauuuugucccagucaguccggaggcugcggcugcagaaguaccgccugcggaguaacugcaaagaagcuuaccauggaacuacuaauccuaaaagccaacgcgaucaccaccauccuaacggcagucaccuucugcuucgcaucaggccaaaacaucacagaagaguucuaccaaagcacaugcuccgccguauccaaaggcuaccucagcgcccuacgcacaggcugguacacaucugucaucaccauagaacucuccaacaucaaagaaaacaaaugcaacggcacugacgccaaaguaaagcugaucaaacaagaacucgacaaauacaaaaacgcagucaccgaacuccaacuacucaugcaauccaccccugcaaccaacaacagggcccgccgcgaacucccccgcuucaugaacuacacuuuaaacaacgccaaaaagaccaacgucacacucagcaagaaacggaaacgacgauuccuaggguuucuccuaggcgucggcucggcaaucgccuccggcgucgccguaagcaaaguacuacaccuagaaggcgaagugaacaaaaucaaaagugcccuucucuccaccaacaaggccguagucucucuauccaacggagucucaguccucaccucaaagguccucgaccucaaaaacuacaucgacaaacaacuacuccccauugucaacaagcagucaugcuccauaucaaacaucgaaaccgucaucgaguuccaacagaaaaacaaccgacuccucgaaauaaccagagaguucucggucaacgccggcgucaccaccccagucagcaccuacaugcucacuaacuccgaacuccuaucccucaucaacgacaugccaauuaccaacgaccaaaagaaacuaaugucgaacaacguucaaaucguccgacaacaaaguuacuccaucaugagcauaaucaaagaagaaguucuagcguacgucguccaacucccacuauacggcgucaucgacacuccgugcuggaaacuccacacaucaccccuauguacaaccaacacaaaagaaggcagcaacaucugccucacccgcaccgaccgagggugguauugcgauaacgcuggcagcgucuccuucuucccccaagccgaaaccugcaaaguccaaucaaacagaguauucugcgacaccaugaacucccuuacucucccuagcgaagucaaccucugcaacguugacauauucaaccccaaauacgacugcaaaaucaugaccuccaagaccgacgucuccuccuccgucaucacaucucuaggugccauugucuccugcuacggaaaaaccaaaugcacagccuccaacaaaaaccgcggcaucauaaaaaccuucuccaacggcugcgacuacgucaguaauaaaggcgucgacacgguauccguugggaauacgcuuuacuacguaaauaaacaagaaggcaaaucccucuacgucaaaggugaacccaucauaaacuucuacgacccgcuuguguucccauccgacgaguucgacgccagcaucagccaggucaacgaaaagaucaaccaaucccuagccuucauccgcaaaagcgacgaacuacuacacaacgucaacgccggaaaauccacaaccaacaucaugaucaccaccaucaucaucgucaucaucguaauccuacucucucucaucgccgucggccuccuacuguacuguaaagcccgauagggacuagugaagggaacacccaaauuuaauucagccuuaagcacaauuaauuaagagugaaacguaauuguacaagcaguuggucacccaccauagggcaugaucaacaccgcaaccuuuccuuuuucccccagugauucugaaaaaccccucuucccuucagcuugcuuagauguuccaaauuuaguaagcuuaaggcggccuacagaagaaaaagaaaaaaaaggccacaaaaguucccucucacuuucaguaaauaaaauaaaagcagcaacagaaauaaagaaauaaaugaaauucaaaaugaaauaaauauuguguugugcagcauuaaaaaaucaauaaaaauuaaaaaugagcaagaucuaaaaaaaaaaaaaaaaaaaaaaaaaaaaaaaaaaaaaaaaaaaaaaaaaaaaaaaaaaaaaaaaugcaucccccccccccccccccccccccccccccccaaaggcucuuuucagagccaccagaauu

SEQ ID NO: 736 - RNA, 2027 nt, Artificial Sequence
  mRNA product Design f-2 comprising derived and/or modified sequence from HRSV(A2)__F-del (artificial)
gggagagcggcucggccauuuugucccagucaguccggaggcugcggcugcagaaguaccgccugcggaguaacugcaaagaagcuuaccauggaguugcuaauccucaaagcaaaugcaauuaccacaauccucacugcagucacauuuuguuuugcuucuggucaaaacaucacugaagaauuuuaucaaucaacaugcagugcaguuagcaaaggcuaucuuagugcucugagaacugguugguauaccaguguuauaacuauagaauuaaguaauaucaaggaaaauaaguguaauggaacagaugcuaagguaaaauugauaaaacaagaauuagauaaauauaaaaaugcuguaacagaauugcaguugcucaugcaaagcacaccagcaacaaacaaucgagccagaagagaacuaccaagguuuaugaauuauacacucaacaaugccaaaaaaaccaauguaacauuaagcaagaaaaggaaaagaagauuucuugguuuuuuguuagguguuggaucugcaaucgccaguggcguugcuguaucuaagguccugcaccuagaaggggaagugaacaagaucaaaagugcucuacuauccacaaacaaggcuguagucagcuuaucaaauggaguuagugucuuaaccagcaaaguguuagaccucaaaaacuauauagauaaacaauuguuaccuauugugaacaagcaaagcugcagcauaucaaauauagaaacugugauagaguuccaacaaaagaacaacagacuacuagagauuaccagggaauuuaguguuaaugcagguguaacuacaccuguaagcacuuacauguuaacuaauagugaauuauugucauuaaucaaugauaugccuauaacaaaugaucagaaaaaguuaauguccaacaauguucaaauaguuagacagcaaaguuacucuaucauguccauaauaaaagaggaagucuuagcauauguaguacaauuaccacuauaugguguuauagauacacccuguuggaaacuacacacauccccucuauguacaaccaacacaaaagaaggguccaacaucuguuuaacaagaacugacagaggaugguacugugacaaugcaggaucaguaucuuucuucccacaagcugaaacauguaaaguucaaucaaaucgaguauuuugugacacaaugaacaguuuaacauuaccaagugaaguaaaucucugcaauguugacauauucaaccccaaauaugauuguaaaauuaugacuucaaaaacagauguaagcagcuccguuaucacaucucuaggagccauugugucaugcuauggcaaaacuaaauguacagcauccaauaaaaaucguggaaucauaaagacauuuucuaacgggugcgauuauguaucaaauaaagggguggacacugugucuguagguaacacauuauauuauguaaauaagcaagaagguaaaagucucuauguaaaaggugaaccaauaauaaauuucuaugacccauuaguauuccccucugaugaauuugaugcaucaauaucucaagucaacgagaagauuaaccagagccuagcauuuauucguaaauccgaugaauuauuacauaauguaaaugcugguaaauccaccacaaauaucaugauaacuacuauaauuauagugauuauaguaauauuguuaucauuaauugcuguuggacugcucuuauacuguaaggccagauaaggacuaguggaagcauuuuccuggcugauuaaaagaaauuacucagcuauggucaucuguuccuguuagaaggcuaugcagcauauuauauacuaugcgcauguuaugaaaugcauaauaaaaaauuuuaaaaaaucuaaaagaucuaaaaaaaaaaaaaaaaaaaaaaaaaaaaaaaaaaaaaaaaaaaaaaaaaaaaaaaaaaaaaaaaugcaucccccccccccccccccccccccccccccccaaaggcucuuuucagagccaccagaauu

SEQ ID NO: 737 - RNA, 2027 nt, Artificial Sequence
  mRNA product Design f-2 comprising derived and/or modified sequence from HRSV(A2)__F-del (opt1)
gggagagcggcucggccauuuugucccagucaguccggaggcugcggcugcagaaguaccgccugcggaguaacugcaaagaagcuuaccauggagcugcucauccugaaggccaacgccaucaccaccauccugacggcggugaccuucugcuucgccagcggccagaacaucaccgaggaguucuaccaguccaccugcagcgccgucuccaagggguaccucagcgcccugcggacgggcugguacaccuccgugaucaccaucgagcugagcaacaucaaggagaacaagugcaacgggaccgacgccaaggugaagcucaucaagcaggagcuggacaaguacaagaacgcggucacggagcugcagcuccugaugcaguccaccccggcaaccaacaaccgcgcccggcgcgagcugccccgguucaugaacuacacccucaacaacgccaagaagacgaacgugacccugagcaagaagcgcaagcggcgcuuccugggcuuccuccugggggugggcuccgccaucgcgagcggcgucgccguguccaaggugcugcaccucgagggggaggucaacaagaucaagagcgcccugcuguccaccaacaaggccguggugagccucuccaacggcgucagcgugcugaccuccaaggugcuggaccucaagaacuacaucgacaagcagcugcugcccaucgucaacaagcagagcugcuccaucagcaacaucgagacggugaucgaguuccagcagaagaacaaccggcuccuggagaucacccgcgaguucagcgugaacgccggggucaccacccccguguccacguacaugcugaccaacagcgagcuccugucccugaucaacgacaugccgaucaccaacgaccagaagaagcucaugagcaacaacgugcagaucguccggcagcaguccuacagcaucauguccaucaucaaggaggaggugcuggcguacgugguccagcugccccucuacggcgugaucgacacccccugcuggaagcugcacacgagcccccugugcaccaccaacaccaaggagggguccaacaucugccucacgcgcaccgaccggggcugguacugcgacaacgccggcagcgucuccuucuucccgcaggccgagaccugcaaggugcagagcaaccgcguguucugcgacaccaugaacucccugacgcugcccagcgagguaaaccucugcaacgucgacaucuucaaccccaaguacgacugcaagaucaugaccuccaagaccgacgugagcuccagcgugaucaccucccugggggccaucgucagcugcuacggcaagacgaagugcaccgccagcaacaagaaccgggggaucaucaagaccuucuccaacggcugcgacuacgugagcaacaagggcguggacaccguguccgucgggaacacccuguacuacgugaacaagcaggagggcaagagccucuacgugaagggggagcccaucaucaacuucuacgacccgcuggucuuccccuccgacgaguucgacgcgagcaucucccaggugaacgagaagaucaaccagagccuggccuucauccgcaaguccgacgagcugcuccacaacgugaacgccggcaagagcacgaccaacaucaugaucaccaccaucaucaucgucaucaucgugauccugcugucccucaucgccguggggcugcugcucuacugcaaggcccggugaggacuaguggaagcauuuuccuggcugauuaaaagaaauuacucagcuauggucaucuguuccuguuagaaggcuaugcagcauauuauauacuaugcgcauguuaugaaaugcauaauaaaaaauuuuaaaaaaucuaaaagaucuaaaaaaaaaaaaaaaaaaaaaaaaaaaaaaaaaaaaaaaaaaaaaaaaaaaaaaaaaaaaaaaaugcaucccccccccccccccccccccccccccccccaaaggcucuuuucagagccaccagaauu

SEQ ID NO: 738 - RNA, 2027 nt, Artificial Sequence
  mRNA product Design f-2 comprising derived and/or modified sequence from HRSV(A2)__F-del (opt1)
gggagagcggcucggccauuuugucccagucaguccggaggcugcggcugcagaaguaccgccugcggaguaacugcaaagaagcuuaccauggagcugcucauccugaaggccaacgccaucaccaccauccugacggcggugaccuucugcuucgccagcggccagaacaucaccgaggaguucuaccaguccacgugcagcgccgucuccaagggguaccucagcgcccugcgcaccggcugguacaccuccgugaucaccaucgagcugagcaacaucaaggagaacaagugcaacgggaccgacgccaaggugaagcucaucaagcaggagcuggacaaguacaagaacgcggucacggagcugcagcuccugaugcaguccacccccgccaccaacaaccgggcccgccgggagcugccgcgcuucaugaacuacacccucaacaacgccaagaagacgaacgugacccugagcaagaagcggaagcgccgguuccugggcuuccuccugggggugggcuccgcgaucgccagcggcgucgccguguccaaggugcugcaccucgagggggaggucaacaagaucaagagcgcccugcuguccaccaacaaggccguggugagccucuccaacggcgucagcgugcugaccuccaaggugcuggaccucaagaacuacaucgacaagcagcugcugcccaucgucaacaagcagagcugcuccaucagcaacaucgagacggugaucgaguuccagcagaagaacaaccgccuccuggagaucacccgggaguucagcgugaacgcgggggucaccacccccguguccacguacaugcugaccaacagcgagcuccugucccugaucaacgacaugcccaucaccaacgaccagaagaagcucaugagcaacaacgugcagaucguccgccagcaguccuacagcaucauguccaucaucaaggaggaggugcuggccuacgugguccagcugccgcucuacggcgugaucgacacccccugcuggaagcugcacacgagcccccugugcaccaccaacaccaaggagggguccaacaucugccucacgcggaccgaccgcggcugguacugcgacaacgccggcagcgucuccuucuucccccaggccgagaccugcaaggugcagagcaaccggguguucugcgacaccaugaacucccugacgcugccgagcgaggucaaccucugcaacguggacaucuucaaccccaaguacgacugcaagaucaugaccuccaagaccgacgugagcuccagcgucaucaccucccugggggccaucgugagcugcuacggcaagacgaagugcaccgcgagcaacaagaaccgcgggaucaucaagaccuucuccaacggcugcgacuacgugagcaacaagggcgucgacaccguguccguggggaacacccuguacuacgucaacaagcaggagggcaagagccucuacgugaagggggagcccaucaucaacuucuacgacccccugguguucccguccgacgaguucgacgccagcaucucccaggucaacgagaagaucaaccagagccuggccuucauccggaaguccgacgagcuccugcacaacgugaacgccggcaagagcacgaccaacaucaugaucaccaccaucaucaucgugaucaucgucauccugcugucccucaucgccguggggcugcugcucuacugcaaggcgcgcugaggacuaguggaagcauuuuccuggcugauuaaaagaaauuacucagcuauggucaucuguuccuguuagaaggcuaugcagcauauuauauacuaugcgcauguuaugaaaugcauaauaaaaaauuuuaaaaaaucuaaaagaucuaaaaaaaaaaaaaaaaaaaaaaaaaaaaaaaaaaaaaaaaaaaaaaaaaaaaaaaaaaaaaaaaugcaucccccccccccccccccccccccccccccccaaaggcucuuuucagagccaccagaauu

SEQ ID NO: 739 - RNA, 2027 nt, Artificial Sequence
  mRNA product Design f-2 comprising derived and/or modified sequence from HRSV(A2)__F-del (opt2)
gggagagcggcucggccauuuugucccagucaguccggaggcugcggcugcagaaguaccgccugcggaguaacugcaaagaagcuuaccauggagcuccucauccucaaggccaacgccaucaccaccauccucaccgccgucaccuucugcuucgccuccggccagaacaucaccgaggaguucuaccaguccaccugcuccgccgucuccaagggcuaccucuccgcccuccgcaccggcugguacaccuccgucaucaccaucgagcucuccaacaucaaggagaacaagugcaacggcaccgacgccaaggucaagcucaucaagcaggagcucgacaaguacaagaacgccgucaccgagcuccagcuccucaugcaguccacccccgccaccaacaaccgcgcccgccgcgagcucccccgcuucaugaacuacacccucaacaacgccaagaagaccaacgucacccucuccaagaagcgcaagcgccgcuuccucggcuuccuccucggcgucggcuccgccaucgccuccggcgucgccgucuccaagguccuccaccucgagggcgaggucaacaagaucaaguccgcccuccucuccaccaacaaggccgucgucucccucuccaacggcgucuccguccucaccuccaagguccucgaccucaagaacuacaucgacaagcagcuccuccccaucgucaacaagcaguccugcuccaucuccaacaucgagaccgucaucgaguuccagcagaagaacaaccgccuccucgagaucacccgcgaguucuccgucaacgccggcgucaccacccccgucuccaccuacaugcucaccaacuccgagcuccucucccucaucaacgacaugcccaucaccaacgaccagaagaagcucauguccaacaacguccagaucguccgccagcaguccuacuccaucauguccaucaucaaggaggagguccucgccuacgucguccagcucccccucuacggcgucaucgacacccccugcuggaagcuccacaccuccccccucugcaccaccaacaccaaggagggcuccaacaucugccucacccgcaccgaccgcggcugguacugcgacaacgccggcuccgucuccuucuucccccaggccgagaccugcaagguccaguccaaccgcgucuucugcgacaccaugaacucccucacccuccccuccgaggucaaccucugcaacgucgacaucuucaaccccaaguacgacugcaagaucaugaccuccaagaccgacgucuccuccuccgucaucaccucccucggcgccaucgucuccugcuacggcaagaccaagugcaccgccuccaacaagaaccgcggcaucaucaagaccuucuccaacggcugcgacuacgucuccaacaagggcgucgacaccgucuccgucggcaacacccucuacuacgucaacaagcaggagggcaagucccucuacgucaagggcgagcccaucaucaacuucuacgacccccucgucuuccccuccgacgaguucgacgccuccaucucccaggucaacgagaagaucaaccagucccucgccuucauccgcaaguccgacgagcuccuccacaacgucaacgccggcaaguccaccaccaacaucaugaucaccaccaucaucaucgucaucaucgucauccuccucucccucaucgccgucggccuccuccucuacugcaaggcccgcugaggacuaguggaagcauuuuccuggcugauuaaaagaaauuacucagcuauggucaucuguuccuguuagaaggcuaugcagcauauuauauacuaugcgcauguuaugaaaugcauaauaaaaaauuuuaaaaaaucuaaaagaucuaaaaaaaaaaaaaaaaaaaaaaaaaaaaaaaaaaaaaaaaaaaaaaaaaaaaaaaaaaaaaaaaugcaucccccccccccccccccccccccccccccccaaaggcucuuuucagagccaccagaauu

SEQ ID NO: 740 - RNA, 2027 nt, Artificial Sequence
  mRNA product Design f-2 comprising derived and/or modified sequence from HRSV(A2)__F-del (opt3)
gggagagcggcucggccauuuugucccagucaguccggaggcugcggcugcagaaguaccgccugcggaguaacugcaaagaagcuuaccauggagcugcucauccuuaaggccaacgcuauuaccacaauacugacugcagugacguucugcuuugccagcggccagaauaucaccgaagaguucuaccaauccacauguucugcggucucaaaaggguauuugagugcuuuaagaacuggaugguacaccagcguuauuacaaucgaacuguccaacauuaaggagaauaaaugcaacgguaccgacgccaaggugaaacuaaucaagcaggaacucgauaaguauaaaaaugcaguaacugagcugcagcuucugaugcagucuacacccgccaccaacaauagggcucggcgcgaguugccucgauuuaugaacuacacgcucaauaacgcaaagaaaacuaaugugacccugucgaagaaacguaagagaagguuccugggcuuucucuuaggggucggaucagccauagcuagcggcguggccguuaguaaggugcugcaccuugaaggugaggucaacaaaaucaaguccgcguugcugucuacaaauaaagcagugguaagccuauccaacgggguuucagugcucacuucuaagguccuggaccuuaaaaauuauauugauaagcaacuguugccaaucgugaacaaacagagcuguucuauuuccaacaucgaaaccgugauagaguuccagcagaagaauaaccggcuccuggagauuacacgcgaauuuucagucaaugccggaguuaccacgccggugagcacuuacauguuaacaaacagugagcugcucucucuuaucaaugacaugcccauuaccaacgaucaaaagaaacugauguccaauaacguacagaucgugagacagcagagcuauucgaucaugucuauuauaaaggaagaggucuuggcuuacgugguucaacuaccucuguacggcgugaucgacacuccaugcuggaaacuccauacauccccacuguguaccacgaauaccaaggaaggcucaaacauuugccuuacaaggacugaucgggggugguauugugacaaugccggaagugucagcuucuuuccucaggcagagaccugcaaagugcaguccaaccgcguauucugugauacaaugaauagucugacuuugccaagcgagguuaaccucugcaauguggacaucuuuaaccccaaguacgauuguaagauaaugaccucaaaaacagacgucaguuccagcgugauuaccucucugggugcuaucgucucaugcuauggcaagacuaaaugcacggccaguaacaagaaucgagggaucauuaaaacauucagcaacggaugugauuacguguccaauaagggcguugacaccgugucuguagguaacacuuuauauuacgucaauaagcaagaagggaaaucgcuguaugugaagggagagccuaucauuaacuuuuacgacccccuaguuuucccgagcgaugaauuugacgcguccauaucacaggugaaugagaaaaucaaccagagucucgccuucauuagaaagucugaugaacugcuucacaaugucaacgcaggcaaaagcaccacaaauaucaugaucaccacuauuauaaucgugauuaucguaauuuugcugucccucaucgcugugggccugcuucuguacugcaaggccaggugaggacuaguggaagcauuuuccuggcugauuaaaagaaauuacucagcuauggucaucuguuccuguuagaaggcuaugcagcauauuauauacuaugcgcauguuaugaaaugcauaauaaaaaauuuuaaaaaaucuaaaagaucuaaaaaaaaaaaaaaaaaaaaaaaaaaaaaaaaaaaaaaaaaaaaaaaaaaaaaaaaaaaaaaaaugcaucccccccccccccccccccccccccccccccaaaggcucuuuucagagccaccagaauu

SEQ ID NO: 741 - RNA, 2027 nt, Artificial Sequence
  mRNA product Design f-2 comprising derived and/or modified sequence from HRSV(A2)__F-del (opt4)
gggagagcggcucggccauuuugucccagucaguccggaggcugcggcugcagaaguaccgccugcggaguaacugcaaagaagcuuaccauggagcugcugauccugaaggccaacgccaucaccaccauccugaccgccgugaccuucugcuucgccagcggccagaacaucaccgaggaguucuaccagagcaccugcagcgccgugagcaagggcuaccugagcgcccugagaaccggcugguacaccagcgugaucaccaucgagcugagcaacaucaaggagaacaagugcaacggcaccgacgccaaggugaagcugaucaagcaggagcuggacaaguacaagaacgccgugaccgagcugcagcugcugaugcagagcacccccgccaccaacaacagagccagaagagagcugcccagauucaugaacuacacccugaacaacgccaagaagaccaacgugacccugagcaagaagagaaagagaagauuccugggcuuccugcugggcgugggcagcgccaucgccagcggcguggccgugagcaaggugcugcaccuggagggcgaggugaacaagaucaagagcgcccugcugagcaccaacaaggccguggugagccugagcaacggcgugagcgugcugaccagcaaggugcuggaccugaagaacuacaucgacaagcagcugcugcccaucgugaacaagcagagcugcagcaucagcaacaucgagaccgugaucgaguuccagcagaagaacaacagacugcuggagaucaccagagaguucagcgugaacgccggcgugaccacccccgugagcaccuacaugcugaccaacagcgagcugcugagccugaucaacgacaugcccaucaccaacgaccagaagaagcugaugagcaacaacgugcagaucgugagacagcagagcuacagcaucaugagcaucaucaaggaggaggugcuggccuacguggugcagcugccccuguacggcgugaucgacacccccugcuggaagcugcacaccagcccccugugcaccaccaacaccaaggagggcagcaacaucugccugaccagaaccgacagaggcugguacugcgacaacgccggcagcgugagcuucuucccccaggccgagaccugcaaggugcagagcaacagaguguucugcgacaccaugaacagccugacccugcccagcgaggugaaccugugcaacguggacaucuucaaccccaaguacgacugcaagaucaugaccagcaagaccgacgugagcagcagcgugaucaccagccugggcgccaucgugagcugcuacggcaagaccaagugcaccgccagcaacaagaacagaggcaucaucaagaccuucagcaacggcugcgacuacgugagcaacaagggcguggacaccgugagcgugggcaacacccuguacuacgugaacaagcaggagggcaagagccuguacgugaagggcgagcccaucaucaacuucuacgacccccugguguuccccagcgacgaguucgacgccagcaucagccaggugaacgagaagaucaaccagagccuggccuucaucagaaagagcgacgagcugcugcacaacgugaacgccggcaagagcaccaccaacaucaugaucaccaccaucaucaucgugaucaucgugauccugcugagccugaucgccgugggccugcugcuguacugcaaggccagaugaggacuaguggaagcauuuuccuggcugauuaaaagaaauuacucagcuauggucaucuguuccuguuagaaggcuaugcagcauauuauauacuaugcgcauguuaugaaaugcauaauaaaaaauuuuaaaaaaucuaaaagaucuaaaaaaaaaaaaaaaaaaaaaaaaaaaaaaaaaaaaaaaaaaaaaaaaaaaaaaaaaaaaaaaaugcaucccccccccccccccccccccccccccccccaaaggcucuuuucagagccaccagaauu

SEQ ID NO: 742 - RNA, 2027 nt, Artificial Sequence
  mRNA product Design f-2 comprising derived and/or modified sequence from HRSV(A2)__F-del (opt5)
gggagagcggcucggccauuuugucccagucaguccggaggcugcggcugcagaaguaccgccugcggaguaacugcaaagaagcuuaccauggagcugcucauccugaaggccaacgcuauuaccacaauccuuacggccgugaccuucugcuuugcgagcggccagaauauuacagaagaguucuaccaauccaccuguucugcugucagcaaaggguaucuguccgcccucagaacaggaugguacaccucuguuaucacaauugaacugagcaacaucaaggagaauaaaugcaacggcaccgacgccaaggugaaacuuaucaagcaggaacuggauaaguauaaaaaugcugugacggagcuccagcugcugaugcaguccacccccgccacaaacaaucgggcucgcagagagcucccucgguuuaugaacuacacccugaauaacgccaagaaaacaaaugucacccuuucuaagaaacgcaagagacgguuccugggguuucuccugggagugggcagcgcgauugccuccgggguugcugugagcaagguccuucaccuggaaggagaggugaacaaaaucaagucugcccuccuguccacgaauaaagcuguugugagccugucuaacggcgucuccgugcucacaagcaaggugcuggaccuuaaaaauuauauugauaagcaacugcucccgaucgucaacaaacagucuuguuccauuagcaacaucgaaaccguuauugaguuccagcagaagaauaaccgccugcuugagaucacaagagaauuuuccgugaaugccggcgugaccacccccgucucuacauacaugcugacgaacagcgagcuccugucccugaucaaugacaugccuauuaccaacgaucaaaagaaacucaugagcaauaacgugcagaucguucggcagcagucuuauuccauuaugagcaucauuaaggaagaggugcuggcguacgucgugcaacuuccccuguacgggguuaucgacacaccuugcuggaaacuccauaccucuccccuguguacaaccaauacgaaggaaggaagcaacaucugccuuacacgcaccgauagaggcugguauugugacaaugccggguccgugucuuucuuuccucaggcugagaccugcaaaguccagagcaaccggguguucugugauacaaugaacucccugacccucccgagcgaggucaaucugugcaauguggacauuuuuaaccccaaguacgauuguaagaucaugacaucuaaaacggacguuuccagcucugugauuaccucccugggagccaucgucagcugcuauggcaagacaaaaugcaccgcuuccaacaagaaucgcgggauuaucaaaacauucucuaacggaugugauuacgugagcaauaagggcguugacaccguguccgucggcaacacgcucuauuacgugaauaagcaagaagggaaaucucuguaugugaagggagagccuaucauuaacuuuuacgacccccuuguuuucccuagcgaugaauuugacgccuccaucagccaggucaaugagaaaauuaaccagucucuggccuucaucagaaaguccgaugaacuccugcacaaugugaacgcuggcaaaagcaccacaaauauuaugaucaccacaauuaucaucgugauuaucgucauucugcuuucucucaucgcgguggggcugcugcucuacugcaaggcccggugaggacuaguggaagcauuuuccuggcugauuaaaagaaauuacucagcuauggucaucuguuccuguuagaaggcuaugcagcauauuauauacuaugcgcauguuaugaaaugcauaauaaaaaauuuuaaaaaaucuaaaagaucuaaaaaaaaaaaaaaaaaaaaaaaaaaaaaaaaaaaaaaaaaaaaaaaaaaaaaaaaaaaaaaaaugcaucccccccccccccccccccccccccccccccaaaggcucuuuucagagccaccagaauu

SEQ ID NO: 743 - RNA, 2027 nt, Artificial Sequence
  mRNA product Design f-2 comprising derived and/or modified sequence from HRSV(A2)__F-del (opt6)
gggagagcggcucggccauuuugucccagucaguccggaggcugcggcugcagaaguaccgccugcggaguaacugcaaagaagcuuaccauggaauuacuaauacucaaagccaacgcaauaacaacaauacuaacagcaguaacauucugcuucgcaucaggacaaaacaucacagaagaauuuuaccaaaguacaugcagugcagucucuaaaggauaccucagugccuuacgcacaggaugguacacaucaguaauaacaaucgaacuuucaaacauaaaagaaaacaaaugcaauggaaccgacgccaaaguaaaacuaaucaaacaagaacuagacaaauauaaaaaugcaguaacagaauuacaacuccuaaugcaauccacaccagcaacaaauaacagagcaagacgagaacucccucgauucaugaauuacacauuaaacaacgcaaaaaaaacuaacguaacuuuaucaaaaaaaagaaaacguagauuucuaggauuccuacuaggcguaggguccgccauugcaucaggaguagcaguuagcaaaguauuacauuuagaaggagaaguaaauaaaaucaaaagcgcacuacucucaaccaacaaagcaguaguaucacucucaaacggaguaucaguacuaacauccaaaguacucgaccucaaaaacuacauagacaaacaauuacuacccauaguaaacaaacaaucaugcucuauaucaaauaucgaaacaguaaucgaauuucaacaaaaaaacaaucgacuacuugaaauaacaagagaguucuccgucaaugccggagucaccacaccagucucaacauacaugcuaaccaacucugaacuccuaucacuaauaaaugacaugccaauaacaaacgaccaaaaaaaacuaaugucaaauaacguacaaauaguacgacaacaaaguuauuccauaaugaguauaaucaaagaagaaguguuagcauacguaguccaacuaccauuauauggaguaauagacacaccauguuggaaauuacacaccucaccacucugcacuaccaauacaaaagaaggcucaaauauaugccuaacucgcacagacagaggcugguacugcgauaacgcaggauccguaucuuucuuuccccaagcagaaacuugcaaaguacaaucaaacagagucuucugcgacaccaugaauagucucacauuaccaucugaaguaaaccuauguaacguagauauauucaauccaaaauacgacugcaaaauaaugacaucaaaaaccgacgucucuagcaguguaaucacaucacuaggagcaauaguaagcugcuauggaaaaacaaaauguacagcaucaaacaaaaacaggggaauaauaaaaaccuucucaaacggaugugacuacguaucaaauaaaggcguagacacaguaagcguaggaaacacccuauacuacguuaacaaacaagaagggaaaucauuauacguaaaaggagaaccaauaauaaacuucuacgauccacucguauucccauccgacgaauuugacgccagcauaucccaaguuaacgaaaaaauaaaccaaucacuugcauuuauacgaaaaucugaugaacuucuccacaacguaaaugcaggaaaauccaccaccaauauaaugaucacaacuaucaucauaguaauaaucgucauuuuacuaucauuaauagcaguuggccuacuucuauacugcaaagcaagauaaggacuaguggaagcauuuuccuggcugauuaaaagaaauuacucagcuauggucaucuguuccuguuagaaggcuaugcagcauauuauauacuaugcgcauguuaugaaaugcauaauaaaaaauuuuaaaaaaucuaaaagaucuaaaaaaaaaaaaaaaaaaaaaaaaaaaaaaaaaaaaaaaaaaaaaaaaaaaaaaaaaaaaaaaaugcaucccccccccccccccccccccccccccccccaaaggcucuuuucagagccaccagaauu

SEQ ID NO: 744 - RNA, 2027 nt, Artificial Sequence
  mRNA product Design f-2 comprising derived and/or modified sequence from HRSV(A2)__F-del (opt11)
gggagagcggcucggccauuuugucccagucaguccggaggcugcggcugcagaaguaccgccugcggaguaacugcaaagaagcuuaccauggaacuacuaauccuaaaagccaacgcgaucaccaccauccuaacggcagucaccuucugcuucgcaucaggccaaaacaucacagaagaguucuaccaaagcacaugcuccgccguauccaaaggcuaccucagcgcccuacgcacaggcugguacacaucugucaucaccauagaacucuccaacaucaaagaaaacaaaugcaacggcacugacgccaaaguaaagcugaucaaacaagaacucgacaaauacaaaaacgcagucaccgaacuccaacuacucaugcaauccaccccugcaaccaacaacagggcccgccgcgaacucccccgcuucaugaacuacacuuuaaacaacgccaaaaagaccaacgucacacucagcaagaaacggaaacgacgauuccuaggguuucuccuaggcgucggcucggcaaucgccuccggcgucgccguaagcaaaguacuacaccuagaaggcgaagugaacaaaaucaaaagugcccuucucuccaccaacaaggccguagucucucuauccaacggagucucaguccucaccucaaagguccucgaccucaaaaacuacaucgacaaacaacuacuccccauugucaacaagcagucaugcuccauaucaaacaucgaaaccgucaucgaguuccaacagaaaaacaaccgacuccucgaaauaaccagagaguucucggucaacgccggcgucaccaccccagucagcaccuacaugcucacuaacuccgaacuccuaucccucaucaacgacaugccaauuaccaacgaccaaaagaaacuaaugucgaacaacguucaaaucguccgacaacaaaguuacuccaucaugagcauaaucaaagaagaaguucuagcguacgucguccaacucccacuauacggcgucaucgacacuccgugcuggaaacuccacacaucaccccuauguacaaccaacacaaaagaaggcagcaacaucugccucacccgcaccgaccgagggugguauugcgauaacgcuggcagcgucuccuucuucccccaagccgaaaccugcaaaguccaaucaaacagaguauucugcgacaccaugaacucccuuacucucccuagcgaagucaaccucugcaacguugacauauucaaccccaaauacgacugcaaaaucaugaccuccaagaccgacgucuccuccuccgucaucacaucucuaggugccauugucuccugcuacggaaaaaccaaaugcacagccuccaacaaaaaccgcggcaucauaaaaaccuucuccaacggcugcgacuacgucaguaauaaaggcgucgacacgguauccguugggaauacgcuuuacuacguaaauaaacaagaaggcaaaucccucuacgucaaaggugaacccaucauaaacuucuacgacccgcuuguguucccauccgacgaguucgacgccagcaucagccaggucaacgaaaagaucaaccaaucccuagccuucauccgcaaaagcgacgaacuacuacacaacgucaacgccggaaaauccacaaccaacaucaugaucaccaccaucaucaucgucaucaucguaauccuacucucucucaucgccgucggccuccuacuguacuguaaagcccgauagggacuaguggaagcauuuuccuggcugauuaaaagaaauuacucagcuauggucaucuguuccuguuagaaggcuaugcagcauauuauauacuaugcgcauguuaugaaaugcauaauaaaaaauuuuaaaaaaucuaaaagaucuaaaaaaaaaaaaaaaaaaaaaaaaaaaaaaaaaaaaaaaaaaaaaaaaaaaaaaaaaaaaaaaaugcaucccccccccccccccccccccccccccccccaaaggcucuuuucagagccaccagaauu

SEQ ID NO: 745 - RNA, 2018 nt, Artificial Sequence
  mRNA product Design f-3 comprising derived and/or modified sequence from HRSV(A2)__F-del (artificial)
gggagagucccgcagucggcguccagcggcucugcuuguucgugugugugucguugcaggccuuauucaagcuuaccauggaguugcuaauccucaaagcaaaugcaauuaccacaauccucacugcagucacauuuuguuuugcuucuggucaaaacaucacugaagaauuuuaucaaucaacaugcagugcaguuagcaaaggcuaucuuagugcucugagaacugguugguauaccaguguuauaacuauagaauuaaguaauaucaaggaaaauaaguguaauggaacagaugcuaagguaaaauugauaaaacaagaauuagauaaauauaaaaaugcuguaacagaauugcaguugcucaugcaaagcacaccagcaacaaacaaucgagccagaagagaacuaccaagguuuaugaauuauacacucaacaaugccaaaaaaaccaauguaacauuaagcaagaaaaggaaaagaagauuucuugguuuuuuguuagguguuggaucugcaaucgccaguggcguugcuguaucuaagguccugcaccuagaaggggaagugaacaagaucaaaagugcucuacuauccacaaacaaggcuguagucagcuuaucaaauggaguuagugucuuaaccagcaaaguguuagaccucaaaaacuauauagauaaacaauuguuaccuauugugaacaagcaaagcugcagcauaucaaauauagaaacugugauagaguuccaacaaaagaacaacagacuacuagagauuaccagggaauuuaguguuaaugcagguguaacuacaccuguaagcacuuacauguuaacuaauagugaauuauugucauuaaucaaugauaugccuauaacaaaugaucagaaaaaguuaauguccaacaauguucaaauaguuagacagcaaaguuacucuaucauguccauaauaaaagaggaagucuuagcauauguaguacaauuaccacuauaugguguuauagauacacccuguuggaaacuacacacauccccucuauguacaaccaacacaaaagaaggguccaacaucuguuuaacaagaacugacagaggaugguacugugacaaugcaggaucaguaucuuucuucccacaagcugaaacauguaaaguucaaucaaaucgaguauuuugugacacaaugaacaguuuaacauuaccaagugaaguaaaucucugcaauguugacauauucaaccccaaauaugauuguaaaauuaugacuucaaaaacagauguaagcagcuccguuaucacaucucuaggagccauugugucaugcuauggcaaaacuaaauguacagcauccaauaaaaaucguggaaucauaaagacauuuucuaacgggugcgauuauguaucaaauaaagggguggacacugugucuguagguaacacauuauauuauguaaauaagcaagaagguaaaagucucuauguaaaaggugaaccaauaauaaauuucuaugacccauuaguauuccccucugaugaauuugaugcaucaauaucucaagucaacgagaagauuaaccagagccuagcauuuauucguaaauccgaugaauuauuacauaauguaaaugcugguaaauccaccacaaauaucaugauaacuacuauaauuauagugauuauaguaauauuguuaucauuaauugcuguuggacugcucuuauacuguaaggccagauaaggacuaguacuggcugcaucucccuuuccucuguccuccauccuucucccaggauggugaagggggaccugguacccagugauccccaccccaggauccuaaaucaugacuuaccugcuaauaaaaacucauuggaaaagugagaagaucuaaaaaaaaaaaaaaaaaaaaaaaaaaaaaaaaaaaaaaaaaaaaaaaaaaaaaaaaaaaaaaaaugcaucccccccccccccccccccccccccccccccaaaggcucuuuucagagccaccagaauu

SEQ ID NO: 746 - RNA, 2018 nt, Artificial Sequence
  mRNA product Design f-3 comprising derived and/or modified sequence from HRSV(A2)__F-del (opt1)
gggagagucccgcagucggcguccagcggcucugcuuguucgugugugugucguugcaggccuuauucaagcuuaccauggagcugcucauccugaaggccaacgccaucaccaccauccugacggcggugaccuucugcuucgccagcggccagaacaucaccgaggaguucuaccaguccaccugcagcgccgucuccaagggguaccucagcgcccugcggacgggcugguacaccuccgugaucaccaucgagcugagcaacaucaaggagaacaagugcaacgggaccgacgccaaggugaagcucaucaagcaggagcuggacaaguacaagaacgcggucacggagcugcagcuccugaugcaguccaccccggcaaccaacaaccgcgcccggcgcgagcugccccgguucaugaacuacacccucaacaacgccaagaagacgaacgugacccugagcaagaagcgcaagcggcgcuuccugggcuuccuccugggggugggcuccgccaucgcgagcggcgucgccguguccaaggugcugcaccucgagggggaggucaacaagaucaagagcgcccugcuguccaccaacaaggccguggugagccucuccaacggcgucagcgugcugaccuccaaggugcuggaccucaagaacuacaucgacaagcagcugcugcccaucgucaacaagcagagcugcuccaucagcaacaucgagacggugaucgaguuccagcagaagaacaaccggcuccuggagaucacccgcgaguucagcgugaacgccggggucaccacccccguguccacguacaugcugaccaacagcgagcuccugucccugaucaacgacaugccgaucaccaacgaccagaagaagcucaugagcaacaacgugcagaucguccggcagcaguccuacagcaucauguccaucaucaaggaggaggugcuggcguacgugguccagcugccccucuacggcgugaucgacacccccugcuggaagcugcacacgagcccccugugcaccaccaacaccaaggagggguccaacaucugccucacgcgcaccgaccggggcugguacugcgacaacgccggcagcgucuccuucuucccgcaggccgagaccugcaaggugcagagcaaccgcguguucugcgacaccaugaacucccugacgcugcccagcgagguaaaccucugcaacgucgacaucuucaaccccaaguacgacugcaagaucaugaccuccaagaccgacgugagcuccagcgugaucaccucccugggggccaucgucagcugcuacggcaagacgaagugcaccgccagcaacaagaaccgggggaucaucaagaccuucuccaacggcugcgacuacgugagcaacaagggcguggacaccguguccgucgggaacacccuguacuacgugaacaagcaggagggcaagagccucuacgugaagggggagcccaucaucaacuucuacgacccgcuggucuuccccuccgacgaguucgacgcgagcaucucccaggugaacgagaagaucaaccagagccuggccuucauccgcaaguccgacgagcugcuccacaacgugaacgccggcaagagcacgaccaacaucaugaucaccaccaucaucaucgucaucaucgugauccugcugucccucaucgccguggggcugcugcucuacugcaaggcccggugaggacuaguacuggcugcaucucccuuuccucuguccuccauccuucucccaggauggugaagggggaccugguacccagugauccccaccccaggauccuaaaucaugacuuaccugcuaauaaaaacucauuggaaaagugagaagaucuaaaaaaaaaaaaaaaaaaaaaaaaaaaaaaaaaaaaaaaaaaaaaaaaaaaaaaaaaaaaaaaaugcaucccccccccccccccccccccccccccccccaaaggcucuuuucagagccaccagaauu

SEQ ID NO: 747 - RNA, 2018 nt, Artificial Sequence
  mRNA product Design f-3 comprising derived and/or modified sequence from HRSV(A2)__F-del (opt1)
gggagagucccgcagucggcguccagcggcucugcuuguucgugugugugucguugcaggccuuauucaagcuuaccauggagcugcucauccugaaggccaacgccaucaccaccauccugacggcggugaccuucugcuucgccagcggccagaacaucaccgaggaguucuaccaguccacgugcagcgccgucuccaagggguaccucagcgcccugcgcaccggcugguacaccuccgugaucaccaucgagcugagcaacaucaaggagaacaagugcaacgggaccgacgccaaggugaagcucaucaagcaggagcuggacaaguacaagaacgcggucacggagcugcagcuccugaugcaguccacccccgccaccaacaaccgggcccgccgggagcugccgcgcuucaugaacuacacccucaacaacgccaagaagacgaacgugacccugagcaagaagcggaagcgccgguuccugggcuuccuccugggggugggcuccgcgaucgccagcggcgucgccguguccaaggugcugcaccucgagggggaggucaacaagaucaagagcgcccugcuguccaccaacaaggccguggugagccucuccaacggcgucagcgugcugaccuccaaggugcuggaccucaagaacuacaucgacaagcagcugcugcccaucgucaacaagcagagcugcuccaucagcaacaucgagacggugaucgaguuccagcagaagaacaaccgccuccuggagaucacccgggaguucagcgugaacgcgggggucaccacccccguguccacguacaugcugaccaacagcgagcuccugucccugaucaacgacaugcccaucaccaacgaccagaagaagcucaugagcaacaacgugcagaucguccgccagcaguccuacagcaucauguccaucaucaaggaggaggugcuggccuacgugguccagcugccgcucuacggcgugaucgacacccccugcuggaagcugcacacgagcccccugugcaccaccaacaccaaggagggguccaacaucugccucacgcggaccgaccgcggcugguacugcgacaacgccggcagcgucuccuucuucccccaggccgagaccugcaaggugcagagcaaccggguguucugcgacaccaugaacucccugacgcugccgagcgaggucaaccucugcaacguggacaucuucaaccccaaguacgacugcaagaucaugaccuccaagaccgacgugagcuccagcgucaucaccucccugggggccaucgugagcugcuacggcaagacgaagugcaccgcgagcaacaagaaccgcgggaucaucaagaccuucuccaacggcugcgacuacgugagcaacaagggcgucgacaccguguccguggggaacacccuguacuacgucaacaagcaggagggcaagagccucuacgugaagggggagcccaucaucaacuucuacgacccccugguguucccguccgacgaguucgacgccagcaucucccaggucaacgagaagaucaaccagagccuggccuucauccggaaguccgacgagcuccugcacaacgugaacgccggcaagagcacgaccaacaucaugaucaccaccaucaucaucgugaucaucgucauccugcugucccucaucgccguggggcugcugcucuacugcaaggcgcgcugaggacuaguacuggcugcaucucccuuuccucuguccuccauccuucucccaggauggugaagggggaccugguacccagugauccccaccccaggauccuaaaucaugacuuaccugcuaauaaaaacucauuggaaaagugagaagaucuaaaaaaaaaaaaaaaaaaaaaaaaaaaaaaaaaaaaaaaaaaaaaaaaaaaaaaaaaaaaaaaaugcaucccccccccccccccccccccccccccccccaaaggcucuuuucagagccaccagaauu

SEQ ID NO: 748 - RNA, 2018 nt, Artificial Sequence
  mRNA product Design f-3 comprising derived and/or modified sequence from HRSV(A2)__F-del (opt2)
gggagagucccgcagucggcguccagcggcucugcuuguucgugugugugucguugcaggccuuauucaagcuuaccauggagcuccucauccucaaggccaacgccaucaccaccauccucaccgccgucaccuucugcuucgccuccggccagaacaucaccgaggaguucuaccaguccaccugcuccgccgucuccaagggcuaccucuccgcccuccgcaccggcugguacaccuccgucaucaccaucgagcucuccaacaucaaggagaacaagugcaacggcaccgacgccaaggucaagcucaucaagcaggagcucgacaaguacaagaacgccgucaccgagcuccagcuccucaugcaguccacccccgccaccaacaaccgcgcccgccgcgagcucccccgcuucaugaacuacacccucaacaacgccaagaagaccaacgucacccucuccaagaagcgcaagcgccgcuuccucggcuuccuccucggcgucggcuccgccaucgccuccggcgucgccgucuccaagguccuccaccucgagggcgaggucaacaagaucaaguccgcccuccucuccaccaacaaggccgucgucucccucuccaacggcgucuccguccucaccuccaagguccucgaccucaagaacuacaucgacaagcagcuccuccccaucgucaacaagcaguccugcuccaucuccaacaucgagaccgucaucgaguuccagcagaagaacaaccgccuccucgagaucacccgcgaguucuccgucaacgccggcgucaccacccccgucuccaccuacaugcucaccaacuccgagcuccucucccucaucaacgacaugcccaucaccaacgaccagaagaagcucauguccaacaacguccagaucguccgccagcaguccuacuccaucauguccaucaucaaggaggagguccucgccuacgucguccagcucccccucuacggcgucaucgacacccccugcuggaagcuccacaccuccccccucugcaccaccaacaccaaggagggcuccaacaucugccucacccgcaccgaccgcggcugguacugcgacaacgccggcuccgucuccuucuucccccaggccgagaccugcaagguccaguccaaccgcgucuucugcgacaccaugaacucccucacccuccccuccgaggucaaccucugcaacgucgacaucuucaaccccaaguacgacugcaagaucaugaccuccaagaccgacgucuccuccuccgucaucaccucccucggcgccaucgucuccugcuacggcaagaccaagugcaccgccuccaacaagaaccgcggcaucaucaagaccuucuccaacggcugcgacuacgucuccaacaagggcgucgacaccgucuccgucggcaacacccucuacuacgucaacaagcaggagggcaagucccucuacgucaagggcgagcccaucaucaacuucuacgacccccucgucuuccccuccgacgaguucgacgccuccaucucccaggucaacgagaagaucaaccagucccucgccuucauccgcaaguccgacgagcuccuccacaacgucaacgccggcaaguccaccaccaacaucaugaucaccaccaucaucaucgucaucaucgucauccuccucucccucaucgccgucggccuccuccucuacugcaaggcccgcugaggacuaguacuggcugcaucucccuuuccucuguccuccauccuucucccaggauggugaagggggaccugguacccagugauccccaccccaggauccuaaaucaugacuuaccugcuaauaaaaacucauuggaaaagugagaagaucuaaaaaaaaaaaaaaaaaaaaaaaaaaaaaaaaaaaaaaaaaaaaaaaaaaaaaaaaaaaaaaaaugcaucccccccccccccccccccccccccccccccaaaggcucuuuucagagccaccagaauu

SEQ ID NO: 749 - RNA, 2018 nt, Artificial Sequence
  mRNA product Design f-3 comprising derived and/or modified sequence from HRSV(A2)__F-del (opt3)
gggagagucccgcagucggcguccagcggcucugcuuguucgugugugugucguugcaggccuuauucaagcuuaccauggagcugcucauccuuaaggccaacgcuauuaccacaauacugacugcagugacguucugcuuugccagcggccagaauaucaccgaagaguucuaccaauccacauguucugcggucucaaaaggguauuugagugcuuuaagaacuggaugguacaccagcguuauuacaaucgaacuguccaacauuaaggagaauaaaugcaacgguaccgacgccaaggugaaacuaaucaagcaggaacucgauaaguauaaaaaugcaguaacugagcugcagcuucugaugcagucuacacccgccaccaacaauagggcucggcgcgaguugccucgauuuaugaacuacacgcucaauaacgcaaagaaaacuaaugugacccugucgaagaaacguaagagaagguuccugggcuuucucuuaggggucggaucagccauagcuagcggcguggccguuaguaaggugcugcaccuugaaggugaggucaacaaaaucaaguccgcguugcugucuacaaauaaagcagugguaagccuauccaacgggguuucagugcucacuucuaagguccuggaccuuaaaaauuauauugauaagcaacuguugccaaucgugaacaaacagagcuguucuauuuccaacaucgaaaccgugauagaguuccagcagaagaauaaccggcuccuggagauuacacgcgaauuuucagucaaugccggaguuaccacgccggugagcacuuacauguuaacaaacagugagcugcucucucuuaucaaugacaugcccauuaccaacgaucaaaagaaacugauguccaauaacguacagaucgugagacagcagagcuauucgaucaugucuauuauaaaggaagaggucuuggcuuacgugguucaacuaccucuguacggcgugaucgacacuccaugcuggaaacuccauacauccccacuguguaccacgaauaccaaggaaggcucaaacauuugccuuacaaggacugaucgggggugguauugugacaaugccggaagugucagcuucuuuccucaggcagagaccugcaaagugcaguccaaccgcguauucugugauacaaugaauagucugacuuugccaagcgagguuaaccucugcaauguggacaucuuuaaccccaaguacgauuguaagauaaugaccucaaaaacagacgucaguuccagcgugauuaccucucugggugcuaucgucucaugcuauggcaagacuaaaugcacggccaguaacaagaaucgagggaucauuaaaacauucagcaacggaugugauuacguguccaauaagggcguugacaccgugucuguagguaacacuuuauauuacgucaauaagcaagaagggaaaucgcuguaugugaagggagagccuaucauuaacuuuuacgacccccuaguuuucccgagcgaugaauuugacgcguccauaucacaggugaaugagaaaaucaaccagagucucgccuucauuagaaagucugaugaacugcuucacaaugucaacgcaggcaaaagcaccacaaauaucaugaucaccacuauuauaaucgugauuaucguaauuuugcugucccucaucgcugugggccugcuucuguacugcaaggccaggugaggacuaguacuggcugcaucucccuuuccucuguccuccauccuucucccaggauggugaagggggaccugguacccagugauccccaccccaggauccuaaaucaugacuuaccugcuaauaaaaacucauuggaaaagugagaagaucuaaaaaaaaaaaaaaaaaaaaaaaaaaaaaaaaaaaaaaaaaaaaaaaaaaaaaaaaaaaaaaaaugcaucccccccccccccccccccccccccccccccaaaggcucuuuucagagccaccagaauu

SEQ ID NO: 750 - RNA, 2018 nt, Artificial Sequence
  mRNA product Design f-3 comprising derived and/or modified sequence from HRSV(A2)__F-del (opt4)
gggagagucccgcagucggcguccagcggcucugcuuguucgugugugugucguugcaggccuuauucaagcuuaccauggagcugcugauccugaaggccaacgccaucaccaccauccugaccgccgugaccuucugcuucgccagcggccagaacaucaccgaggaguucuaccagagcaccugcagcgccgugagcaagggcuaccugagcgcccugagaaccggcugguacaccagcgugaucaccaucgagcugagcaacaucaaggagaacaagugcaacggcaccgacgccaaggugaagcugaucaagcaggagcuggacaaguacaagaacgccgugaccgagcugcagcugcugaugcagagcacccccgccaccaacaacagagccagaagagagcugcccagauucaugaacuacacccugaacaacgccaagaagaccaacgugacccugagcaagaagagaaagagaagauuccugggcuuccugcugggcgugggcagcgccaucgccagcggcguggccgugagcaaggugcugcaccuggagggcgaggugaacaagaucaagagcgcccugcugagcaccaacaaggccguggugagccugagcaacggcgugagcgugcugaccagcaaggugcuggaccugaagaacuacaucgacaagcagcugcugcccaucgugaacaagcagagcugcagcaucagcaacaucgagaccgugaucgaguuccagcagaagaacaacagacugcuggagaucaccagagaguucagcgugaacgccggcgugaccacccccgugagcaccuacaugcugaccaacagcgagcugcugagccugaucaacgacaugcccaucaccaacgaccagaagaagcugaugagcaacaacgugcagaucgugagacagcagagcuacagcaucaugagcaucaucaaggaggaggugcuggccuacguggugcagcugccccuguacggcgugaucgacacccccugcuggaagcugcacaccagcccccugugcaccaccaacaccaaggagggcagcaacaucugccugaccagaaccgacagaggcugguacugcgacaacgccggcagcgugagcuucuucccccaggccgagaccugcaaggugcagagcaacagaguguucugcgacaccaugaacagccugacccugcccagcgaggugaaccugugcaacguggacaucuucaaccccaaguacgacugcaagaucaugaccagcaagaccgacgugagcagcagcgugaucaccagccugggcgccaucgugagcugcuacggcaagaccaagugcaccgccagcaacaagaacagaggcaucaucaagaccuucagcaacggcugcgacuacgugagcaacaagggcguggacaccgugagcgugggcaacacccuguacuacgugaacaagcaggagggcaagagccuguacgugaagggcgagcccaucaucaacuucuacgacccccugguguuccccagcgacgaguucgacgccagcaucagccaggugaacgagaagaucaaccagagccuggccuucaucagaaagagcgacgagcugcugcacaacgugaacgccggcaagagcaccaccaacaucaugaucaccaccaucaucaucgugaucaucgugauccugcugagccugaucgccgugggccugcugcuguacugcaaggccagaugaggacuaguacuggcugcaucucccuuuccucuguccuccauccuucucccaggauggugaagggggaccugguacccagugauccccaccccaggauccuaaaucaugacuuaccugcuaauaaaaacucauuggaaaagugagaagaucuaaaaaaaaaaaaaaaaaaaaaaaaaaaaaaaaaaaaaaaaaaaaaaaaaaaaaaaaaaaaaaaaugcaucccccccccccccccccccccccccccccccaaaggcucuuuucagagccaccagaauu

SEQ ID NO: 751 - RNA, 2018 nt, Artificial Sequence
  mRNA product Design f-3 comprising derived and/or modified sequence from HRSV(A2)__F-del (opt5)
gggagagucccgcagucggcguccagcggcucugcuuguucgugugugugucguugcaggccuuauucaagcuuaccauggagcugcucauccugaaggccaacgcuauuaccacaauccuuacggccgugaccuucugcuuugcgagcggccagaauauuacagaagaguucuaccaauccaccuguucugcugucagcaaaggguaucuguccgcccucagaacaggaugguacaccucuguuaucacaauugaacugagcaacaucaaggagaauaaaugcaacggcaccgacgccaaggugaaacuuaucaagcaggaacuggauaaguauaaaaaugcugugacggagcuccagcugcugaugcaguccacccccgccacaaacaaucgggcucgcagagagcucccucgguuuaugaacuacacccugaauaacgccaagaaaacaaaugucacccuuucuaagaaacgcaagagacgguuccugggguuucuccugggagugggcagcgcgauugccuccgggguugcugugagcaagguccuucaccuggaaggagaggugaacaaaaucaagucugcccuccuguccacgaauaaagcuguugugagccugucuaacggcgucuccgugcucacaagcaaggugcuggaccuuaaaaauuauauugauaagcaacugcucccgaucgucaacaaacagucuuguuccauuagcaacaucgaaaccguuauugaguuccagcagaagaauaaccgccugcuugagaucacaagagaauuuuccgugaaugccggcgugaccacccccgucucuacauacaugcugacgaacagcgagcuccugucccugaucaaugacaugccuauuaccaacgaucaaaagaaacucaugagcaauaacgugcagaucguucggcagcagucuuauuccauuaugagcaucauuaaggaagaggugcuggcguacgucgugcaacuuccccuguacgggguuaucgacacaccuugcuggaaacuccauaccucuccccuguguacaaccaauacgaaggaaggaagcaacaucugccuuacacgcaccgauagaggcugguauugugacaaugccggguccgugucuuucuuuccucaggcugagaccugcaaaguccagagcaaccggguguucugugauacaaugaacucccugacccucccgagcgaggucaaucugugcaauguggacauuuuuaaccccaaguacgauuguaagaucaugacaucuaaaacggacguuuccagcucugugauuaccucccugggagccaucgucagcugcuauggcaagacaaaaugcaccgcuuccaacaagaaucgcgggauuaucaaaacauucucuaacggaugugauuacgugagcaauaagggcguugacaccguguccgucggcaacacgcucuauuacgugaauaagcaagaagggaaaucucuguaugugaagggagagccuaucauuaacuuuuacgacccccuuguuuucccuagcgaugaauuugacgccuccaucagccaggucaaugagaaaauuaaccagucucuggccuucaucagaaaguccgaugaacuccugcacaaugugaacgcuggcaaaagcaccacaaauauuaugaucaccacaauuaucaucgugauuaucgucauucugcuuucucucaucgcgguggggcugcugcucuacugcaaggcccggugaggacuaguacuggcugcaucucccuuuccucuguccuccauccuucucccaggauggugaagggggaccugguacccagugauccccaccccaggauccuaaaucaugacuuaccugcuaauaaaaacucauuggaaaagugagaagaucuaaaaaaaaaaaaaaaaaaaaaaaaaaaaaaaaaaaaaaaaaaaaaaaaaaaaaaaaaaaaaaaaugcaucccccccccccccccccccccccccccccccaaaggcucuuuucagagccaccagaauu

SEQ ID NO: 752 - RNA, 2018 nt, Artificial Sequence
  mRNA product Design f-3 comprising derived and/or modified sequence from HRSV(A2)__F-del (opt6)
gggagagucccgcagucggcguccagcggcucugcuuguucgugugugugucguugcaggccuuauucaagcuuaccauggaauuacuaauacucaaagccaacgcaauaacaacaauacuaacagcaguaacauucugcuucgcaucaggacaaaacaucacagaagaauuuuaccaaaguacaugcagugcagucucuaaaggauaccucagugccuuacgcacaggaugguacacaucaguaauaacaaucgaacuuucaaacauaaaagaaaacaaaugcaauggaaccgacgccaaaguaaaacuaaucaaacaagaacuagacaaauauaaaaaugcaguaacagaauuacaacuccuaaugcaauccacaccagcaacaaauaacagagcaagacgagaacucccucgauucaugaauuacacauuaaacaacgcaaaaaaaacuaacguaacuuuaucaaaaaaaagaaaacguagauuucuaggauuccuacuaggcguaggguccgccauugcaucaggaguagcaguuagcaaaguauuacauuuagaaggagaaguaaauaaaaucaaaagcgcacuacucucaaccaacaaagcaguaguaucacucucaaacggaguaucaguacuaacauccaaaguacucgaccucaaaaacuacauagacaaacaauuacuacccauaguaaacaaacaaucaugcucuauaucaaauaucgaaacaguaaucgaauuucaacaaaaaaacaaucgacuacuugaaauaacaagagaguucuccgucaaugccggagucaccacaccagucucaacauacaugcuaaccaacucugaacuccuaucacuaauaaaugacaugccaauaacaaacgaccaaaaaaaacuaaugucaaauaacguacaaauaguacgacaacaaaguuauuccauaaugaguauaaucaaagaagaaguguuagcauacguaguccaacuaccauuauauggaguaauagacacaccauguuggaaauuacacaccucaccacucugcacuaccaauacaaaagaaggcucaaauauaugccuaacucgcacagacagaggcugguacugcgauaacgcaggauccguaucuuucuuuccccaagcagaaacuugcaaaguacaaucaaacagagucuucugcgacaccaugaauagucucacauuaccaucugaaguaaaccuauguaacguagauauauucaauccaaaauacgacugcaaaauaaugacaucaaaaaccgacgucucuagcaguguaaucacaucacuaggagcaauaguaagcugcuauggaaaaacaaaauguacagcaucaaacaaaaacaggggaauaauaaaaaccuucucaaacggaugugacuacguaucaaauaaaggcguagacacaguaagcguaggaaacacccuauacuacguuaacaaacaagaagggaaaucauuauacguaaaaggagaaccaauaauaaacuucuacgauccacucguauucccauccgacgaauuugacgccagcauaucccaaguuaacgaaaaaauaaaccaaucacuugcauuuauacgaaaaucugaugaacuucuccacaacguaaaugcaggaaaauccaccaccaauauaaugaucacaacuaucaucauaguaauaaucgucauuuuacuaucauuaauagcaguuggccuacuucuauacugcaaagcaagauaaggacuaguacuggcugcaucucccuuuccucuguccuccauccuucucccaggauggugaagggggaccugguacccagugauccccaccccaggauccuaaaucaugacuuaccugcuaauaaaaacucauuggaaaagugagaagaucuaaaaaaaaaaaaaaaaaaaaaaaaaaaaaaaaaaaaaaaaaaaaaaaaaaaaaaaaaaaaaaaaugcaucccccccccccccccccccccccccccccccaaaggcucuuuucagagccaccagaauu

SEQ ID NO: 753 - RNA, 2018 nt, Artificial Sequence
  mRNA product Design f-3 comprising derived and/or modified sequence from HRSV(A2)__F-del (opt11)
gggagagucccgcagucggcguccagcggcucugcuuguucgugugugugucguugcaggccuuauucaagcuuaccauggaacuacuaauccuaaaagccaacgcgaucaccaccauccuaacggcagucaccuucugcuucgcaucaggccaaaacaucacagaagaguucuaccaaagcacaugcuccgccguauccaaaggcuaccucagcgcccuacgcacaggcugguacacaucugucaucaccauagaacucuccaacaucaaagaaaacaaaugcaacggcacugacgccaaaguaaagcugaucaaacaagaacucgacaaauacaaaaacgcagucaccgaacuccaacuacucaugcaauccaccccugcaaccaacaacagggcccgccgcgaacucccccgcuucaugaacuacacuuuaaacaacgccaaaaagaccaacgucacacucagcaagaaacggaaacgacgauuccuaggguuucuccuaggcgucggcucggcaaucgccuccggcgucgccguaagcaaaguacuacaccuagaaggcgaagugaacaaaaucaaaagugcccuucucuccaccaacaaggccguagucucucuauccaacggagucucaguccucaccucaaagguccucgaccucaaaaacuacaucgacaaacaacuacuccccauugucaacaagcagucaugcuccauaucaaacaucgaaaccgucaucgaguuccaacagaaaaacaaccgacuccucgaaauaaccagagaguucucggucaacgccggcgucaccaccccagucagcaccuacaugcucacuaacuccgaacuccuaucccucaucaacgacaugccaauuaccaacgaccaaaagaaacuaaugucgaacaacguucaaaucguccgacaacaaaguuacuccaucaugagcauaaucaaagaagaaguucuagcguacgucguccaacucccacuauacggcgucaucgacacuccgugcuggaaacuccacacaucaccccuauguacaaccaacacaaaagaaggcagcaacaucugccucacccgcaccgaccgagggugguauugcgauaacgcuggcagcgucuccuucuucccccaagccgaaaccugcaaaguccaaucaaacagaguauucugcgacaccaugaacucccuuacucucccuagcgaagucaaccucugcaacguugacauauucaaccccaaauacgacugcaaaaucaugaccuccaagaccgacgucuccuccuccgucaucacaucucuaggugccauugucuccugcuacggaaaaaccaaaugcacagccuccaacaaaaaccgcggcaucauaaaaaccuucuccaacggcugcgacuacgucaguaauaaaggcgucgacacgguauccguugggaauacgcuuuacuacguaaauaaacaagaaggcaaaucccucuacgucaaaggugaacccaucauaaacuucuacgacccgcuuguguucccauccgacgaguucgacgccagcaucagccaggucaacgaaaagaucaaccaaucccuagccuucauccgcaaaagcgacgaacuacuacacaacgucaacgccggaaaauccacaaccaacaucaugaucaccaccaucaucaucgucaucaucguaauccuacucucucucaucgccgucggccuccuacuguacuguaaagcccgauagggacuaguacuggcugcaucucccuuuccucuguccuccauccuucucccaggauggugaagggggaccugguacccagugauccccaccccaggauccuaaaucaugacuuaccugcuaauaaaaacucauuggaaaagugagaagaucuaaaaaaaaaaaaaaaaaaaaaaaaaaaaaaaaaaaaaaaaaaaaaaaaaaaaaaaaaaaaaaaaugcaucccccccccccccccccccccccccccccccaaaggcucuuuucagagccaccagaauu

SEQ ID NO: 754 - RNA, 2234 nt, Artificial Sequence
  mRNA product Design f-4 comprising derived and/or modified sequence from HRSV(A2)__F-del (artificial)
gggagagucccgcagucggcguccagcggcucugcuuguucgugugugugucguugcaggccuuauucaagcuuaccauggaguugcuaauccucaaagcaaaugcaauuaccacaauccucacugcagucacauuuuguuuugcuucuggucaaaacaucacugaagaauuuuaucaaucaacaugcagugcaguuagcaaaggcuaucuuagugcucugagaacugguugguauaccaguguuauaacuauagaauuaaguaauaucaaggaaaauaaguguaauggaacagaugcuaagguaaaauugauaaaacaagaauuagauaaauauaaaaaugcuguaacagaauugcaguugcucaugcaaagcacaccagcaacaaacaaucgagccagaagagaacuaccaagguuuaugaauuauacacucaacaaugccaaaaaaaccaauguaacauuaagcaagaaaaggaaaagaagauuucuugguuuuuuguuagguguuggaucugcaaucgccaguggcguugcuguaucuaagguccugcaccuagaaggggaagugaacaagaucaaaagugcucuacuauccacaaacaaggcuguagucagcuuaucaaauggaguuagugucuuaaccagcaaaguguuagaccucaaaaacuauauagauaaacaauuguuaccuauugugaacaagcaaagcugcagcauaucaaauauagaaacugugauagaguuccaacaaaagaacaacagacuacuagagauuaccagggaauuuaguguuaaugcagguguaacuacaccuguaagcacuuacauguuaacuaauagugaauuauugucauuaaucaaugauaugccuauaacaaaugaucagaaaaaguuaauguccaacaauguucaaauaguuagacagcaaaguuacucuaucauguccauaauaaaagaggaagucuuagcauauguaguacaauuaccacuauaugguguuauagauacacccuguuggaaacuacacacauccccucuauguacaaccaacacaaaagaaggguccaacaucuguuuaacaagaacugacagaggaugguacugugacaaugcaggaucaguaucuuucuucccacaagcugaaacauguaaaguucaaucaaaucgaguauuuugugacacaaugaacaguuuaacauuaccaagugaaguaaaucucugcaauguugacauauucaaccccaaauaugauuguaaaauuaugacuucaaaaacagauguaagcagcuccguuaucacaucucuaggagccauugugucaugcuauggcaaaacuaaauguacagcauccaauaaaaaucguggaaucauaaagacauuuucuaacgggugcgauuauguaucaaauaaagggguggacacugugucuguagguaacacauuauauuauguaaauaagcaagaagguaaaagucucuauguaaaaggugaaccaauaauaaauuucuaugacccauuaguauuccccucugaugaauuugaugcaucaauaucucaagucaacgagaagauuaaccagagccuagcauuuauucguaaauccgaugaauuauuacauaauguaaaugcugguaaauccaccacaaauaucaugauaacuacuauaauuauagugauuauaguaauauuguuaucauuaauugcuguuggacugcucuuauacuguaaggccagauaaggacuagugaagggaacacccaaauuuaauucagccuuaagcacaauuaauuaagagugaaacguaauuguacaagcaguuggucacccaccauagggcaugaucaacaccgcaaccuuuccuuuuucccccagugauucugaaaaaccccucuucccuucagcuugcuuagauguuccaaauuuaguaagcuuaaggcggccuacagaagaaaaagaaaaaaaaggccacaaaaguucccucucacuuucaguaaauaaaauaaaagcagcaacagaaauaaagaaauaaaugaaauucaaaaugaaauaaauauuguguugugcagcauuaaaaaaucaauaaaaauuaaaaaugagcaagaucuaaaaaaaaaaaaaaaaaaaaaaaaaaaaaaaaaaaaaaaaaaaaaaaaaaaaaaaaaaaaaaaaugcaucccccccccccccccccccccccccccccccaaaggcucuuuucagagccaccagaauu

SEQ ID NO: 755 - RNA, 2234 nt, Artificial Sequence
  mRNA product Design f-4 comprising derived and/or modified sequence from HRSV(A2)__F-del (opt1)
gggagagucccgcagucggcguccagcggcucugcuuguucgugugugugucguugcaggccuuauucaagcuuaccauggagcugcucauccugaaggccaacgccaucaccaccauccugacggcggugaccuucugcuucgccagcggccagaacaucaccgaggaguucuaccaguccaccugcagcgccgucuccaagggguaccucagcgcccugcggacgggcugguacaccuccgugaucaccaucgagcugagcaacaucaaggagaacaagugcaacgggaccgacgccaaggugaagcucaucaagcaggagcuggacaaguacaagaacgcggucacggagcugcagcuccugaugcaguccaccccggcaaccaacaaccgcgcccggcgcgagcugccccgguucaugaacuacacccucaacaacgccaagaagacgaacgugacccugagcaagaagcgcaagcggcgcuuccugggcuuccuccugggggugggcuccgccaucgcgagcggcgucgccguguccaaggugcugcaccucgagggggaggucaacaagaucaagagcgcccugcuguccaccaacaaggccguggugagccucuccaacggcgucagcgugcugaccuccaaggugcuggaccucaagaacuacaucgacaagcagcugcugcccaucgucaacaagcagagcugcuccaucagcaacaucgagacggugaucgaguuccagcagaagaacaaccggcuccuggagaucacccgcgaguucagcgugaacgccggggucaccacccccguguccacguacaugcugaccaacagcgagcuccugucccugaucaacgacaugccgaucaccaacgaccagaagaagcucaugagcaacaacgugcagaucguccggcagcaguccuacagcaucauguccaucaucaaggaggaggugcuggcguacgugguccagcugccccucuacggcgugaucgacacccccugcuggaagcugcacacgagcccccugugcaccaccaacaccaaggagggguccaacaucugccucacgcgcaccgaccggggcugguacugcgacaacgccggcagcgucuccuucuucccgcaggccgagaccugcaaggugcagagcaaccgcguguucugcgacaccaugaacucccugacgcugcccagcgagguaaaccucugcaacgucgacaucuucaaccccaaguacgacugcaagaucaugaccuccaagaccgacgugagcuccagcgugaucaccucccugggggccaucgucagcugcuacggcaagacgaagugcaccgccagcaacaagaaccgggggaucaucaagaccuucuccaacggcugcgacuacgugagcaacaagggcguggacaccguguccgucgggaacacccuguacuacgugaacaagcaggagggcaagagccucuacgugaagggggagcccaucaucaacuucuacgacccgcuggucuuccccuccgacgaguucgacgcgagcaucucccaggugaacgagaagaucaaccagagccuggccuucauccgcaaguccgacgagcugcuccacaacgugaacgccggcaagagcacgaccaacaucaugaucaccaccaucaucaucgucaucaucgugauccugcugucccucaucgccguggggcugcugcucuacugcaaggcccggugaggacuagugaagggaacacccaaauuuaauucagccuuaagcacaauuaauuaagagugaaacguaauuguacaagcaguuggucacccaccauagggcaugaucaacaccgcaaccuuuccuuuuucccccagugauucugaaaaaccccucuucccuucagcuugcuuagauguuccaaauuuaguaagcuuaaggcggccuacagaagaaaaagaaaaaaaaggccacaaaaguucccucucacuuucaguaaauaaaauaaaagcagcaacagaaauaaagaaauaaaugaaauucaaaaugaaauaaauauuguguugugcagcauuaaaaaaucaauaaaaauuaaaaaugagcaagaucuaaaaaaaaaaaaaaaaaaaaaaaaaaaaaaaaaaaaaaaaaaaaaaaaaaaaaaaaaaaaaaaaugcaucccccccccccccccccccccccccccccccaaaggcucuuuucagagccaccagaauu

SEQ ID NO: 756 - RNA, 2234 nt, Artificial Sequence
  mRNA product Design f-4 comprising derived and/or modified sequence from HRSV(A2)__F-del (opt1)
gggagagucccgcagucggcguccagcggcucugcuuguucgugugugugucguugcaggccuuauucaagcuuaccauggagcugcucauccugaaggccaacgccaucaccaccauccugacggcggugaccuucugcuucgccagcggccagaacaucaccgaggaguucuaccaguccacgugcagcgccgucuccaagggguaccucagcgcccugcgcaccggcugguacaccuccgugaucaccaucgagcugagcaacaucaaggagaacaagugcaacgggaccgacgccaaggugaagcucaucaagcaggagcuggacaaguacaagaacgcggucacggagcugcagcuccugaugcaguccacccccgccaccaacaaccgggcccgccgggagcugccgcgcuucaugaacuacacccucaacaacgccaagaagacgaacgugacccugagcaagaagcggaagcgccgguuccugggcuuccuccugggggugggcuccgcgaucgccagcggcgucgccguguccaaggugcugcaccucgagggggaggucaacaagaucaagagcgcccugcuguccaccaacaaggccguggugagccucuccaacggcgucagcgugcugaccuccaaggugcuggaccucaagaacuacaucgacaagcagcugcugcccaucgucaacaagcagagcugcuccaucagcaacaucgagacggugaucgaguuccagcagaagaacaaccgccuccuggagaucacccgggaguucagcgugaacgcgggggucaccacccccguguccacguacaugcugaccaacagcgagcuccugucccugaucaacgacaugcccaucaccaacgaccagaagaagcucaugagcaacaacgugcagaucguccgccagcaguccuacagcaucauguccaucaucaaggaggaggugcuggccuacgugguccagcugccgcucuacggcgugaucgacacccccugcuggaagcugcacacgagcccccugugcaccaccaacaccaaggagggguccaacaucugccucacgcggaccgaccgcggcugguacugcgacaacgccggcagcgucuccuucuucccccaggccgagaccugcaaggugcagagcaaccggguguucugcgacaccaugaacucccugacgcugccgagcgaggucaaccucugcaacguggacaucuucaaccccaaguacgacugcaagaucaugaccuccaagaccgacgugagcuccagcgucaucaccucccugggggccaucgugagcugcuacggcaagacgaagugcaccgcgagcaacaagaaccgcgggaucaucaagaccuucuccaacggcugcgacuacgugagcaacaagggcgucgacaccguguccguggggaacacccuguacuacgucaacaagcaggagggcaagagccucuacgugaagggggagcccaucaucaacuucuacgacccccugguguucccguccgacgaguucgacgccagcaucucccaggucaacgagaagaucaaccagagccuggccuucauccggaaguccgacgagcuccugcacaacgugaacgccggcaagagcacgaccaacaucaugaucaccaccaucaucaucgugaucaucgucauccugcugucccucaucgccguggggcugcugcucuacugcaaggcgcgcugaggacuagugaagggaacacccaaauuuaauucagccuuaagcacaauuaauuaagagugaaacguaauuguacaagcaguuggucacccaccauagggcaugaucaacaccgcaaccuuuccuuuuucccccagugauucugaaaaaccccucuucccuucagcuugcuuagauguuccaaauuuaguaagcuuaaggcggccuacagaagaaaaagaaaaaaaaggccacaaaaguucccucucacuuucaguaaauaaaauaaaagcagcaacagaaauaaagaaauaaaugaaauucaaaaugaaauaaauauuguguugugcagcauuaaaaaaucaauaaaaauuaaaaaugagcaagaucuaaaaaaaaaaaaaaaaaaaaaaaaaaaaaaaaaaaaaaaaaaaaaaaaaaaaaaaaaaaaaaaaugcaucccccccccccccccccccccccccccccccaaaggcucuuuucagagccaccagaauu

SEQ ID NO: 757 - RNA, 2234 nt, Artificial Sequence
  mRNA product Design f-4 comprising derived and/or modified sequence from HRSV(A2)__F-del (opt2)
gggagagucccgcagucggcguccagcggcucugcuuguucgugugugugucguugcaggccuuauucaagcuuaccauggagcuccucauccucaaggccaacgccaucaccaccauccucaccgccgucaccuucugcuucgccuccggccagaacaucaccgaggaguucuaccaguccaccugcuccgccgucuccaagggcuaccucuccgcccuccgcaccggcugguacaccuccgucaucaccaucgagcucuccaacaucaaggagaacaagugcaacggcaccgacgccaaggucaagcucaucaagcaggagcucgacaaguacaagaacgccgucaccgagcuccagcuccucaugcaguccacccccgccaccaacaaccgcgcccgccgcgagcucccccgcuucaugaacuacacccucaacaacgccaagaagaccaacgucacccucuccaagaagcgcaagcgccgcuuccucggcuuccuccucggcgucggcuccgccaucgccuccggcgucgccgucuccaagguccuccaccucgagggcgaggucaacaagaucaaguccgcccuccucuccaccaacaaggccgucgucucccucuccaacggcgucuccguccucaccuccaagguccucgaccucaagaacuacaucgacaagcagcuccuccccaucgucaacaagcaguccugcuccaucuccaacaucgagaccgucaucgaguuccagcagaagaacaaccgccuccucgagaucacccgcgaguucuccgucaacgccggcgucaccacccccgucuccaccuacaugcucaccaacuccgagcuccucucccucaucaacgacaugcccaucaccaacgaccagaagaagcucauguccaacaacguccagaucguccgccagcaguccuacuccaucauguccaucaucaaggaggagguccucgccuacgucguccagcucccccucuacggcgucaucgacacccccugcuggaagcuccacaccuccccccucugcaccaccaacaccaaggagggcuccaacaucugccucacccgcaccgaccgcggcugguacugcgacaacgccggcuccgucuccuucuucccccaggccgagaccugcaagguccaguccaaccgcgucuucugcgacaccaugaacucccucacccuccccuccgaggucaaccucugcaacgucgacaucuucaaccccaaguacgacugcaagaucaugaccuccaagaccgacgucuccuccuccgucaucaccucccucggcgccaucgucuccugcuacggcaagaccaagugcaccgccuccaacaagaaccgcggcaucaucaagaccuucuccaacggcugcgacuacgucuccaacaagggcgucgacaccgucuccgucggcaacacccucuacuacgucaacaagcaggagggcaagucccucuacgucaagggcgagcccaucaucaacuucuacgacccccucgucuuccccuccgacgaguucgacgccuccaucucccaggucaacgagaagaucaaccagucccucgccuucauccgcaaguccgacgagcuccuccacaacgucaacgccggcaaguccaccaccaacaucaugaucaccaccaucaucaucgucaucaucgucauccuccucucccucaucgccgucggccuccuccucuacugcaaggcccgcugaggacuagugaagggaacacccaaauuuaauucagccuuaagcacaauuaauuaagagugaaacguaauuguacaagcaguuggucacccaccauagggcaugaucaacaccgcaaccuuuccuuuuucccccagugauucugaaaaaccccucuucccuucagcuugcuuagauguuccaaauuuaguaagcuuaaggcggccuacagaagaaaaagaaaaaaaaggccacaaaaguucccucucacuuucaguaaauaaaauaaaagcagcaacagaaauaaagaaauaaaugaaauucaaaaugaaauaaauauuguguugugcagcauuaaaaaaucaauaaaaauuaaaaaugagcaagaucuaaaaaaaaaaaaaaaaaaaaaaaaaaaaaaaaaaaaaaaaaaaaaaaaaaaaaaaaaaaaaaaaugcaucccccccccccccccccccccccccccccccaaaggcucuuuucagagccaccagaauu

SEQ ID NO: 758 - RNA, 2234 nt, Artificial Sequence
  mRNA product Design f-4 comprising derived and/or modified sequence from HRSV(A2)__F-del (opt3)
gggagagucccgcagucggcguccagcggcucugcuuguucgugugugugucguugcaggccuuauucaagcuuaccauggagcugcucauccuuaaggccaacgcuauuaccacaauacugacugcagugacguucugcuuugccagcggccagaauaucaccgaagaguucuaccaauccacauguucugcggucucaaaaggguauuugagugcuuuaagaacuggaugguacaccagcguuauuacaaucgaacuguccaacauuaaggagaauaaaugcaacgguaccgacgccaaggugaaacuaaucaagcaggaacucgauaaguauaaaaaugcaguaacugagcugcagcuucugaugcagucuacacccgccaccaacaauagggcucggcgcgaguugccucgauuuaugaacuacacgcucaauaacgcaaagaaaacuaaugugacccugucgaagaaacguaagagaagguuccugggcuuucucuuaggggucggaucagccauagcuagcggcguggccguuaguaaggugcugcaccuugaaggugaggucaacaaaaucaaguccgcguugcugucuacaaauaaagcagugguaagccuauccaacgggguuucagugcucacuucuaagguccuggaccuuaaaaauuauauugauaagcaacuguugccaaucgugaacaaacagagcuguucuauuuccaacaucgaaaccgugauagaguuccagcagaagaauaaccggcuccuggagauuacacgcgaauuuucagucaaugccggaguuaccacgccggugagcacuuacauguuaacaaacagugagcugcucucucuuaucaaugacaugcccauuaccaacgaucaaaagaaacugauguccaauaacguacagaucgugagacagcagagcuauucgaucaugucuauuauaaaggaagaggucuuggcuuacgugguucaacuaccucuguacggcgugaucgacacuccaugcuggaaacuccauacauccccacuguguaccacgaauaccaaggaaggcucaaacauuugccuuacaaggacugaucgggggugguauugugacaaugccggaagugucagcuucuuuccucaggcagagaccugcaaagugcaguccaaccgcguauucugugauacaaugaauagucugacuuugccaagcgagguuaaccucugcaauguggacaucuuuaaccccaaguacgauuguaagauaaugaccucaaaaacagacgucaguuccagcgugauuaccucucugggugcuaucgucucaugcuauggcaagacuaaaugcacggccaguaacaagaaucgagggaucauuaaaacauucagcaacggaugugauuacguguccaauaagggcguugacaccgugucuguagguaacacuuuauauuacgucaauaagcaagaagggaaaucgcuguaugugaagggagagccuaucauuaacuuuuacgacccccuaguuuucccgagcgaugaauuugacgcguccauaucacaggugaaugagaaaaucaaccagagucucgccuucauuagaaagucugaugaacugcuucacaaugucaacgcaggcaaaagcaccacaaauaucaugaucaccacuauuauaaucgugauuaucguaauuuugcugucccucaucgcugugggccugcuucuguacugcaaggccaggugaggacuagugaagggaacacccaaauuuaauucagccuuaagcacaauuaauuaagagugaaacguaauuguacaagcaguuggucacccaccauagggcaugaucaacaccgcaaccuuuccuuuuucccccagugauucugaaaaaccccucuucccuucagcuugcuuagauguuccaaauuuaguaagcuuaaggcggccuacagaagaaaaagaaaaaaaaggccacaaaaguucccucucacuuucaguaaauaaaauaaaagcagcaacagaaauaaagaaauaaaugaaauucaaaaugaaauaaauauuguguugugcagcauuaaaaaaucaauaaaaauuaaaaaugagcaagaucuaaaaaaaaaaaaaaaaaaaaaaaaaaaaaaaaaaaaaaaaaaaaaaaaaaaaaaaaaaaaaaaaugcaucccccccccccccccccccccccccccccccaaaggcucuuuucagagccaccagaauu

SEQ ID NO: 759 - RNA, 2234 nt, Artificial Sequence
  mRNA product Design f-4 comprising derived and/or modified sequence from HRSV(A2)__F-del (opt4)
gggagagucccgcagucggcguccagcggcucugcuuguucgugugugugucguugcaggccuuauucaagcuuaccauggagcugcugauccugaaggccaacgccaucaccaccauccugaccgccgugaccuucugcuucgccagcggccagaacaucaccgaggaguucuaccagagcaccugcagcgccgugagcaagggcuaccugagcgcccugagaaccggcugguacaccagcgugaucaccaucgagcugagcaacaucaaggagaacaagugcaacggcaccgacgccaaggugaagcugaucaagcaggagcuggacaaguacaagaacgccgugaccgagcugcagcugcugaugcagagcacccccgccaccaacaacagagccagaagagagcugcccagauucaugaacuacacccugaacaacgccaagaagaccaacgugacccugagcaagaagagaaagagaagauuccugggcuuccugcugggcgugggcagcgccaucgccagcggcguggccgugagcaaggugcugcaccuggagggcgaggugaacaagaucaagagcgcccugcugagcaccaacaaggccguggugagccugagcaacggcgugagcgugcugaccagcaaggugcuggaccugaagaacuacaucgacaagcagcugcugcccaucgugaacaagcagagcugcagcaucagcaacaucgagaccgugaucgaguuccagcagaagaacaacagacugcuggagaucaccagagaguucagcgugaacgccggcgugaccacccccgugagcaccuacaugcugaccaacagcgagcugcugagccugaucaacgacaugcccaucaccaacgaccagaagaagcugaugagcaacaacgugcagaucgugagacagcagagcuacagcaucaugagcaucaucaaggaggaggugcuggccuacguggugcagcugccccuguacggcgugaucgacacccccugcuggaagcugcacaccagcccccugugcaccaccaacaccaaggagggcagcaacaucugccugaccagaaccgacagaggcugguacugcgacaacgccggcagcgugagcuucuucccccaggccgagaccugcaaggugcagagcaacagaguguucugcgacaccaugaacagccugacccugcccagcgaggugaaccugugcaacguggacaucuucaaccccaaguacgacugcaagaucaugaccagcaagaccgacgugagcagcagcgugaucaccagccugggcgccaucgugagcugcuacggcaagaccaagugcaccgccagcaacaagaacagaggcaucaucaagaccuucagcaacggcugcgacuacgugagcaacaagggcguggacaccgugagcgugggcaacacccuguacuacgugaacaagcaggagggcaagagccuguacgugaagggcgagcccaucaucaacuucuacgacccccugguguuccccagcgacgaguucgacgccagcaucagccaggugaacgagaagaucaaccagagccuggccuucaucagaaagagcgacgagcugcugcacaacgugaacgccggcaagagcaccaccaacaucaugaucaccaccaucaucaucgugaucaucgugauccugcugagccugaucgccgugggccugcugcuguacugcaaggccagaugaggacuagugaagggaacacccaaauuuaauucagccuuaagcacaauuaauuaagagugaaacguaauuguacaagcaguuggucacccaccauagggcaugaucaacaccgcaaccuuuccuuuuucccccagugauucugaaaaaccccucuucccuucagcuugcuuagauguuccaaauuuaguaagcuuaaggcggccuacagaagaaaaagaaaaaaaaggccacaaaaguucccucucacuuucaguaaauaaaauaaaagcagcaacagaaauaaagaaauaaaugaaauucaaaaugaaauaaauauuguguugugcagcauuaaaaaaucaauaaaaauuaaaaaugagcaagaucuaaaaaaaaaaaaaaaaaaaaaaaaaaaaaaaaaaaaaaaaaaaaaaaaaaaaaaaaaaaaaaaaugcaucccccccccccccccccccccccccccccccaaaggcucuuuucagagccaccagaauu

SEQ ID NO: 760 - RNA, 2234 nt, Artificial Sequence
  mRNA product Design f-4 comprising derived and/or modified sequence from HRSV(A2)__F-del (opt5)
gggagagucccgcagucggcguccagcggcucugcuuguucgugugugugucguugcaggccuuauucaagcuuaccauggagcugcucauccugaaggccaacgcuauuaccacaauccuuacggccgugaccuucugcuuugcgagcggccagaauauuacagaagaguucuaccaauccaccuguucugcugucagcaaaggguaucuguccgcccucagaacaggaugguacaccucuguuaucacaauugaacugagcaacaucaaggagaauaaaugcaacggcaccgacgccaaggugaaacuuaucaagcaggaacuggauaaguauaaaaaugcugugacggagcuccagcugcugaugcaguccacccccgccacaaacaaucgggcucgcagagagcucccucgguuuaugaacuacacccugaauaacgccaagaaaacaaaugucacccuuucuaagaaacgcaagagacgguuccugggguuucuccugggagugggcagcgcgauugccuccgggguugcugugagcaagguccuucaccuggaaggagaggugaacaaaaucaagucugcccuccuguccacgaauaaagcuguugugagccugucuaacggcgucuccgugcucacaagcaaggugcuggaccuuaaaaauuauauugauaagcaacugcucccgaucgucaacaaacagucuuguuccauuagcaacaucgaaaccguuauugaguuccagcagaagaauaaccgccugcuugagaucacaagagaauuuuccgugaaugccggcgugaccacccccgucucuacauacaugcugacgaacagcgagcuccugucccugaucaaugacaugccuauuaccaacgaucaaaagaaacucaugagcaauaacgugcagaucguucggcagcagucuuauuccauuaugagcaucauuaaggaagaggugcuggcguacgucgugcaacuuccccuguacgggguuaucgacacaccuugcuggaaacuccauaccucuccccuguguacaaccaauacgaaggaaggaagcaacaucugccuuacacgcaccgauagaggcugguauugugacaaugccggguccgugucuuucuuuccucaggcugagaccugcaaaguccagagcaaccggguguucugugauacaaugaacucccugacccucccgagcgaggucaaucugugcaauguggacauuuuuaaccccaaguacgauuguaagaucaugacaucuaaaacggacguuuccagcucugugauuaccucccugggagccaucgucagcugcuauggcaagacaaaaugcaccgcuuccaacaagaaucgcgggauuaucaaaacauucucuaacggaugugauuacgugagcaauaagggcguugacaccguguccgucggcaacacgcucuauuacgugaauaagcaagaagggaaaucucuguaugugaagggagagccuaucauuaacuuuuacgacccccuuguuuucccuagcgaugaauuugacgccuccaucagccaggucaaugagaaaauuaaccagucucuggccuucaucagaaaguccgaugaacuccugcacaaugugaacgcuggcaaaagcaccacaaauauuaugaucaccacaauuaucaucgugauuaucgucauucugcuuucucucaucgcgguggggcugcugcucuacugcaaggcccggugaggacuagugaagggaacacccaaauuuaauucagccuuaagcacaauuaauuaagagugaaacguaauuguacaagcaguuggucacccaccauagggcaugaucaacaccgcaaccuuuccuuuuucccccagugauucugaaaaaccccucuucccuucagcuugcuuagauguuccaaauuuaguaagcuuaaggcggccuacagaagaaaaagaaaaaaaaggccacaaaaguucccucucacuuucaguaaauaaaauaaaagcagcaacagaaauaaagaaauaaaugaaauucaaaaugaaauaaauauuguguugugcagcauuaaaaaaucaauaaaaauuaaaaaugagcaagaucuaaaaaaaaaaaaaaaaaaaaaaaaaaaaaaaaaaaaaaaaaaaaaaaaaaaaaaaaaaaaaaaaugcaucccccccccccccccccccccccccccccccaaaggcucuuuucagagccaccagaauu

SEQ ID NO: 761 - RNA, 2234 nt, Artificial Sequence
  mRNA product Design f-4 comprising derived and/or modified sequence from HRSV(A2)__F-del (opt6)
gggagagucccgcagucggcguccagcggcucugcuuguucgugugugugucguugcaggccuuauucaagcuuaccauggaauuacuaauacucaaagccaacgcaauaacaacaauacuaacagcaguaacauucugcuucgcaucaggacaaaacaucacagaagaauuuuaccaaaguacaugcagugcagucucuaaaggauaccucagugccuuacgcacaggaugguacacaucaguaauaacaaucgaacuuucaaacauaaaagaaaacaaaugcaauggaaccgacgccaaaguaaaacuaaucaaacaagaacuagacaaauauaaaaaugcaguaacagaauuacaacuccuaaugcaauccacaccagcaacaaauaacagagcaagacgagaacucccucgauucaugaauuacacauuaaacaacgcaaaaaaaacuaacguaacuuuaucaaaaaaaagaaaacguagauuucuaggauuccuacuaggcguaggguccgccauugcaucaggaguagcaguuagcaaaguauuacauuuagaaggagaaguaaauaaaaucaaaagcgcacuacucucaaccaacaaagcaguaguaucacucucaaacggaguaucaguacuaacauccaaaguacucgaccucaaaaacuacauagacaaacaauuacuacccauaguaaacaaacaaucaugcucuauaucaaauaucgaaacaguaaucgaauuucaacaaaaaaacaaucgacuacuugaaauaacaagagaguucuccgucaaugccggagucaccacaccagucucaacauacaugcuaaccaacucugaacuccuaucacuaauaaaugacaugccaauaacaaacgaccaaaaaaaacuaaugucaaauaacguacaaauaguacgacaacaaaguuauuccauaaugaguauaaucaaagaagaaguguuagcauacguaguccaacuaccauuauauggaguaauagacacaccauguuggaaauuacacaccucaccacucugcacuaccaauacaaaagaaggcucaaauauaugccuaacucgcacagacagaggcugguacugcgauaacgcaggauccguaucuuucuuuccccaagcagaaacuugcaaaguacaaucaaacagagucuucugcgacaccaugaauagucucacauuaccaucugaaguaaaccuauguaacguagauauauucaauccaaaauacgacugcaaaauaaugacaucaaaaaccgacgucucuagcaguguaaucacaucacuaggagcaauaguaagcugcuauggaaaaacaaaauguacagcaucaaacaaaaacaggggaauaauaaaaaccuucucaaacggaugugacuacguaucaaauaaaggcguagacacaguaagcguaggaaacacccuauacuacguuaacaaacaagaagggaaaucauuauacguaaaaggagaaccaauaauaaacuucuacgauccacucguauucccauccgacgaauuugacgccagcauaucccaaguuaacgaaaaaauaaaccaaucacuugcauuuauacgaaaaucugaugaacuucuccacaacguaaaugcaggaaaauccaccaccaauauaaugaucacaacuaucaucauaguaauaaucgucauuuuacuaucauuaauagcaguuggccuacuucuauacugcaaagcaagauaaggacuagugaagggaacacccaaauuuaauucagccuuaagcacaauuaauuaagagugaaacguaauuguacaagcaguuggucacccaccauagggcaugaucaacaccgcaaccuuuccuuuuucccccagugauucugaaaaaccccucuucccuucagcuugcuuagauguuccaaauuuaguaagcuuaaggcggccuacagaagaaaaagaaaaaaaaggccacaaaaguucccucucacuuucaguaaauaaaauaaaagcagcaacagaaauaaagaaauaaaugaaauucaaaaugaaauaaauauuguguugugcagcauuaaaaaaucaauaaaaauuaaaaaugagcaagaucuaaaaaaaaaaaaaaaaaaaaaaaaaaaaaaaaaaaaaaaaaaaaaaaaaaaaaaaaaaaaaaaaugcaucccccccccccccccccccccccccccccccaaaggcucuuuucagagccaccagaauu

SEQ ID NO: 762 - RNA, 2234 nt, Artificial Sequence
  mRNA product Design f-4 comprising derived and/or modified sequence from HRSV(A2)__F-del (opt11)
gggagagucccgcagucggcguccagcggcucugcuuguucgugugugugucguugcaggccuuauucaagcuuaccauggaacuacuaauccuaaaagccaacgcgaucaccaccauccuaacggcagucaccuucugcuucgcaucaggccaaaacaucacagaagaguucuaccaaagcacaugcuccgccguauccaaaggcuaccucagcgcccuacgcacaggcugguacacaucugucaucaccauagaacucuccaacaucaaagaaaacaaaugcaacggcacugacgccaaaguaaagcugaucaaacaagaacucgacaaauacaaaaacgcagucaccgaacuccaacuacucaugcaauccaccccugcaaccaacaacagggcccgccgcgaacucccccgcuucaugaacuacacuuuaaacaacgccaaaaagaccaacgucacacucagcaagaaacggaaacgacgauuccuaggguuucuccuaggcgucggcucggcaaucgccuccggcgucgccguaagcaaaguacuacaccuagaaggcgaagugaacaaaaucaaaagugcccuucucuccaccaacaaggccguagucucucuauccaacggagucucaguccucaccucaaagguccucgaccucaaaaacuacaucgacaaacaacuacuccccauugucaacaagcagucaugcuccauaucaaacaucgaaaccgucaucgaguuccaacagaaaaacaaccgacuccucgaaauaaccagagaguucucggucaacgccggcgucaccaccccagucagcaccuacaugcucacuaacuccgaacuccuaucccucaucaacgacaugccaauuaccaacgaccaaaagaaacuaaugucgaacaacguucaaaucguccgacaacaaaguuacuccaucaugagcauaaucaaagaagaaguucuagcguacgucguccaacucccacuauacggcgucaucgacacuccgugcuggaaacuccacacaucaccccuauguacaaccaacacaaaagaaggcagcaacaucugccucacccgcaccgaccgagggugguauugcgauaacgcuggcagcgucuccuucuucccccaagccgaaaccugcaaaguccaaucaaacagaguauucugcgacaccaugaacucccuuacucucccuagcgaagucaaccucugcaacguugacauauucaaccccaaauacgacugcaaaaucaugaccuccaagaccgacgucuccuccuccgucaucacaucucuaggugccauugucuccugcuacggaaaaaccaaaugcacagccuccaacaaaaaccgcggcaucauaaaaaccuucuccaacggcugcgacuacgucaguaauaaaggcgucgacacgguauccguugggaauacgcuuuacuacguaaauaaacaagaaggcaaaucccucuacgucaaaggugaacccaucauaaacuucuacgacccgcuuguguucccauccgacgaguucgacgccagcaucagccaggucaacgaaaagaucaaccaaucccuagccuucauccgcaaaagcgacgaacuacuacacaacgucaacgccggaaaauccacaaccaacaucaugaucaccaccaucaucaucgucaucaucguaauccuacucucucucaucgccgucggccuccuacuguacuguaaagcccgauagggacuagugaagggaacacccaaauuuaauucagccuuaagcacaauuaauuaagagugaaacguaauuguacaagcaguuggucacccaccauagggcaugaucaacaccgcaaccuuuccuuuuucccccagugauucugaaaaaccccucuucccuucagcuugcuuagauguuccaaauuuaguaagcuuaaggcggccuacagaagaaaaagaaaaaaaaggccacaaaaguucccucucacuuucaguaaauaaaauaaaagcagcaacagaaauaaagaaauaaaugaaauucaaaaugaaauaaauauuguguugugcagcauuaaaaaaucaauaaaaauuaaaaaugagcaagaucuaaaaaaaaaaaaaaaaaaaaaaaaaaaaaaaaaaaaaaaaaaaaaaaaaaaaaaaaaaaaaaaaugcaucccccccccccccccccccccccccccccccaaaggcucuuuucagagccaccagaauu

SEQ ID NO: 763 - RNA, 2010 nt, Artificial Sequence
  mRNA product Design f-5 comprising derived and/or modified sequence from HRSV(A2)__F-del (artificial)
gggagacuuucccauucuguagcagaauuugguguugccuguggucuuggucccgcggagaagcuuaccauggaguugcuaauccucaaagcaaaugcaauuaccacaauccucacugcagucacauuuuguuuugcuucuggucaaaacaucacugaagaauuuuaucaaucaacaugcagugcaguuagcaaaggcuaucuuagugcucugagaacugguugguauaccaguguuauaacuauagaauuaaguaauaucaaggaaaauaaguguaauggaacagaugcuaagguaaaauugauaaaacaagaauuagauaaauauaaaaaugcuguaacagaauugcaguugcucaugcaaagcacaccagcaacaaacaaucgagccagaagagaacuaccaagguuuaugaauuauacacucaacaaugccaaaaaaaccaauguaacauuaagcaagaaaaggaaaagaagauuucuugguuuuuuguuagguguuggaucugcaaucgccaguggcguugcuguaucuaagguccugcaccuagaaggggaagugaacaagaucaaaagugcucuacuauccacaaacaaggcuguagucagcuuaucaaauggaguuagugucuuaaccagcaaaguguuagaccucaaaaacuauauagauaaacaauuguuaccuauugugaacaagcaaagcugcagcauaucaaauauagaaacugugauagaguuccaacaaaagaacaacagacuacuagagauuaccagggaauuuaguguuaaugcagguguaacuacaccuguaagcacuuacauguuaacuaauagugaauuauugucauuaaucaaugauaugccuauaacaaaugaucagaaaaaguuaauguccaacaauguucaaauaguuagacagcaaaguuacucuaucauguccauaauaaaagaggaagucuuagcauauguaguacaauuaccacuauaugguguuauagauacacccuguuggaaacuacacacauccccucuauguacaaccaacacaaaagaaggguccaacaucuguuuaacaagaacugacagaggaugguacugugacaaugcaggaucaguaucuuucuucccacaagcugaaacauguaaaguucaaucaaaucgaguauuuugugacacaaugaacaguuuaacauuaccaagugaaguaaaucucugcaauguugacauauucaaccccaaauaugauuguaaaauuaugacuucaaaaacagauguaagcagcuccguuaucacaucucuaggagccauugugucaugcuauggcaaaacuaaauguacagcauccaauaaaaaucguggaaucauaaagacauuuucuaacgggugcgauuauguaucaaauaaagggguggacacugugucuguagguaacacauuauauuauguaaauaagcaagaagguaaaagucucuauguaaaaggugaaccaauaauaaauuucuaugacccauuaguauuccccucugaugaauuugaugcaucaauaucucaagucaacgagaagauuaaccagagccuagcauuuauucguaaauccgaugaauuauuacauaauguaaaugcugguaaauccaccacaaauaucaugauaacuacuauaauuauagugauuauaguaauauuguuaucauuaauugcuguuggacugcucuuauacuguaaggccagauaaggacuaguacuggcugcaucucccuuuccucuguccuccauccuucucccaggauggugaagggggaccugguacccagugauccccaccccaggauccuaaaucaugacuuaccugcuaauaaaaacucauuggaaaagugagaagaucuaaaaaaaaaaaaaaaaaaaaaaaaaaaaaaaaaaaaaaaaaaaaaaaaaaaaaaaaaaaaaaaaugcaucccccccccccccccccccccccccccccccaaaggcucuuuucagagccaccagaauu

SEQ ID NO: 764 - RNA, 2010 nt, Artificial Sequence
  mRNA product Design f-5 comprising derived and/or modified sequence from HRSV(A2)__F-del (opt1)
gggagacuuucccauucuguagcagaauuugguguugccuguggucuuggucccgcggagaagcuuaccauggagcugcucauccugaaggccaacgccaucaccaccauccugacggcggugaccuucugcuucgccagcggccagaacaucaccgaggaguucuaccaguccaccugcagcgccgucuccaagggguaccucagcgcccugcggacgggcugguacaccuccgugaucaccaucgagcugagcaacaucaaggagaacaagugcaacgggaccgacgccaaggugaagcucaucaagcaggagcuggacaaguacaagaacgcggucacggagcugcagcuccugaugcaguccaccccggcaaccaacaaccgcgcccggcgcgagcugccccgguucaugaacuacacccucaacaacgccaagaagacgaacgugacccugagcaagaagcgcaagcggcgcuuccugggcuuccuccugggggugggcuccgccaucgcgagcggcgucgccguguccaaggugcugcaccucgagggggaggucaacaagaucaagagcgcccugcuguccaccaacaaggccguggugagccucuccaacggcgucagcgugcugaccuccaaggugcuggaccucaagaacuacaucgacaagcagcugcugcccaucgucaacaagcagagcugcuccaucagcaacaucgagacggugaucgaguuccagcagaagaacaaccggcuccuggagaucacccgcgaguucagcgugaacgccggggucaccacccccguguccacguacaugcugaccaacagcgagcuccugucccugaucaacgacaugccgaucaccaacgaccagaagaagcucaugagcaacaacgugcagaucguccggcagcaguccuacagcaucauguccaucaucaaggaggaggugcuggcguacgugguccagcugccccucuacggcgugaucgacacccccugcuggaagcugcacacgagcccccugugcaccaccaacaccaaggagggguccaacaucugccucacgcgcaccgaccggggcugguacugcgacaacgccggcagcgucuccuucuucccgcaggccgagaccugcaaggugcagagcaaccgcguguucugcgacaccaugaacucccugacgcugcccagcgagguaaaccucugcaacgucgacaucuucaaccccaaguacgacugcaagaucaugaccuccaagaccgacgugagcuccagcgugaucaccucccugggggccaucgucagcugcuacggcaagacgaagugcaccgccagcaacaagaaccgggggaucaucaagaccuucuccaacggcugcgacuacgugagcaacaagggcguggacaccguguccgucgggaacacccuguacuacgugaacaagcaggagggcaagagccucuacgugaagggggagcccaucaucaacuucuacgacccgcuggucuuccccuccgacgaguucgacgcgagcaucucccaggugaacgagaagaucaaccagagccuggccuucauccgcaaguccgacgagcugcuccacaacgugaacgccggcaagagcacgaccaacaucaugaucaccaccaucaucaucgucaucaucgugauccugcugucccucaucgccguggggcugcugcucuacugcaaggcccggugaggacuaguacuggcugcaucucccuuuccucuguccuccauccuucucccaggauggugaagggggaccugguacccagugauccccaccccaggauccuaaaucaugacuuaccugcuaauaaaaacucauuggaaaagugagaagaucuaaaaaaaaaaaaaaaaaaaaaaaaaaaaaaaaaaaaaaaaaaaaaaaaaaaaaaaaaaaaaaaaugcaucccccccccccccccccccccccccccccccaaaggcucuuuucagagccaccagaauu

SEQ ID NO: 765 - RNA, 2010 nt, Artificial Sequence
  mRNA product Design f-5 comprising derived and/or modified sequence from HRSV(A2)__F-del (opt1)
gggagacuuucccauucuguagcagaauuugguguugccuguggucuuggucccgcggagaagcuuaccauggagcugcucauccugaaggccaacgccaucaccaccauccugacggcggugaccuucugcuucgccagcggccagaacaucaccgaggaguucuaccaguccacgugcagcgccgucuccaagggguaccucagcgcccugcgcaccggcugguacaccuccgugaucaccaucgagcugagcaacaucaaggagaacaagugcaacgggaccgacgccaaggugaagcucaucaagcaggagcuggacaaguacaagaacgcggucacggagcugcagcuccugaugcaguccacccccgccaccaacaaccgggcccgccgggagcugccgcgcuucaugaacuacacccucaacaacgccaagaagacgaacgugacccugagcaagaagcggaagcgccgguuccugggcuuccuccugggggugggcuccgcgaucgccagcggcgucgccguguccaaggugcugcaccucgagggggaggucaacaagaucaagagcgcccugcuguccaccaacaaggccguggugagccucuccaacggcgucagcgugcugaccuccaaggugcuggaccucaagaacuacaucgacaagcagcugcugcccaucgucaacaagcagagcugcuccaucagcaacaucgagacggugaucgaguuccagcagaagaacaaccgccuccuggagaucacccgggaguucagcgugaacgcgggggucaccacccccguguccacguacaugcugaccaacagcgagcuccugucccugaucaacgacaugcccaucaccaacgaccagaagaagcucaugagcaacaacgugcagaucguccgccagcaguccuacagcaucauguccaucaucaaggaggaggugcuggccuacgugguccagcugccgcucuacggcgugaucgacacccccugcuggaagcugcacacgagcccccugugcaccaccaacaccaaggagggguccaacaucugccucacgcggaccgaccgcggcugguacugcgacaacgccggcagcgucuccuucuucccccaggccgagaccugcaaggugcagagcaaccggguguucugcgacaccaugaacucccugacgcugccgagcgaggucaaccucugcaacguggacaucuucaaccccaaguacgacugcaagaucaugaccuccaagaccgacgugagcuccagcgucaucaccucccugggggccaucgugagcugcuacggcaagacgaagugcaccgcgagcaacaagaaccgcgggaucaucaagaccuucuccaacggcugcgacuacgugagcaacaagggcgucgacaccguguccguggggaacacccuguacuacgucaacaagcaggagggcaagagccucuacgugaagggggagcccaucaucaacuucuacgacccccugguguucccguccgacgaguucgacgccagcaucucccaggucaacgagaagaucaaccagagccuggccuucauccggaaguccgacgagcuccugcacaacgugaacgccggcaagagcacgaccaacaucaugaucaccaccaucaucaucgugaucaucgucauccugcugucccucaucgccguggggcugcugcucuacugcaaggcgcgcugaggacuaguacuggcugcaucucccuuuccucuguccuccauccuucucccaggauggugaagggggaccugguacccagugauccccaccccaggauccuaaaucaugacuuaccugcuaauaaaaacucauuggaaaagugagaagaucuaaaaaaaaaaaaaaaaaaaaaaaaaaaaaaaaaaaaaaaaaaaaaaaaaaaaaaaaaaaaaaaaugcaucccccccccccccccccccccccccccccccaaaggcucuuuucagagccaccagaauu

SEQ ID NO: 766 - RNA, 2010 nt, Artificial Sequence
  mRNA product Design f-5 comprising derived and/or modified sequence from HRSV(A2)__F-del (opt2)
gggagacuuucccauucuguagcagaauuugguguugccuguggucuuggucccgcggagaagcuuaccauggagcuccucauccucaaggccaacgccaucaccaccauccucaccgccgucaccuucugcuucgccuccggccagaacaucaccgaggaguucuaccaguccaccugcuccgccgucuccaagggcuaccucuccgcccuccgcaccggcugguacaccuccgucaucaccaucgagcucuccaacaucaaggagaacaagugcaacggcaccgacgccaaggucaagcucaucaagcaggagcucgacaaguacaagaacgccgucaccgagcuccagcuccucaugcaguccacccccgccaccaacaaccgcgcccgccgcgagcucccccgcuucaugaacuacacccucaacaacgccaagaagaccaacgucacccucuccaagaagcgcaagcgccgcuuccucggcuuccuccucggcgucggcuccgccaucgccuccggcgucgccgucuccaagguccuccaccucgagggcgaggucaacaagaucaaguccgcccuccucuccaccaacaaggccgucgucucccucuccaacggcgucuccguccucaccuccaagguccucgaccucaagaacuacaucgacaagcagcuccuccccaucgucaacaagcaguccugcuccaucuccaacaucgagaccgucaucgaguuccagcagaagaacaaccgccuccucgagaucacccgcgaguucuccgucaacgccggcgucaccacccccgucuccaccuacaugcucaccaacuccgagcuccucucccucaucaacgacaugcccaucaccaacgaccagaagaagcucauguccaacaacguccagaucguccgccagcaguccuacuccaucauguccaucaucaaggaggagguccucgccuacgucguccagcucccccucuacggcgucaucgacacccccugcuggaagcuccacaccuccccccucugcaccaccaacaccaaggagggcuccaacaucugccucacccgcaccgaccgcggcugguacugcgacaacgccggcuccgucuccuucuucccccaggccgagaccugcaagguccaguccaaccgcgucuucugcgacaccaugaacucccucacccuccccuccgaggucaaccucugcaacgucgacaucuucaaccccaaguacgacugcaagaucaugaccuccaagaccgacgucuccuccuccgucaucaccucccucggcgccaucgucuccugcuacggcaagaccaagugcaccgccuccaacaagaaccgcggcaucaucaagaccuucuccaacggcugcgacuacgucuccaacaagggcgucgacaccgucuccgucggcaacacccucuacuacgucaacaagcaggagggcaagucccucuacgucaagggcgagcccaucaucaacuucuacgacccccucgucuuccccuccgacgaguucgacgccuccaucucccaggucaacgagaagaucaaccagucccucgccuucauccgcaaguccgacgagcuccuccacaacgucaacgccggcaaguccaccaccaacaucaugaucaccaccaucaucaucgucaucaucgucauccuccucucccucaucgccgucggccuccuccucuacugcaaggcccgcugaggacuaguacuggcugcaucucccuuuccucuguccuccauccuucucccaggauggugaagggggaccugguacccagugauccccaccccaggauccuaaaucaugacuuaccugcuaauaaaaacucauuggaaaagugagaagaucuaaaaaaaaaaaaaaaaaaaaaaaaaaaaaaaaaaaaaaaaaaaaaaaaaaaaaaaaaaaaaaaaugcaucccccccccccccccccccccccccccccccaaaggcucuuuucagagccaccagaauu

SEQ ID NO: 767 - RNA, 2010 nt, Artificial Sequence
  mRNA product Design f-5 comprising derived and/or modified sequence from HRSV(A2)__F-del (opt3)
gggagacuuucccauucuguagcagaauuugguguugccuguggucuuggucccgcggagaagcuuaccauggagcugcucauccuuaaggccaacgcuauuaccacaauacugacugcagugacguucugcuuugccagcggccagaauaucaccgaagaguucuaccaauccacauguucugcggucucaaaaggguauuugagugcuuuaagaacuggaugguacaccagcguuauuacaaucgaacuguccaacauuaaggagaauaaaugcaacgguaccgacgccaaggugaaacuaaucaagcaggaacucgauaaguauaaaaaugcaguaacugagcugcagcuucugaugcagucuacacccgccaccaacaauagggcucggcgcgaguugccucgauuuaugaacuacacgcucaauaacgcaaagaaaacuaaugugacccugucgaagaaacguaagagaagguuccugggcuuucucuuaggggucggaucagccauagcuagcggcguggccguuaguaaggugcugcaccuugaaggugaggucaacaaaaucaaguccgcguugcugucuacaaauaaagcagugguaagccuauccaacgggguuucagugcucacuucuaagguccuggaccuuaaaaauuauauugauaagcaacuguugccaaucgugaacaaacagagcuguucuauuuccaacaucgaaaccgugauagaguuccagcagaagaauaaccggcuccuggagauuacacgcgaauuuucagucaaugccggaguuaccacgccggugagcacuuacauguuaacaaacagugagcugcucucucuuaucaaugacaugcccauuaccaacgaucaaaagaaacugauguccaauaacguacagaucgugagacagcagagcuauucgaucaugucuauuauaaaggaagaggucuuggcuuacgugguucaacuaccucuguacggcgugaucgacacuccaugcuggaaacuccauacauccccacuguguaccacgaauaccaaggaaggcucaaacauuugccuuacaaggacugaucgggggugguauugugacaaugccggaagugucagcuucuuuccucaggcagagaccugcaaagugcaguccaaccgcguauucugugauacaaugaauagucugacuuugccaagcgagguuaaccucugcaauguggacaucuuuaaccccaaguacgauuguaagauaaugaccucaaaaacagacgucaguuccagcgugauuaccucucugggugcuaucgucucaugcuauggcaagacuaaaugcacggccaguaacaagaaucgagggaucauuaaaacauucagcaacggaugugauuacguguccaauaagggcguugacaccgugucuguagguaacacuuuauauuacgucaauaagcaagaagggaaaucgcuguaugugaagggagagccuaucauuaacuuuuacgacccccuaguuuucccgagcgaugaauuugacgcguccauaucacaggugaaugagaaaaucaaccagagucucgccuucauuagaaagucugaugaacugcuucacaaugucaacgcaggcaaaagcaccacaaauaucaugaucaccacuauuauaaucgugauuaucguaauuuugcugucccucaucgcugugggccugcuucuguacugcaaggccaggugaggacuaguacuggcugcaucucccuuuccucuguccuccauccuucucccaggauggugaagggggaccugguacccagugauccccaccccaggauccuaaaucaugacuuaccugcuaauaaaaacucauuggaaaagugagaagaucuaaaaaaaaaaaaaaaaaaaaaaaaaaaaaaaaaaaaaaaaaaaaaaaaaaaaaaaaaaaaaaaaugcaucccccccccccccccccccccccccccccccaaaggcucuuuucagagccaccagaauu

SEQ ID NO: 768 - RNA, 2010 nt, Artificial Sequence
  mRNA product Design f-5 comprising derived and/or modified sequence from HRSV(A2)__F-del (opt4)
gggagacuuucccauucuguagcagaauuugguguugccuguggucuuggucccgcggagaagcuuaccauggagcugcugauccugaaggccaacgccaucaccaccauccugaccgccgugaccuucugcuucgccagcggccagaacaucaccgaggaguucuaccagagcaccugcagcgccgugagcaagggcuaccugagcgcccugagaaccggcugguacaccagcgugaucaccaucgagcugagcaacaucaaggagaacaagugcaacggcaccgacgccaaggugaagcugaucaagcaggagcuggacaaguacaagaacgccgugaccgagcugcagcugcugaugcagagcacccccgccaccaacaacagagccagaagagagcugcccagauucaugaacuacacccugaacaacgccaagaagaccaacgugacccugagcaagaagagaaagagaagauuccugggcuuccugcugggcgugggcagcgccaucgccagcggcguggccgugagcaaggugcugcaccuggagggcgaggugaacaagaucaagagcgcccugcugagcaccaacaaggccguggugagccugagcaacggcgugagcgugcugaccagcaaggugcuggaccugaagaacuacaucgacaagcagcugcugcccaucgugaacaagcagagcugcagcaucagcaacaucgagaccgugaucgaguuccagcagaagaacaacagacugcuggagaucaccagagaguucagcgugaacgccggcgugaccacccccgugagcaccuacaugcugaccaacagcgagcugcugagccugaucaacgacaugcccaucaccaacgaccagaagaagcugaugagcaacaacgugcagaucgugagacagcagagcuacagcaucaugagcaucaucaaggaggaggugcuggccuacguggugcagcugccccuguacggcgugaucgacacccccugcuggaagcugcacaccagcccccugugcaccaccaacaccaaggagggcagcaacaucugccugaccagaaccgacagaggcugguacugcgacaacgccggcagcgugagcuucuucccccaggccgagaccugcaaggugcagagcaacagaguguucugcgacaccaugaacagccugacccugcccagcgaggugaaccugugcaacguggacaucuucaaccccaaguacgacugcaagaucaugaccagcaagaccgacgugagcagcagcgugaucaccagccugggcgccaucgugagcugcuacggcaagaccaagugcaccgccagcaacaagaacagaggcaucaucaagaccuucagcaacggcugcgacuacgugagcaacaagggcguggacaccgugagcgugggcaacacccuguacuacgugaacaagcaggagggcaagagccuguacgugaagggcgagcccaucaucaacuucuacgacccccugguguuccccagcgacgaguucgacgccagcaucagccaggugaacgagaagaucaaccagagccuggccuucaucagaaagagcgacgagcugcugcacaacgugaacgccggcaagagcaccaccaacaucaugaucaccaccaucaucaucgugaucaucgugauccugcugagccugaucgccgugggccugcugcuguacugcaaggccagaugaggacuaguacuggcugcaucucccuuuccucuguccuccauccuucucccaggauggugaagggggaccugguacccagugauccccaccccaggauccuaaaucaugacuuaccugcuaauaaaaacucauuggaaaagugagaagaucuaaaaaaaaaaaaaaaaaaaaaaaaaaaaaaaaaaaaaaaaaaaaaaaaaaaaaaaaaaaaaaaaugcaucccccccccccccccccccccccccccccccaaaggcucuuuucagagccaccagaauu

SEQ ID NO: 769 - RNA, 2010 nt, Artificial Sequence
  mRNA product Design f-5 comprising derived and/or modified sequence from HRSV(A2)__F-del (opt5)
gggagacuuucccauucuguagcagaauuugguguugccuguggucuuggucccgcggagaagcuuaccauggagcugcucauccugaaggccaacgcuauuaccacaauccuuacggccgugaccuucugcuuugcgagcggccagaauauuacagaagaguucuaccaauccaccuguucugcugucagcaaaggguaucuguccgcccucagaacaggaugguacaccucuguuaucacaauugaacugagcaacaucaaggagaauaaaugcaacggcaccgacgccaaggugaaacuuaucaagcaggaacuggauaaguauaaaaaugcugugacggagcuccagcugcugaugcaguccacccccgccacaaacaaucgggcucgcagagagcucccucgguuuaugaacuacacccugaauaacgccaagaaaacaaaugucacccuuucuaagaaacgcaagagacgguuccugggguuucuccugggagugggcagcgcgauugccuccgggguugcugugagcaagguccuucaccuggaaggagaggugaacaaaaucaagucugcccuccuguccacgaauaaagcuguugugagccugucuaacggcgucuccgugcucacaagcaaggugcuggaccuuaaaaauuauauugauaagcaacugcucccgaucgucaacaaacagucuuguuccauuagcaacaucgaaaccguuauugaguuccagcagaagaauaaccgccugcuugagaucacaagagaauuuuccgugaaugccggcgugaccacccccgucucuacauacaugcugacgaacagcgagcuccugucccugaucaaugacaugccuauuaccaacgaucaaaagaaacucaugagcaauaacgugcagaucguucggcagcagucuuauuccauuaugagcaucauuaaggaagaggugcuggcguacgucgugcaacuuccccuguacgggguuaucgacacaccuugcuggaaacuccauaccucuccccuguguacaaccaauacgaaggaaggaagcaacaucugccuuacacgcaccgauagaggcugguauugugacaaugccggguccgugucuuucuuuccucaggcugagaccugcaaaguccagagcaaccggguguucugugauacaaugaacucccugacccucccgagcgaggucaaucugugcaauguggacauuuuuaaccccaaguacgauuguaagaucaugacaucuaaaacggacguuuccagcucugugauuaccucccugggagccaucgucagcugcuauggcaagacaaaaugcaccgcuuccaacaagaaucgcgggauuaucaaaacauucucuaacggaugugauuacgugagcaauaagggcguugacaccguguccgucggcaacacgcucuauuacgugaauaagcaagaagggaaaucucuguaugugaagggagagccuaucauuaacuuuuacgacccccuuguuuucccuagcgaugaauuugacgccuccaucagccaggucaaugagaaaauuaaccagucucuggccuucaucagaaaguccgaugaacuccugcacaaugugaacgcuggcaaaagcaccacaaauauuaugaucaccacaauuaucaucgugauuaucgucauucugcuuucucucaucgcgguggggcugcugcucuacugcaaggcccggugaggacuaguacuggcugcaucucccuuuccucuguccuccauccuucucccaggauggugaagggggaccugguacccagugauccccaccccaggauccuaaaucaugacuuaccugcuaauaaaaacucauuggaaaagugagaagaucuaaaaaaaaaaaaaaaaaaaaaaaaaaaaaaaaaaaaaaaaaaaaaaaaaaaaaaaaaaaaaaaaugcaucccccccccccccccccccccccccccccccaaaggcucuuuucagagccaccagaauu

SEQ ID NO: 770 - RNA, 2010 nt, Artificial Sequence
  mRNA product Design f-5 comprising derived and/or modified sequence from HRSV(A2)__F-del (opt6)
gggagacuuucccauucuguagcagaauuugguguugccuguggucuuggucccgcggagaagcuuaccauggaauuacuaauacucaaagccaacgcaauaacaacaauacuaacagcaguaacauucugcuucgcaucaggacaaaacaucacagaagaauuuuaccaaaguacaugcagugcagucucuaaaggauaccucagugccuuacgcacaggaugguacacaucaguaauaacaaucgaacuuucaaacauaaaagaaaacaaaugcaauggaaccgacgccaaaguaaaacuaaucaaacaagaacuagacaaauauaaaaaugcaguaacagaauuacaacuccuaaugcaauccacaccagcaacaaauaacagagcaagacgagaacucccucgauucaugaauuacacauuaaacaacgcaaaaaaaacuaacguaacuuuaucaaaaaaaagaaaacguagauuucuaggauuccuacuaggcguaggguccgccauugcaucaggaguagcaguuagcaaaguauuacauuuagaaggagaaguaaauaaaaucaaaagcgcacuacucucaaccaacaaagcaguaguaucacucucaaacggaguaucaguacuaacauccaaaguacucgaccucaaaaacuacauagacaaacaauuacuacccauaguaaacaaacaaucaugcucuauaucaaauaucgaaacaguaaucgaauuucaacaaaaaaacaaucgacuacuugaaauaacaagagaguucuccgucaaugccggagucaccacaccagucucaacauacaugcuaaccaacucugaacuccuaucacuaauaaaugacaugccaauaacaaacgaccaaaaaaaacuaaugucaaauaacguacaaauaguacgacaacaaaguuauuccauaaugaguauaaucaaagaagaaguguuagcauacguaguccaacuaccauuauauggaguaauagacacaccauguuggaaauuacacaccucaccacucugcacuaccaauacaaaagaaggcucaaauauaugccuaacucgcacagacagaggcugguacugcgauaacgcaggauccguaucuuucuuuccccaagcagaaacuugcaaaguacaaucaaacagagucuucugcgacaccaugaauagucucacauuaccaucugaaguaaaccuauguaacguagauauauucaauccaaaauacgacugcaaaauaaugacaucaaaaaccgacgucucuagcaguguaaucacaucacuaggagcaauaguaagcugcuauggaaaaacaaaauguacagcaucaaacaaaaacaggggaauaauaaaaaccuucucaaacggaugugacuacguaucaaauaaaggcguagacacaguaagcguaggaaacacccuauacuacguuaacaaacaagaagggaaaucauuauacguaaaaggagaaccaauaauaaacuucuacgauccacucguauucccauccgacgaauuugacgccagcauaucccaaguuaacgaaaaaauaaaccaaucacuugcauuuauacgaaaaucugaugaacuucuccacaacguaaaugcaggaaaauccaccaccaauauaaugaucacaacuaucaucauaguaauaaucgucauuuuacuaucauuaauagcaguuggccuacuucuauacugcaaagcaagauaaggacuaguacuggcugcaucucccuuuccucuguccuccauccuucucccaggauggugaagggggaccugguacccagugauccccaccccaggauccuaaaucaugacuuaccugcuaauaaaaacucauuggaaaagugagaagaucuaaaaaaaaaaaaaaaaaaaaaaaaaaaaaaaaaaaaaaaaaaaaaaaaaaaaaaaaaaaaaaaaugcaucccccccccccccccccccccccccccccccaaaggcucuuuucagagccaccagaauu

SEQ ID NO: 771 - RNA, 2010 nt, Artificial Sequence
  mRNA product Design f-5 comprising derived and/or modified sequence from HRSV(A2)__F-del (opt11)
gggagacuuucccauucuguagcagaauuugguguugccuguggucuuggucccgcggagaagcuuaccauggaacuacuaauccuaaaagccaacgcgaucaccaccauccuaacggcagucaccuucugcuucgcaucaggccaaaacaucacagaagaguucuaccaaagcacaugcuccgccguauccaaaggcuaccucagcgcccuacgcacaggcugguacacaucugucaucaccauagaacucuccaacaucaaagaaaacaaaugcaacggcacugacgccaaaguaaagcugaucaaacaagaacucgacaaauacaaaaacgcagucaccgaacuccaacuacucaugcaauccaccccugcaaccaacaacagggcccgccgcgaacucccccgcuucaugaacuacacuuuaaacaacgccaaaaagaccaacgucacacucagcaagaaacggaaacgacgauuccuaggguuucuccuaggcgucggcucggcaaucgccuccggcgucgccguaagcaaaguacuacaccuagaaggcgaagugaacaaaaucaaaagugcccuucucuccaccaacaaggccguagucucucuauccaacggagucucaguccucaccucaaagguccucgaccucaaaaacuacaucgacaaacaacuacuccccauugucaacaagcagucaugcuccauaucaaacaucgaaaccgucaucgaguuccaacagaaaaacaaccgacuccucgaaauaaccagagaguucucggucaacgccggcgucaccaccccagucagcaccuacaugcucacuaacuccgaacuccuaucccucaucaacgacaugccaauuaccaacgaccaaaagaaacuaaugucgaacaacguucaaaucguccgacaacaaaguuacuccaucaugagcauaaucaaagaagaaguucuagcguacgucguccaacucccacuauacggcgucaucgacacuccgugcuggaaacuccacacaucaccccuauguacaaccaacacaaaagaaggcagcaacaucugccucacccgcaccgaccgagggugguauugcgauaacgcuggcagcgucuccuucuucccccaagccgaaaccugcaaaguccaaucaaacagaguauucugcgacaccaugaacucccuuacucucccuagcgaagucaaccucugcaacguugacauauucaaccccaaauacgacugcaaaaucaugaccuccaagaccgacgucuccuccuccgucaucacaucucuaggugccauugucuccugcuacggaaaaaccaaaugcacagccuccaacaaaaaccgcggcaucauaaaaaccuucuccaacggcugcgacuacgucaguaauaaaggcgucgacacgguauccguugggaauacgcuuuacuacguaaauaaacaagaaggcaaaucccucuacgucaaaggugaacccaucauaaacuucuacgacccgcuuguguucccauccgacgaguucgacgccagcaucagccaggucaacgaaaagaucaaccaaucccuagccuucauccgcaaaagcgacgaacuacuacacaacgucaacgccggaaaauccacaaccaacaucaugaucaccaccaucaucaucgucaucaucguaauccuacucucucucaucgccgucggccuccuacuguacuguaaagcccgauagggacuaguacuggcugcaucucccuuuccucuguccuccauccuucucccaggauggugaagggggaccugguacccagugauccccaccccaggauccuaaaucaugacuuaccugcuaauaaaaacucauuggaaaagugagaagaucuaaaaaaaaaaaaaaaaaaaaaaaaaaaaaaaaaaaaaaaaaaaaaaaaaaaaaaaaaaaaaaaaugcaucccccccccccccccccccccccccccccccaaaggcucuuuucagagccaccagaauu

SEQ ID NO: 772 - RNA, 2006 nt, Artificial Sequence
  mRNA product Design g-1 comprising derived and/or modified sequence from HRSV(A2)__F-del (artificial)
gggagacuuucccauucuguagcagaauuugguguugccuguggucuuggucccgcggagaagcuuaccauggaguugcuaauccucaaagcaaaugcaauuaccacaauccucacugcagucacauuuuguuuugcuucuggucaaaacaucacugaagaauuuuaucaaucaacaugcagugcaguuagcaaaggcuaucuuagugcucugagaacugguugguauaccaguguuauaacuauagaauuaaguaauaucaaggaaaauaaguguaauggaacagaugcuaagguaaaauugauaaaacaagaauuagauaaauauaaaaaugcuguaacagaauugcaguugcucaugcaaagcacaccagcaacaaacaaucgagccagaagagaacuaccaagguuuaugaauuauacacucaacaaugccaaaaaaaccaauguaacauuaagcaagaaaaggaaaagaagauuucuugguuuuuuguuagguguuggaucugcaaucgccaguggcguugcuguaucuaagguccugcaccuagaaggggaagugaacaagaucaaaagugcucuacuauccacaaacaaggcuguagucagcuuaucaaauggaguuagugucuuaaccagcaaaguguuagaccucaaaaacuauauagauaaacaauuguuaccuauugugaacaagcaaagcugcagcauaucaaauauagaaacugugauagaguuccaacaaaagaacaacagacuacuagagauuaccagggaauuuaguguuaaugcagguguaacuacaccuguaagcacuuacauguuaacuaauagugaauuauugucauuaaucaaugauaugccuauaacaaaugaucagaaaaaguuaauguccaacaauguucaaauaguuagacagcaaaguuacucuaucauguccauaauaaaagaggaagucuuagcauauguaguacaauuaccacuauaugguguuauagauacacccuguuggaaacuacacacauccccucuauguacaaccaacacaaaagaaggguccaacaucuguuuaacaagaacugacagaggaugguacugugacaaugcaggaucaguaucuuucuucccacaagcugaaacauguaaaguucaaucaaaucgaguauuuugugacacaaugaacaguuuaacauuaccaagugaaguaaaucucugcaauguugacauauucaaccccaaauaugauuguaaaauuaugacuucaaaaacagauguaagcagcuccguuaucacaucucuaggagccauugugucaugcuauggcaaaacuaaauguacagcauccaauaaaaaucguggaaucauaaagacauuuucuaacgggugcgauuauguaucaaauaaagggguggacacugugucuguagguaacacauuauauuauguaaauaagcaagaagguaaaagucucuauguaaaaggugaaccaauaauaaauuucuaugacccauuaguauuccccucugaugaauuugaugcaucaauaucucaagucaacgagaagauuaaccagagccuagcauuuauucguaaauccgaugaauuauuacauaauguaaaugcugguaaauccaccacaaauaucaugauaacuacuauaauuauagugauuauaguaauauuguuaucauuaauugcuguuggacugcucuuauacuguaaggccagauaaggacuaguggaagcauuuuccuggcugauuaaaagaaauuacucagcuauggucaucuguuccuguuagaaggcuaugcagcauauuauauacuaugcgcauguuaugaaaugcauaauaaaaaauuuuaaaaaaucuaaaagaucuaaaaaaaaaaaaaaaaaaaaaaaaaaaaaaaaaaaaaaaaaaaaaaaaaaaaaaaaaaaaaaaaugcaucccccccccccccccccccccccccccccccaaaggcucuuuucagagccaccagaauu

SEQ ID NO: 773 - RNA, 2006 nt, Artificial Sequence
  mRNA product Design g-1 comprising derived and/or modified sequence from HRSV(A2)__F-del (opt1)
gggagacuuucccauucuguagcagaauuugguguugccuguggucuuggucccgcggagaagcuuaccauggagcugcucauccugaaggccaacgccaucaccaccauccugacggcggugaccuucugcuucgccagcggccagaacaucaccgaggaguucuaccaguccaccugcagcgccgucuccaagggguaccucagcgcccugcggacgggcugguacaccuccgugaucaccaucgagcugagcaacaucaaggagaacaagugcaacgggaccgacgccaaggugaagcucaucaagcaggagcuggacaaguacaagaacgcggucacggagcugcagcuccugaugcaguccaccccggcaaccaacaaccgcgcccggcgcgagcugccccgguucaugaacuacacccucaacaacgccaagaagacgaacgugacccugagcaagaagcgcaagcggcgcuuccugggcuuccuccugggggugggcuccgccaucgcgagcggcgucgccguguccaaggugcugcaccucgagggggaggucaacaagaucaagagcgcccugcuguccaccaacaaggccguggugagccucuccaacggcgucagcgugcugaccuccaaggugcuggaccucaagaacuacaucgacaagcagcugcugcccaucgucaacaagcagagcugcuccaucagcaacaucgagacggugaucgaguuccagcagaagaacaaccggcuccuggagaucacccgcgaguucagcgugaacgccggggucaccacccccguguccacguacaugcugaccaacagcgagcuccugucccugaucaacgacaugccgaucaccaacgaccagaagaagcucaugagcaacaacgugcagaucguccggcagcaguccuacagcaucauguccaucaucaaggaggaggugcuggcguacgugguccagcugccccucuacggcgugaucgacacccccugcuggaagcugcacacgagcccccugugcaccaccaacaccaaggagggguccaacaucugccucacgcgcaccgaccggggcugguacugcgacaacgccggcagcgucuccuucuucccgcaggccgagaccugcaaggugcagagcaaccgcguguucugcgacaccaugaacucccugacgcugcccagcgagguaaaccucugcaacgucgacaucuucaaccccaaguacgacugcaagaucaugaccuccaagaccgacgugagcuccagcgugaucaccucccugggggccaucgucagcugcuacggcaagacgaagugcaccgccagcaacaagaaccgggggaucaucaagaccuucuccaacggcugcgacuacgugagcaacaagggcguggacaccguguccgucgggaacacccuguacuacgugaacaagcaggagggcaagagccucuacgugaagggggagcccaucaucaacuucuacgacccgcuggucuuccccuccgacgaguucgacgcgagcaucucccaggugaacgagaagaucaaccagagccuggccuucauccgcaaguccgacgagcugcuccacaacgugaacgccggcaagagcacgaccaacaucaugaucaccaccaucaucaucgucaucaucgugauccugcugucccucaucgccguggggcugcugcucuacugcaaggcccggugaggacuaguggaagcauuuuccuggcugauuaaaagaaauuacucagcuauggucaucuguuccuguuagaaggcuaugcagcauauuauauacuaugcgcauguuaugaaaugcauaauaaaaaauuuuaaaaaaucuaaaagaucuaaaaaaaaaaaaaaaaaaaaaaaaaaaaaaaaaaaaaaaaaaaaaaaaaaaaaaaaaaaaaaaaugcaucccccccccccccccccccccccccccccccaaaggcucuuuucagagccaccagaauu

SEQ ID NO: 774 - RNA, 2006 nt, Artificial Sequence
  mRNA product Design g-1 comprising derived and/or modified sequence from HRSV(A2)__F-del (opt1)
gggagacuuucccauucuguagcagaauuugguguugccuguggucuuggucccgcggagaagcuuaccauggagcugcucauccugaaggccaacgccaucaccaccauccugacggcggugaccuucugcuucgccagcggccagaacaucaccgaggaguucuaccaguccacgugcagcgccgucuccaagggguaccucagcgcccugcgcaccggcugguacaccuccgugaucaccaucgagcugagcaacaucaaggagaacaagugcaacgggaccgacgccaaggugaagcucaucaagcaggagcuggacaaguacaagaacgcggucacggagcugcagcuccugaugcaguccacccccgccaccaacaaccgggcccgccgggagcugccgcgcuucaugaacuacacccucaacaacgccaagaagacgaacgugacccugagcaagaagcggaagcgccgguuccugggcuuccuccugggggugggcuccgcgaucgccagcggcgucgccguguccaaggugcugcaccucgagggggaggucaacaagaucaagagcgcccugcuguccaccaacaaggccguggugagccucuccaacggcgucagcgugcugaccuccaaggugcuggaccucaagaacuacaucgacaagcagcugcugcccaucgucaacaagcagagcugcuccaucagcaacaucgagacggugaucgaguuccagcagaagaacaaccgccuccuggagaucacccgggaguucagcgugaacgcgggggucaccacccccguguccacguacaugcugaccaacagcgagcuccugucccugaucaacgacaugcccaucaccaacgaccagaagaagcucaugagcaacaacgugcagaucguccgccagcaguccuacagcaucauguccaucaucaaggaggaggugcuggccuacgugguccagcugccgcucuacggcgugaucgacacccccugcuggaagcugcacacgagcccccugugcaccaccaacaccaaggagggguccaacaucugccucacgcggaccgaccgcggcugguacugcgacaacgccggcagcgucuccuucuucccccaggccgagaccugcaaggugcagagcaaccggguguucugcgacaccaugaacucccugacgcugccgagcgaggucaaccucugcaacguggacaucuucaaccccaaguacgacugcaagaucaugaccuccaagaccgacgugagcuccagcgucaucaccucccugggggccaucgugagcugcuacggcaagacgaagugcaccgcgagcaacaagaaccgcgggaucaucaagaccuucuccaacggcugcgacuacgugagcaacaagggcgucgacaccguguccguggggaacacccuguacuacgucaacaagcaggagggcaagagccucuacgugaagggggagcccaucaucaacuucuacgacccccugguguucccguccgacgaguucgacgccagcaucucccaggucaacgagaagaucaaccagagccuggccuucauccggaaguccgacgagcuccugcacaacgugaacgccggcaagagcacgaccaacaucaugaucaccaccaucaucaucgugaucaucgucauccugcugucccucaucgccguggggcugcugcucuacugcaaggcgcgcugaggacuaguggaagcauuuuccuggcugauuaaaagaaauuacucagcuauggucaucuguuccuguuagaaggcuaugcagcauauuauauacuaugcgcauguuaugaaaugcauaauaaaaaauuuuaaaaaaucuaaaagaucuaaaaaaaaaaaaaaaaaaaaaaaaaaaaaaaaaaaaaaaaaaaaaaaaaaaaaaaaaaaaaaaaugcaucccccccccccccccccccccccccccccccaaaggcucuuuucagagccaccagaauu

SEQ ID NO: 775 - RNA, 2006 nt, Artificial Sequence
  mRNA product Design g-1 comprising derived and/or modified sequence from HRSV(A2)__F-del (opt2)
gggagacuuucccauucuguagcagaauuugguguugccuguggucuuggucccgcggagaagcuuaccauggagcuccucauccucaaggccaacgccaucaccaccauccucaccgccgucaccuucugcuucgccuccggccagaacaucaccgaggaguucuaccaguccaccugcuccgccgucuccaagggcuaccucuccgcccuccgcaccggcugguacaccuccgucaucaccaucgagcucuccaacaucaaggagaacaagugcaacggcaccgacgccaaggucaagcucaucaagcaggagcucgacaaguacaagaacgccgucaccgagcuccagcuccucaugcaguccacccccgccaccaacaaccgcgcccgccgcgagcucccccgcuucaugaacuacacccucaacaacgccaagaagaccaacgucacccucuccaagaagcgcaagcgccgcuuccucggcuuccuccucggcgucggcuccgccaucgccuccggcgucgccgucuccaagguccuccaccucgagggcgaggucaacaagaucaaguccgcccuccucuccaccaacaaggccgucgucucccucuccaacggcgucuccguccucaccuccaagguccucgaccucaagaacuacaucgacaagcagcuccuccccaucgucaacaagcaguccugcuccaucuccaacaucgagaccgucaucgaguuccagcagaagaacaaccgccuccucgagaucacccgcgaguucuccgucaacgccggcgucaccacccccgucuccaccuacaugcucaccaacuccgagcuccucucccucaucaacgacaugcccaucaccaacgaccagaagaagcucauguccaacaacguccagaucguccgccagcaguccuacuccaucauguccaucaucaaggaggagguccucgccuacgucguccagcucccccucuacggcgucaucgacacccccugcuggaagcuccacaccuccccccucugcaccaccaacaccaaggagggcuccaacaucugccucacccgcaccgaccgcggcugguacugcgacaacgccggcuccgucuccuucuucccccaggccgagaccugcaagguccaguccaaccgcgucuucugcgacaccaugaacucccucacccuccccuccgaggucaaccucugcaacgucgacaucuucaaccccaaguacgacugcaagaucaugaccuccaagaccgacgucuccuccuccgucaucaccucccucggcgccaucgucuccugcuacggcaagaccaagugcaccgccuccaacaagaaccgcggcaucaucaagaccuucuccaacggcugcgacuacgucuccaacaagggcgucgacaccgucuccgucggcaacacccucuacuacgucaacaagcaggagggcaagucccucuacgucaagggcgagcccaucaucaacuucuacgacccccucgucuuccccuccgacgaguucgacgccuccaucucccaggucaacgagaagaucaaccagucccucgccuucauccgcaaguccgacgagcuccuccacaacgucaacgccggcaaguccaccaccaacaucaugaucaccaccaucaucaucgucaucaucgucauccuccucucccucaucgccgucggccuccuccucuacugcaaggcccgcugaggacuaguggaagcauuuuccuggcugauuaaaagaaauuacucagcuauggucaucuguuccuguuagaaggcuaugcagcauauuauauacuaugcgcauguuaugaaaugcauaauaaaaaauuuuaaaaaaucuaaaagaucuaaaaaaaaaaaaaaaaaaaaaaaaaaaaaaaaaaaaaaaaaaaaaaaaaaaaaaaaaaaaaaaaugcaucccccccccccccccccccccccccccccccaaaggcucuuuucagagccaccagaauu

SEQ ID NO: 776 - RNA, 2006 nt, Artificial Sequence
  mRNA product Design g-1 comprising derived and/or modified sequence from HRSV(A2)__F-del (opt3)
gggagacuuucccauucuguagcagaauuugguguugccuguggucuuggucccgcggagaagcuuaccauggagcugcucauccuuaaggccaacgcuauuaccacaauacugacugcagugacguucugcuuugccagcggccagaauaucaccgaagaguucuaccaauccacauguucugcggucucaaaaggguauuugagugcuuuaagaacuggaugguacaccagcguuauuacaaucgaacuguccaacauuaaggagaauaaaugcaacgguaccgacgccaaggugaaacuaaucaagcaggaacucgauaaguauaaaaaugcaguaacugagcugcagcuucugaugcagucuacacccgccaccaacaauagggcucggcgcgaguugccucgauuuaugaacuacacgcucaauaacgcaaagaaaacuaaugugacccugucgaagaaacguaagagaagguuccugggcuuucucuuaggggucggaucagccauagcuagcggcguggccguuaguaaggugcugcaccuugaaggugaggucaacaaaaucaaguccgcguugcugucuacaaauaaagcagugguaagccuauccaacgggguuucagugcucacuucuaagguccuggaccuuaaaaauuauauugauaagcaacuguugccaaucgugaacaaacagagcuguucuauuuccaacaucgaaaccgugauagaguuccagcagaagaauaaccggcuccuggagauuacacgcgaauuuucagucaaugccggaguuaccacgccggugagcacuuacauguuaacaaacagugagcugcucucucuuaucaaugacaugcccauuaccaacgaucaaaagaaacugauguccaauaacguacagaucgugagacagcagagcuauucgaucaugucuauuauaaaggaagaggucuuggcuuacgugguucaacuaccucuguacggcgugaucgacacuccaugcuggaaacuccauacauccccacuguguaccacgaauaccaaggaaggcucaaacauuugccuuacaaggacugaucgggggugguauugugacaaugccggaagugucagcuucuuuccucaggcagagaccugcaaagugcaguccaaccgcguauucugugauacaaugaauagucugacuuugccaagcgagguuaaccucugcaauguggacaucuuuaaccccaaguacgauuguaagauaaugaccucaaaaacagacgucaguuccagcgugauuaccucucugggugcuaucgucucaugcuauggcaagacuaaaugcacggccaguaacaagaaucgagggaucauuaaaacauucagcaacggaugugauuacguguccaauaagggcguugacaccgugucuguagguaacacuuuauauuacgucaauaagcaagaagggaaaucgcuguaugugaagggagagccuaucauuaacuuuuacgacccccuaguuuucccgagcgaugaauuugacgcguccauaucacaggugaaugagaaaaucaaccagagucucgccuucauuagaaagucugaugaacugcuucacaaugucaacgcaggcaaaagcaccacaaauaucaugaucaccacuauuauaaucgugauuaucguaauuuugcugucccucaucgcugugggccugcuucuguacugcaaggccaggugaggacuaguggaagcauuuuccuggcugauuaaaagaaauuacucagcuauggucaucuguuccuguuagaaggcuaugcagcauauuauauacuaugcgcauguuaugaaaugcauaauaaaaaauuuuaaaaaaucuaaaagaucuaaaaaaaaaaaaaaaaaaaaaaaaaaaaaaaaaaaaaaaaaaaaaaaaaaaaaaaaaaaaaaaaugcaucccccccccccccccccccccccccccccccaaaggcucuuuucagagccaccagaauu

SEQ ID NO: 777 - RNA, 2006 nt, Artificial Sequence
  mRNA product Design g-1 comprising derived and/or modified sequence from HRSV(A2)__F-del (opt4)
gggagacuuucccauucuguagcagaauuugguguugccuguggucuuggucccgcggagaagcuuaccauggagcugcugauccugaaggccaacgccaucaccaccauccugaccgccgugaccuucugcuucgccagcggccagaacaucaccgaggaguucuaccagagcaccugcagcgccgugagcaagggcuaccugagcgcccugagaaccggcugguacaccagcgugaucaccaucgagcugagcaacaucaaggagaacaagugcaacggcaccgacgccaaggugaagcugaucaagcaggagcuggacaaguacaagaacgccgugaccgagcugcagcugcugaugcagagcacccccgccaccaacaacagagccagaagagagcugcccagauucaugaacuacacccugaacaacgccaagaagaccaacgugacccugagcaagaagagaaagagaagauuccugggcuuccugcugggcgugggcagcgccaucgccagcggcguggccgugagcaaggugcugcaccuggagggcgaggugaacaagaucaagagcgcccugcugagcaccaacaaggccguggugagccugagcaacggcgugagcgugcugaccagcaaggugcuggaccugaagaacuacaucgacaagcagcugcugcccaucgugaacaagcagagcugcagcaucagcaacaucgagaccgugaucgaguuccagcagaagaacaacagacugcuggagaucaccagagaguucagcgugaacgccggcgugaccacccccgugagcaccuacaugcugaccaacagcgagcugcugagccugaucaacgacaugcccaucaccaacgaccagaagaagcugaugagcaacaacgugcagaucgugagacagcagagcuacagcaucaugagcaucaucaaggaggaggugcuggccuacguggugcagcugccccuguacggcgugaucgacacccccugcuggaagcugcacaccagcccccugugcaccaccaacaccaaggagggcagcaacaucugccugaccagaaccgacagaggcugguacugcgacaacgccggcagcgugagcuucuucccccaggccgagaccugcaaggugcagagcaacagaguguucugcgacaccaugaacagccugacccugcccagcgaggugaaccugugcaacguggacaucuucaaccccaaguacgacugcaagaucaugaccagcaagaccgacgugagcagcagcgugaucaccagccugggcgccaucgugagcugcuacggcaagaccaagugcaccgccagcaacaagaacagaggcaucaucaagaccuucagcaacggcugcgacuacgugagcaacaagggcguggacaccgugagcgugggcaacacccuguacuacgugaacaagcaggagggcaagagccuguacgugaagggcgagcccaucaucaacuucuacgacccccugguguuccccagcgacgaguucgacgccagcaucagccaggugaacgagaagaucaaccagagccuggccuucaucagaaagagcgacgagcugcugcacaacgugaacgccggcaagagcaccaccaacaucaugaucaccaccaucaucaucgugaucaucgugauccugcugagccugaucgccgugggccugcugcuguacugcaaggccagaugaggacuaguggaagcauuuuccuggcugauuaaaagaaauuacucagcuauggucaucuguuccuguuagaaggcuaugcagcauauuauauacuaugcgcauguuaugaaaugcauaauaaaaaauuuuaaaaaaucuaaaagaucuaaaaaaaaaaaaaaaaaaaaaaaaaaaaaaaaaaaaaaaaaaaaaaaaaaaaaaaaaaaaaaaaugcaucccccccccccccccccccccccccccccccaaaggcucuuuucagagccaccagaauu

SEQ ID NO: 778 - RNA, 2006 nt, Artificial Sequence
  mRNA product Design g-1 comprising derived and/or modified sequence from HRSV(A2)__F-del (opt5)
gggagacuuucccauucuguagcagaauuugguguugccuguggucuuggucccgcggagaagcuuaccauggagcugcucauccugaaggccaacgcuauuaccacaauccuuacggccgugaccuucugcuuugcgagcggccagaauauuacagaagaguucuaccaauccaccuguucugcugucagcaaaggguaucuguccgcccucagaacaggaugguacaccucuguuaucacaauugaacugagcaacaucaaggagaauaaaugcaacggcaccgacgccaaggugaaacuuaucaagcaggaacuggauaaguauaaaaaugcugugacggagcuccagcugcugaugcaguccacccccgccacaaacaaucgggcucgcagagagcucccucgguuuaugaacuacacccugaauaacgccaagaaaacaaaugucacccuuucuaagaaacgcaagagacgguuccugggguuucuccugggagugggcagcgcgauugccuccgggguugcugugagcaagguccuucaccuggaaggagaggugaacaaaaucaagucugcccuccuguccacgaauaaagcuguugugagccugucuaacggcgucuccgugcucacaagcaaggugcuggaccuuaaaaauuauauugauaagcaacugcucccgaucgucaacaaacagucuuguuccauuagcaacaucgaaaccguuauugaguuccagcagaagaauaaccgccugcuugagaucacaagagaauuuuccgugaaugccggcgugaccacccccgucucuacauacaugcugacgaacagcgagcuccugucccugaucaaugacaugccuauuaccaacgaucaaaagaaacucaugagcaauaacgugcagaucguucggcagcagucuuauuccauuaugagcaucauuaaggaagaggugcuggcguacgucgugcaacuuccccuguacgggguuaucgacacaccuugcuggaaacuccauaccucuccccuguguacaaccaauacgaaggaaggaagcaacaucugccuuacacgcaccgauagaggcugguauugugacaaugccggguccgugucuuucuuuccucaggcugagaccugcaaaguccagagcaaccggguguucugugauacaaugaacucccugacccucccgagcgaggucaaucugugcaauguggacauuuuuaaccccaaguacgauuguaagaucaugacaucuaaaacggacguuuccagcucugugauuaccucccugggagccaucgucagcugcuauggcaagacaaaaugcaccgcuuccaacaagaaucgcgggauuaucaaaacauucucuaacggaugugauuacgugagcaauaagggcguugacaccguguccgucggcaacacgcucuauuacgugaauaagcaagaagggaaaucucuguaugugaagggagagccuaucauuaacuuuuacgacccccuuguuuucccuagcgaugaauuugacgccuccaucagccaggucaaugagaaaauuaaccagucucuggccuucaucagaaaguccgaugaacuccugcacaaugugaacgcuggcaaaagcaccacaaauauuaugaucaccacaauuaucaucgugauuaucgucauucugcuuucucucaucgcgguggggcugcugcucuacugcaaggcccggugaggacuaguggaagcauuuuccuggcugauuaaaagaaauuacucagcuauggucaucuguuccuguuagaaggcuaugcagcauauuauauacuaugcgcauguuaugaaaugcauaauaaaaaauuuuaaaaaaucuaaaagaucuaaaaaaaaaaaaaaaaaaaaaaaaaaaaaaaaaaaaaaaaaaaaaaaaaaaaaaaaaaaaaaaaugcaucccccccccccccccccccccccccccccccaaaggcucuuuucagagccaccagaauu

SEQ ID NO: 779 - RNA, 2006 nt, Artificial Sequence
  mRNA product Design g-1 comprising derived and/or modified sequence from HRSV(A2)__F-del (opt6)
gggagacuuucccauucuguagcagaauuugguguugccuguggucuuggucccgcggagaagcuuaccauggaauuacuaauacucaaagccaacgcaauaacaacaauacuaacagcaguaacauucugcuucgcaucaggacaaaacaucacagaagaauuuuaccaaaguacaugcagugcagucucuaaaggauaccucagugccuuacgcacaggaugguacacaucaguaauaacaaucgaacuuucaaacauaaaagaaaacaaaugcaauggaaccgacgccaaaguaaaacuaaucaaacaagaacuagacaaauauaaaaaugcaguaacagaauuacaacuccuaaugcaauccacaccagcaacaaauaacagagcaagacgagaacucccucgauucaugaauuacacauuaaacaacgcaaaaaaaacuaacguaacuuuaucaaaaaaaagaaaacguagauuucuaggauuccuacuaggcguaggguccgccauugcaucaggaguagcaguuagcaaaguauuacauuuagaaggagaaguaaauaaaaucaaaagcgcacuacucucaaccaacaaagcaguaguaucacucucaaacggaguaucaguacuaacauccaaaguacucgaccucaaaaacuacauagacaaacaauuacuacccauaguaaacaaacaaucaugcucuauaucaaauaucgaaacaguaaucgaauuucaacaaaaaaacaaucgacuacuugaaauaacaagagaguucuccgucaaugccggagucaccacaccagucucaacauacaugcuaaccaacucugaacuccuaucacuaauaaaugacaugccaauaacaaacgaccaaaaaaaacuaaugucaaauaacguacaaauaguacgacaacaaaguuauuccauaaugaguauaaucaaagaagaaguguuagcauacguaguccaacuaccauuauauggaguaauagacacaccauguuggaaauuacacaccucaccacucugcacuaccaauacaaaagaaggcucaaauauaugccuaacucgcacagacagaggcugguacugcgauaacgcaggauccguaucuuucuuuccccaagcagaaacuugcaaaguacaaucaaacagagucuucugcgacaccaugaauagucucacauuaccaucugaaguaaaccuauguaacguagauauauucaauccaaaauacgacugcaaaauaaugacaucaaaaaccgacgucucuagcaguguaaucacaucacuaggagcaauaguaagcugcuauggaaaaacaaaauguacagcaucaaacaaaaacaggggaauaauaaaaaccuucucaaacggaugugacuacguaucaaauaaaggcguagacacaguaagcguaggaaacacccuauacuacguuaacaaacaagaagggaaaucauuauacguaaaaggagaaccaauaauaaacuucuacgauccacucguauucccauccgacgaauuugacgccagcauaucccaaguuaacgaaaaaauaaaccaaucacuugcauuuauacgaaaaucugaugaacuucuccacaacguaaaugcaggaaaauccaccaccaauauaaugaucacaacuaucaucauaguaauaaucgucauuuuacuaucauuaauagcaguuggccuacuucuauacugcaaagcaagauaaggacuaguggaagcauuuuccuggcugauuaaaagaaauuacucagcuauggucaucuguuccuguuagaaggcuaugcagcauauuauauacuaugcgcauguuaugaaaugcauaauaaaaaauuuuaaaaaaucuaaaagaucuaaaaaaaaaaaaaaaaaaaaaaaaaaaaaaaaaaaaaaaaaaaaaaaaaaaaaaaaaaaaaaaaugcaucccccccccccccccccccccccccccccccaaaggcucuuuucagagccaccagaauu

SEQ ID NO: 780 - RNA, 2006 nt, Artificial Sequence
  mRNA product Design g-1 comprising derived and/or modified sequence from HRSV(A2)__F-del (opt11)
gggagacuuucccauucuguagcagaauuugguguugccuguggucuuggucccgcggagaagcuuaccauggaacuacuaauccuaaaagccaacgcgaucaccaccauccuaacggcagucaccuucugcuucgcaucaggccaaaacaucacagaagaguucuaccaaagcacaugcuccgccguauccaaaggcuaccucagcgcccuacgcacaggcugguacacaucugucaucaccauagaacucuccaacaucaaagaaaacaaaugcaacggcacugacgccaaaguaaagcugaucaaacaagaacucgacaaauacaaaaacgcagucaccgaacuccaacuacucaugcaauccaccccugcaaccaacaacagggcccgccgcgaacucccccgcuucaugaacuacacuuuaaacaacgccaaaaagaccaacgucacacucagcaagaaacggaaacgacgauuccuaggguuucuccuaggcgucggcucggcaaucgccuccggcgucgccguaagcaaaguacuacaccuagaaggcgaagugaacaaaaucaaaagugcccuucucuccaccaacaaggccguagucucucuauccaacggagucucaguccucaccucaaagguccucgaccucaaaaacuacaucgacaaacaacuacuccccauugucaacaagcagucaugcuccauaucaaacaucgaaaccgucaucgaguuccaacagaaaaacaaccgacuccucgaaauaaccagagaguucucggucaacgccggcgucaccaccccagucagcaccuacaugcucacuaacuccgaacuccuaucccucaucaacgacaugccaauuaccaacgaccaaaagaaacuaaugucgaacaacguucaaaucguccgacaacaaaguuacuccaucaugagcauaaucaaagaagaaguucuagcguacgucguccaacucccacuauacggcgucaucgacacuccgugcuggaaacuccacacaucaccccuauguacaaccaacacaaaagaaggcagcaacaucugccucacccgcaccgaccgagggugguauugcgauaacgcuggcagcgucuccuucuucccccaagccgaaaccugcaaaguccaaucaaacagaguauucugcgacaccaugaacucccuuacucucccuagcgaagucaaccucugcaacguugacauauucaaccccaaauacgacugcaaaaucaugaccuccaagaccgacgucuccuccuccgucaucacaucucuaggugccauugucuccugcuacggaaaaaccaaaugcacagccuccaacaaaaaccgcggcaucauaaaaaccuucuccaacggcugcgacuacgucaguaauaaaggcgucgacacgguauccguugggaauacgcuuuacuacguaaauaaacaagaaggcaaaucccucuacgucaaaggugaacccaucauaaacuucuacgacccgcuuguguucccauccgacgaguucgacgccagcaucagccaggucaacgaaaagaucaaccaaucccuagccuucauccgcaaaagcgacgaacuacuacacaacgucaacgccggaaaauccacaaccaacaucaugaucaccaccaucaucaucgucaucaucguaauccuacucucucucaucgccgucggccuccuacuguacuguaaagcccgauagggacuaguggaagcauuuuccuggcugauuaaaagaaauuacucagcuauggucaucuguuccuguuagaaggcuaugcagcauauuauauacuaugcgcauguuaugaaaugcauaauaaaaaauuuuaaaaaaucuaaaagaucuaaaaaaaaaaaaaaaaaaaaaaaaaaaaaaaaaaaaaaaaaaaaaaaaaaaaaaaaaaaaaaaaugcaucccccccccccccccccccccccccccccccaaaggcucuuuucagagccaccagaauu

SEQ ID NO: 781 - RNA, 2021 nt, Artificial Sequence
  mRNA product Design g-2 comprising derived and/or modified sequence from HRSV(A2)__F-del (artificial)
gggagaguccgcucagccagguugcagaagcggcuuagcguguguccuaaucuucucucugcguguagguaggccugugccgcaaacaagcuuaccauggaguugcuaauccucaaagcaaaugcaauuaccacaauccucacugcagucacauuuuguuuugcuucuggucaaaacaucacugaagaauuuuaucaaucaacaugcagugcaguuagcaaaggcuaucuuagugcucugagaacugguugguauaccaguguuauaacuauagaauuaaguaauaucaaggaaaauaaguguaauggaacagaugcuaagguaaaauugauaaaacaagaauuagauaaauauaaaaaugcuguaacagaauugcaguugcucaugcaaagcacaccagcaacaaacaaucgagccagaagagaacuaccaagguuuaugaauuauacacucaacaaugccaaaaaaaccaauguaacauuaagcaagaaaaggaaaagaagauuucuugguuuuuuguuagguguuggaucugcaaucgccaguggcguugcuguaucuaagguccugcaccuagaaggggaagugaacaagaucaaaagugcucuacuauccacaaacaaggcuguagucagcuuaucaaauggaguuagugucuuaaccagcaaaguguuagaccucaaaaacuauauagauaaacaauuguuaccuauugugaacaagcaaagcugcagcauaucaaauauagaaacugugauagaguuccaacaaaagaacaacagacuacuagagauuaccagggaauuuaguguuaaugcagguguaacuacaccuguaagcacuuacauguuaacuaauagugaauuauugucauuaaucaaugauaugccuauaacaaaugaucagaaaaaguuaauguccaacaauguucaaauaguuagacagcaaaguuacucuaucauguccauaauaaaagaggaagucuuagcauauguaguacaauuaccacuauaugguguuauagauacacccuguuggaaacuacacacauccccucuauguacaaccaacacaaaagaaggguccaacaucuguuuaacaagaacugacagaggaugguacugugacaaugcaggaucaguaucuuucuucccacaagcugaaacauguaaaguucaaucaaaucgaguauuuugugacacaaugaacaguuuaacauuaccaagugaaguaaaucucugcaauguugacauauucaaccccaaauaugauuguaaaauuaugacuucaaaaacagauguaagcagcuccguuaucacaucucuaggagccauugugucaugcuauggcaaaacuaaauguacagcauccaauaaaaaucguggaaucauaaagacauuuucuaacgggugcgauuauguaucaaauaaagggguggacacugugucuguagguaacacauuauauuauguaaauaagcaagaagguaaaagucucuauguaaaaggugaaccaauaauaaauuucuaugacccauuaguauuccccucugaugaauuugaugcaucaauaucucaagucaacgagaagauuaaccagagccuagcauuuauucguaaauccgaugaauuauuacauaauguaaaugcugguaaauccaccacaaauaucaugauaacuacuauaauuauagugauuauaguaauauuguuaucauuaauugcuguuggacugcucuuauacuguaaggccagauaaggacuaguaauaaggaaacuguaugaaugucugugggcaggaagugaagagauccuucuguaaagguuuuuggaauuaugucugcugaauaauaaacuuuuuugaaauaauaaaucugguagaaaaaugagaucuaaaaaaaaaaaaaaaaaaaaaaaaaaaaaaaaaaaaaaaaaaaaaaaaaaaaaaaaaaaaaaaaugcaucccccccccccccccccccccccccccccccaaaggcucuuuucagagccaccagaauu

SEQ ID NO: 782 - RNA, 2021 nt, Artificial Sequence
  mRNA product Design g-2 comprising derived and/or modified sequence from HRSV(A2)__F-del (opt1)
gggagaguccgcucagccagguugcagaagcggcuuagcguguguccuaaucuucucucugcguguagguaggccugugccgcaaacaagcuuaccauggagcugcucauccugaaggccaacgccaucaccaccauccugacggcggugaccuucugcuucgccagcggccagaacaucaccgaggaguucuaccaguccaccugcagcgccgucuccaagggguaccucagcgcccugcggacgggcugguacaccuccgugaucaccaucgagcugagcaacaucaaggagaacaagugcaacgggaccgacgccaaggugaagcucaucaagcaggagcuggacaaguacaagaacgcggucacggagcugcagcuccugaugcaguccaccccggcaaccaacaaccgcgcccggcgcgagcugccccgguucaugaacuacacccucaacaacgccaagaagacgaacgugacccugagcaagaagcgcaagcggcgcuuccugggcuuccuccugggggugggcuccgccaucgcgagcggcgucgccguguccaaggugcugcaccucgagggggaggucaacaagaucaagagcgcccugcuguccaccaacaaggccguggugagccucuccaacggcgucagcgugcugaccuccaaggugcuggaccucaagaacuacaucgacaagcagcugcugcccaucgucaacaagcagagcugcuccaucagcaacaucgagacggugaucgaguuccagcagaagaacaaccggcuccuggagaucacccgcgaguucagcgugaacgccggggucaccacccccguguccacguacaugcugaccaacagcgagcuccugucccugaucaacgacaugccgaucaccaacgaccagaagaagcucaugagcaacaacgugcagaucguccggcagcaguccuacagcaucauguccaucaucaaggaggaggugcuggcguacgugguccagcugccccucuacggcgugaucgacacccccugcuggaagcugcacacgagcccccugugcaccaccaacaccaaggagggguccaacaucugccucacgcgcaccgaccggggcugguacugcgacaacgccggcagcgucuccuucuucccgcaggccgagaccugcaaggugcagagcaaccgcguguucugcgacaccaugaacucccugacgcugcccagcgagguaaaccucugcaacgucgacaucuucaaccccaaguacgacugcaagaucaugaccuccaagaccgacgugagcuccagcgugaucaccucccugggggccaucgucagcugcuacggcaagacgaagugcaccgccagcaacaagaaccgggggaucaucaagaccuucuccaacggcugcgacuacgugagcaacaagggcguggacaccguguccgucgggaacacccuguacuacgugaacaagcaggagggcaagagccucuacgugaagggggagcccaucaucaacuucuacgacccgcuggucuuccccuccgacgaguucgacgcgagcaucucccaggugaacgagaagaucaaccagagccuggccuucauccgcaaguccgacgagcugcuccacaacgugaacgccggcaagagcacgaccaacaucaugaucaccaccaucaucaucgucaucaucgugauccugcugucccucaucgccguggggcugcugcucuacugcaaggcccggugaggacuaguaauaaggaaacuguaugaaugucugugggcaggaagugaagagauccuucuguaaagguuuuuggaauuaugucugcugaauaauaaacuuuuuugaaauaauaaaucugguagaaaaaugagaucuaaaaaaaaaaaaaaaaaaaaaaaaaaaaaaaaaaaaaaaaaaaaaaaaaaaaaaaaaaaaaaaaugcaucccccccccccccccccccccccccccccccaaaggcucuuuucagagccaccagaauu

SEQ ID NO: 783 - RNA, 2021 nt, Artificial Sequence
  mRNA product Design g-2 comprising derived and/or modified sequence from HRSV(A2)__F-del (opt1)
gggagaguccgcucagccagguugcagaagcggcuuagcguguguccuaaucuucucucugcguguagguaggccugugccgcaaacaagcuuaccauggagcugcucauccugaaggccaacgccaucaccaccauccugacggcggugaccuucugcuucgccagcggccagaacaucaccgaggaguucuaccaguccacgugcagcgccgucuccaagggguaccucagcgcccugcgcaccggcugguacaccuccgugaucaccaucgagcugagcaacaucaaggagaacaagugcaacgggaccgacgccaaggugaagcucaucaagcaggagcuggacaaguacaagaacgcggucacggagcugcagcuccugaugcaguccacccccgccaccaacaaccgggcccgccgggagcugccgcgcuucaugaacuacacccucaacaacgccaagaagacgaacgugacccugagcaagaagcggaagcgccgguuccugggcuuccuccugggggugggcuccgcgaucgccagcggcgucgccguguccaaggugcugcaccucgagggggaggucaacaagaucaagagcgcccugcuguccaccaacaaggccguggugagccucuccaacggcgucagcgugcugaccuccaaggugcuggaccucaagaacuacaucgacaagcagcugcugcccaucgucaacaagcagagcugcuccaucagcaacaucgagacggugaucgaguuccagcagaagaacaaccgccuccuggagaucacccgggaguucagcgugaacgcgggggucaccacccccguguccacguacaugcugaccaacagcgagcuccugucccugaucaacgacaugcccaucaccaacgaccagaagaagcucaugagcaacaacgugcagaucguccgccagcaguccuacagcaucauguccaucaucaaggaggaggugcuggccuacgugguccagcugccgcucuacggcgugaucgacacccccugcuggaagcugcacacgagcccccugugcaccaccaacaccaaggagggguccaacaucugccucacgcggaccgaccgcggcugguacugcgacaacgccggcagcgucuccuucuucccccaggccgagaccugcaaggugcagagcaaccggguguucugcgacaccaugaacucccugacgcugccgagcgaggucaaccucugcaacguggacaucuucaaccccaaguacgacugcaagaucaugaccuccaagaccgacgugagcuccagcgucaucaccucccugggggccaucgugagcugcuacggcaagacgaagugcaccgcgagcaacaagaaccgcgggaucaucaagaccuucuccaacggcugcgacuacgugagcaacaagggcgucgacaccguguccguggggaacacccuguacuacgucaacaagcaggagggcaagagccucuacgugaagggggagcccaucaucaacuucuacgacccccugguguucccguccgacgaguucgacgccagcaucucccaggucaacgagaagaucaaccagagccuggccuucauccggaaguccgacgagcuccugcacaacgugaacgccggcaagagcacgaccaacaucaugaucaccaccaucaucaucgugaucaucgucauccugcugucccucaucgccguggggcugcugcucuacugcaaggcgcgcugaggacuaguaauaaggaaacuguaugaaugucugugggcaggaagugaagagauccuucuguaaagguuuuuggaauuaugucugcugaauaauaaacuuuuuugaaauaauaaaucugguagaaaaaugagaucuaaaaaaaaaaaaaaaaaaaaaaaaaaaaaaaaaaaaaaaaaaaaaaaaaaaaaaaaaaaaaaaaugcaucccccccccccccccccccccccccccccccaaaggcucuuuucagagccaccagaauu

SEQ ID NO: 784 - RNA, 2021 nt, Artificial Sequence
  mRNA product Design g-2 comprising derived and/or modified sequence from HRSV(A2)__F-del (opt2)
gggagaguccgcucagccagguugcagaagcggcuuagcguguguccuaaucuucucucugcguguagguaggccugugccgcaaacaagcuuaccauggagcuccucauccucaaggccaacgccaucaccaccauccucaccgccgucaccuucugcuucgccuccggccagaacaucaccgaggaguucuaccaguccaccugcuccgccgucuccaagggcuaccucuccgcccuccgcaccggcugguacaccuccgucaucaccaucgagcucuccaacaucaaggagaacaagugcaacggcaccgacgccaaggucaagcucaucaagcaggagcucgacaaguacaagaacgccgucaccgagcuccagcuccucaugcaguccacccccgccaccaacaaccgcgcccgccgcgagcucccccgcuucaugaacuacacccucaacaacgccaagaagaccaacgucacccucuccaagaagcgcaagcgccgcuuccucggcuuccuccucggcgucggcuccgccaucgccuccggcgucgccgucuccaagguccuccaccucgagggcgaggucaacaagaucaaguccgcccuccucuccaccaacaaggccgucgucucccucuccaacggcgucuccguccucaccuccaagguccucgaccucaagaacuacaucgacaagcagcuccuccccaucgucaacaagcaguccugcuccaucuccaacaucgagaccgucaucgaguuccagcagaagaacaaccgccuccucgagaucacccgcgaguucuccgucaacgccggcgucaccacccccgucuccaccuacaugcucaccaacuccgagcuccucucccucaucaacgacaugcccaucaccaacgaccagaagaagcucauguccaacaacguccagaucguccgccagcaguccuacuccaucauguccaucaucaaggaggagguccucgccuacgucguccagcucccccucuacggcgucaucgacacccccugcuggaagcuccacaccuccccccucugcaccaccaacaccaaggagggcuccaacaucugccucacccgcaccgaccgcggcugguacugcgacaacgccggcuccgucuccuucuucccccaggccgagaccugcaagguccaguccaaccgcgucuucugcgacaccaugaacucccucacccuccccuccgaggucaaccucugcaacgucgacaucuucaaccccaaguacgacugcaagaucaugaccuccaagaccgacgucuccuccuccgucaucaccucccucggcgccaucgucuccugcuacggcaagaccaagugcaccgccuccaacaagaaccgcggcaucaucaagaccuucuccaacggcugcgacuacgucuccaacaagggcgucgacaccgucuccgucggcaacacccucuacuacgucaacaagcaggagggcaagucccucuacgucaagggcgagcccaucaucaacuucuacgacccccucgucuuccccuccgacgaguucgacgccuccaucucccaggucaacgagaagaucaaccagucccucgccuucauccgcaaguccgacgagcuccuccacaacgucaacgccggcaaguccaccaccaacaucaugaucaccaccaucaucaucgucaucaucgucauccuccucucccucaucgccgucggccuccuccucuacugcaaggcccgcugaggacuaguaauaaggaaacuguaugaaugucugugggcaggaagugaagagauccuucuguaaagguuuuuggaauuaugucugcugaauaauaaacuuuuuugaaauaauaaaucugguagaaaaaugagaucuaaaaaaaaaaaaaaaaaaaaaaaaaaaaaaaaaaaaaaaaaaaaaaaaaaaaaaaaaaaaaaaaugcaucccccccccccccccccccccccccccccccaaaggcucuuuucagagccaccagaauu

SEQ ID NO: 785 - RNA, 2021 nt, Artificial Sequence
  mRNA product Design g-2 comprising derived and/or modified sequence from HRSV(A2)__F-del (opt3)
gggagaguccgcucagccagguugcagaagcggcuuagcguguguccuaaucuucucucugcguguagguaggccugugccgcaaacaagcuuaccauggagcugcucauccuuaaggccaacgcuauuaccacaauacugacugcagugacguucugcuuugccagcggccagaauaucaccgaagaguucuaccaauccacauguucugcggucucaaaaggguauuugagugcuuuaagaacuggaugguacaccagcguuauuacaaucgaacuguccaacauuaaggagaauaaaugcaacgguaccgacgccaaggugaaacuaaucaagcaggaacucgauaaguauaaaaaugcaguaacugagcugcagcuucugaugcagucuacacccgccaccaacaauagggcucggcgcgaguugccucgauuuaugaacuacacgcucaauaacgcaaagaaaacuaaugugacccugucgaagaaacguaagagaagguuccugggcuuucucuuaggggucggaucagccauagcuagcggcguggccguuaguaaggugcugcaccuugaaggugaggucaacaaaaucaaguccgcguugcugucuacaaauaaagcagugguaagccuauccaacgggguuucagugcucacuucuaagguccuggaccuuaaaaauuauauugauaagcaacuguugccaaucgugaacaaacagagcuguucuauuuccaacaucgaaaccgugauagaguuccagcagaagaauaaccggcuccuggagauuacacgcgaauuuucagucaaugccggaguuaccacgccggugagcacuuacauguuaacaaacagugagcugcucucucuuaucaaugacaugcccauuaccaacgaucaaaagaaacugauguccaauaacguacagaucgugagacagcagagcuauucgaucaugucuauuauaaaggaagaggucuuggcuuacgugguucaacuaccucuguacggcgugaucgacacuccaugcuggaaacuccauacauccccacuguguaccacgaauaccaaggaaggcucaaacauuugccuuacaaggacugaucgggggugguauugugacaaugccggaagugucagcuucuuuccucaggcagagaccugcaaagugcaguccaaccgcguauucugugauacaaugaauagucugacuuugccaagcgagguuaaccucugcaauguggacaucuuuaaccccaaguacgauuguaagauaaugaccucaaaaacagacgucaguuccagcgugauuaccucucugggugcuaucgucucaugcuauggcaagacuaaaugcacggccaguaacaagaaucgagggaucauuaaaacauucagcaacggaugugauuacguguccaauaagggcguugacaccgugucuguagguaacacuuuauauuacgucaauaagcaagaagggaaaucgcuguaugugaagggagagccuaucauuaacuuuuacgacccccuaguuuucccgagcgaugaauuugacgcguccauaucacaggugaaugagaaaaucaaccagagucucgccuucauuagaaagucugaugaacugcuucacaaugucaacgcaggcaaaagcaccacaaauaucaugaucaccacuauuauaaucgugauuaucguaauuuugcugucccucaucgcugugggccugcuucuguacugcaaggccaggugaggacuaguaauaaggaaacuguaugaaugucugugggcaggaagugaagagauccuucuguaaagguuuuuggaauuaugucugcugaauaauaaacuuuuuugaaauaauaaaucugguagaaaaaugagaucuaaaaaaaaaaaaaaaaaaaaaaaaaaaaaaaaaaaaaaaaaaaaaaaaaaaaaaaaaaaaaaaaugcaucccccccccccccccccccccccccccccccaaaggcucuuuucagagccaccagaauu

SEQ ID NO: 786 - RNA, 2021 nt, Artificial Sequence
  mRNA product Design g-2 comprising derived and/or modified sequence from HRSV(A2)__F-del (opt4)
gggagaguccgcucagccagguugcagaagcggcuuagcguguguccuaaucuucucucugcguguagguaggccugugccgcaaacaagcuuaccauggagcugcugauccugaaggccaacgccaucaccaccauccugaccgccgugaccuucugcuucgccagcggccagaacaucaccgaggaguucuaccagagcaccugcagcgccgugagcaagggcuaccugagcgcccugagaaccggcugguacaccagcgugaucaccaucgagcugagcaacaucaaggagaacaagugcaacggcaccgacgccaaggugaagcugaucaagcaggagcuggacaaguacaagaacgccgugaccgagcugcagcugcugaugcagagcacccccgccaccaacaacagagccagaagagagcugcccagauucaugaacuacacccugaacaacgccaagaagaccaacgugacccugagcaagaagagaaagagaagauuccugggcuuccugcugggcgugggcagcgccaucgccagcggcguggccgugagcaaggugcugcaccuggagggcgaggugaacaagaucaagagcgcccugcugagcaccaacaaggccguggugagccugagcaacggcgugagcgugcugaccagcaaggugcuggaccugaagaacuacaucgacaagcagcugcugcccaucgugaacaagcagagcugcagcaucagcaacaucgagaccgugaucgaguuccagcagaagaacaacagacugcuggagaucaccagagaguucagcgugaacgccggcgugaccacccccgugagcaccuacaugcugaccaacagcgagcugcugagccugaucaacgacaugcccaucaccaacgaccagaagaagcugaugagcaacaacgugcagaucgugagacagcagagcuacagcaucaugagcaucaucaaggaggaggugcuggccuacguggugcagcugccccuguacggcgugaucgacacccccugcuggaagcugcacaccagcccccugugcaccaccaacaccaaggagggcagcaacaucugccugaccagaaccgacagaggcugguacugcgacaacgccggcagcgugagcuucuucccccaggccgagaccugcaaggugcagagcaacagaguguucugcgacaccaugaacagccugacccugcccagcgaggugaaccugugcaacguggacaucuucaaccccaaguacgacugcaagaucaugaccagcaagaccgacgugagcagcagcgugaucaccagccugggcgccaucgugagcugcuacggcaagaccaagugcaccgccagcaacaagaacagaggcaucaucaagaccuucagcaacggcugcgacuacgugagcaacaagggcguggacaccgugagcgugggcaacacccuguacuacgugaacaagcaggagggcaagagccuguacgugaagggcgagcccaucaucaacuucuacgacccccugguguuccccagcgacgaguucgacgccagcaucagccaggugaacgagaagaucaaccagagccuggccuucaucagaaagagcgacgagcugcugcacaacgugaacgccggcaagagcaccaccaacaucaugaucaccaccaucaucaucgugaucaucgugauccugcugagccugaucgccgugggccugcugcuguacugcaaggccagaugaggacuaguaauaaggaaacuguaugaaugucugugggcaggaagugaagagauccuucuguaaagguuuuuggaauuaugucugcugaauaauaaacuuuuuugaaauaauaaaucugguagaaaaaugagaucuaaaaaaaaaaaaaaaaaaaaaaaaaaaaaaaaaaaaaaaaaaaaaaaaaaaaaaaaaaaaaaaaugcaucccccccccccccccccccccccccccccccaaaggcucuuuucagagccaccagaauu

SEQ ID NO: 787 - RNA, 2021 nt, Artificial Sequence
  mRNA product Design g-2 comprising derived and/or modified sequence from HRSV(A2)__F-del (opt5)
gggagaguccgcucagccagguugcagaagcggcuuagcguguguccuaaucuucucucugcguguagguaggccugugccgcaaacaagcuuaccauggagcugcucauccugaaggccaacgcuauuaccacaauccuuacggccgugaccuucugcuuugcgagcggccagaauauuacagaagaguucuaccaauccaccuguucugcugucagcaaaggguaucuguccgcccucagaacaggaugguacaccucuguuaucacaauugaacugagcaacaucaaggagaauaaaugcaacggcaccgacgccaaggugaaacuuaucaagcaggaacuggauaaguauaaaaaugcugugacggagcuccagcugcugaugcaguccacccccgccacaaacaaucgggcucgcagagagcucccucgguuuaugaacuacacccugaauaacgccaagaaaacaaaugucacccuuucuaagaaacgcaagagacgguuccugggguuucuccugggagugggcagcgcgauugccuccgggguugcugugagcaagguccuucaccuggaaggagaggugaacaaaaucaagucugcccuccuguccacgaauaaagcuguugugagccugucuaacggcgucuccgugcucacaagcaaggugcuggaccuuaaaaauuauauugauaagcaacugcucccgaucgucaacaaacagucuuguuccauuagcaacaucgaaaccguuauugaguuccagcagaagaauaaccgccugcuugagaucacaagagaauuuuccgugaaugccggcgugaccacccccgucucuacauacaugcugacgaacagcgagcuccugucccugaucaaugacaugccuauuaccaacgaucaaaagaaacucaugagcaauaacgugcagaucguucggcagcagucuuauuccauuaugagcaucauuaaggaagaggugcuggcguacgucgugcaacuuccccuguacgggguuaucgacacaccuugcuggaaacuccauaccucuccccuguguacaaccaauacgaaggaaggaagcaacaucugccuuacacgcaccgauagaggcugguauugugacaaugccggguccgugucuuucuuuccucaggcugagaccugcaaaguccagagcaaccggguguucugugauacaaugaacucccugacccucccgagcgaggucaaucugugcaauguggacauuuuuaaccccaaguacgauuguaagaucaugacaucuaaaacggacguuuccagcucugugauuaccucccugggagccaucgucagcugcuauggcaagacaaaaugcaccgcuuccaacaagaaucgcgggauuaucaaaacauucucuaacggaugugauuacgugagcaauaagggcguugacaccguguccgucggcaacacgcucuauuacgugaauaagcaagaagggaaaucucuguaugugaagggagagccuaucauuaacuuuuacgacccccuuguuuucccuagcgaugaauuugacgccuccaucagccaggucaaugagaaaauuaaccagucucuggccuucaucagaaaguccgaugaacuccugcacaaugugaacgcuggcaaaagcaccacaaauauuaugaucaccacaauuaucaucgugauuaucgucauucugcuuucucucaucgcgguggggcugcugcucuacugcaaggcccggugaggacuaguaauaaggaaacuguaugaaugucugugggcaggaagugaagagauccuucuguaaagguuuuuggaauuaugucugcugaauaauaaacuuuuuugaaauaauaaaucugguagaaaaaugagaucuaaaaaaaaaaaaaaaaaaaaaaaaaaaaaaaaaaaaaaaaaaaaaaaaaaaaaaaaaaaaaaaaugcaucccccccccccccccccccccccccccccccaaaggcucuuuucagagccaccagaauu

SEQ ID NO: 788 - RNA, 2021 nt, Artificial Sequence
  mRNA product Design g-2 comprising derived and/or modified sequence from HRSV(A2)__F-del (opt6)
gggagaguccgcucagccagguugcagaagcggcuuagcguguguccuaaucuucucucugcguguagguaggccugugccgcaaacaagcuuaccauggaauuacuaauacucaaagccaacgcaauaacaacaauacuaacagcaguaacauucugcuucgcaucaggacaaaacaucacagaagaauuuuaccaaaguacaugcagugcagucucuaaaggauaccucagugccuuacgcacaggaugguacacaucaguaauaacaaucgaacuuucaaacauaaaagaaaacaaaugcaauggaaccgacgccaaaguaaaacuaaucaaacaagaacuagacaaauauaaaaaugcaguaacagaauuacaacuccuaaugcaauccacaccagcaacaaauaacagagcaagacgagaacucccucgauucaugaauuacacauuaaacaacgcaaaaaaaacuaacguaacuuuaucaaaaaaaagaaaacguagauuucuaggauuccuacuaggcguaggguccgccauugcaucaggaguagcaguuagcaaaguauuacauuuagaaggagaaguaaauaaaaucaaaagcgcacuacucucaaccaacaaagcaguaguaucacucucaaacggaguaucaguacuaacauccaaaguacucgaccucaaaaacuacauagacaaacaauuacuacccauaguaaacaaacaaucaugcucuauaucaaauaucgaaacaguaaucgaauuucaacaaaaaaacaaucgacuacuugaaauaacaagagaguucuccgucaaugccggagucaccacaccagucucaacauacaugcuaaccaacucugaacuccuaucacuaauaaaugacaugccaauaacaaacgaccaaaaaaaacuaaugucaaauaacguacaaauaguacgacaacaaaguuauuccauaaugaguauaaucaaagaagaaguguuagcauacguaguccaacuaccauuauauggaguaauagacacaccauguuggaaauuacacaccucaccacucugcacuaccaauacaaaagaaggcucaaauauaugccuaacucgcacagacagaggcugguacugcgauaacgcaggauccguaucuuucuuuccccaagcagaaacuugcaaaguacaaucaaacagagucuucugcgacaccaugaauagucucacauuaccaucugaaguaaaccuauguaacguagauauauucaauccaaaauacgacugcaaaauaaugacaucaaaaaccgacgucucuagcaguguaaucacaucacuaggagcaauaguaagcugcuauggaaaaacaaaauguacagcaucaaacaaaaacaggggaauaauaaaaaccuucucaaacggaugugacuacguaucaaauaaaggcguagacacaguaagcguaggaaacacccuauacuacguuaacaaacaagaagggaaaucauuauacguaaaaggagaaccaauaauaaacuucuacgauccacucguauucccauccgacgaauuugacgccagcauaucccaaguuaacgaaaaaauaaaccaaucacuugcauuuauacgaaaaucugaugaacuucuccacaacguaaaugcaggaaaauccaccaccaauauaaugaucacaacuaucaucauaguaauaaucgucauuuuacuaucauuaauagcaguuggccuacuucuauacugcaaagcaagauaaggacuaguaauaaggaaacuguaugaaugucugugggcaggaagugaagagauccuucuguaaagguuuuuggaauuaugucugcugaauaauaaacuuuuuugaaauaauaaaucugguagaaaaaugagaucuaaaaaaaaaaaaaaaaaaaaaaaaaaaaaaaaaaaaaaaaaaaaaaaaaaaaaaaaaaaaaaaaugcaucccccccccccccccccccccccccccccccaaaggcucuuuucagagccaccagaauu

SEQ ID NO: 789 - RNA, 2021 nt, Artificial Sequence
  mRNA product Design g-2 comprising derived and/or modified sequence from HRSV(A2)__F-del (opt11)
gggagaguccgcucagccagguugcagaagcggcuuagcguguguccuaaucuucucucugcguguagguaggccugugccgcaaacaagcuuaccauggaacuacuaauccuaaaagccaacgcgaucaccaccauccuaacggcagucaccuucugcuucgcaucaggccaaaacaucacagaagaguucuaccaaagcacaugcuccgccguauccaaaggcuaccucagcgcccuacgcacaggcugguacacaucugucaucaccauagaacucuccaacaucaaagaaaacaaaugcaacggcacugacgccaaaguaaagcugaucaaacaagaacucgacaaauacaaaaacgcagucaccgaacuccaacuacucaugcaauccaccccugcaaccaacaacagggcccgccgcgaacucccccgcuucaugaacuacacuuuaaacaacgccaaaaagaccaacgucacacucagcaagaaacggaaacgacgauuccuaggguuucuccuaggcgucggcucggcaaucgccuccggcgucgccguaagcaaaguacuacaccuagaaggcgaagugaacaaaaucaaaagugcccuucucuccaccaacaaggccguagucucucuauccaacggagucucaguccucaccucaaagguccucgaccucaaaaacuacaucgacaaacaacuacuccccauugucaacaagcagucaugcuccauaucaaacaucgaaaccgucaucgaguuccaacagaaaaacaaccgacuccucgaaauaaccagagaguucucggucaacgccggcgucaccaccccagucagcaccuacaugcucacuaacuccgaacuccuaucccucaucaacgacaugccaauuaccaacgaccaaaagaaacuaaugucgaacaacguucaaaucguccgacaacaaaguuacuccaucaugagcauaaucaaagaagaaguucuagcguacgucguccaacucccacuauacggcgucaucgacacuccgugcuggaaacuccacacaucaccccuauguacaaccaacacaaaagaaggcagcaacaucugccucacccgcaccgaccgagggugguauugcgauaacgcuggcagcgucuccuucuucccccaagccgaaaccugcaaaguccaaucaaacagaguauucugcgacaccaugaacucccuuacucucccuagcgaagucaaccucugcaacguugacauauucaaccccaaauacgacugcaaaaucaugaccuccaagaccgacgucuccuccuccgucaucacaucucuaggugccauugucuccugcuacggaaaaaccaaaugcacagccuccaacaaaaaccgcggcaucauaaaaaccuucuccaacggcugcgacuacgucaguaauaaaggcgucgacacgguauccguugggaauacgcuuuacuacguaaauaaacaagaaggcaaaucccucuacgucaaaggugaacccaucauaaacuucuacgacccgcuuguguucccauccgacgaguucgacgccagcaucagccaggucaacgaaaagaucaaccaaucccuagccuucauccgcaaaagcgacgaacuacuacacaacgucaacgccggaaaauccacaaccaacaucaugaucaccaccaucaucaucgucaucaucguaauccuacucucucucaucgccgucggccuccuacuguacuguaaagcccgauagggacuaguaauaaggaaacuguaugaaugucugugggcaggaagugaagagauccuucuguaaagguuuuuggaauuaugucugcugaauaauaaacuuuuuugaaauaauaaaucugguagaaaaaugagaucuaaaaaaaaaaaaaaaaaaaaaaaaaaaaaaaaaaaaaaaaaaaaaaaaaaaaaaaaaaaaaaaaugcaucccccccccccccccccccccccccccccccaaaggcucuuuucagagccaccagaauu

SEQ ID NO: 790 - RNA, 2253 nt, Artificial Sequence
  mRNA product Design g-3 comprising derived and/or modified sequence from HRSV(A2)__F-del (artificial)
gggagaguccgcucagccagguugcagaagcggcuuagcguguguccuaaucuucucucugcguguagguaggccugugccgcaaacaagcuuaccauggaguugcuaauccucaaagcaaaugcaauuaccacaauccucacugcagucacauuuuguuuugcuucuggucaaaacaucacugaagaauuuuaucaaucaacaugcagugcaguuagcaaaggcuaucuuagugcucugagaacugguugguauaccaguguuauaacuauagaauuaaguaauaucaaggaaaauaaguguaauggaacagaugcuaagguaaaauugauaaaacaagaauuagauaaauauaaaaaugcuguaacagaauugcaguugcucaugcaaagcacaccagcaacaaacaaucgagccagaagagaacuaccaagguuuaugaauuauacacucaacaaugccaaaaaaaccaauguaacauuaagcaagaaaaggaaaagaagauuucuugguuuuuuguuagguguuggaucugcaaucgccaguggcguugcuguaucuaagguccugcaccuagaaggggaagugaacaagaucaaaagugcucuacuauccacaaacaaggcuguagucagcuuaucaaauggaguuagugucuuaaccagcaaaguguuagaccucaaaaacuauauagauaaacaauuguuaccuauugugaacaagcaaagcugcagcauaucaaauauagaaacugugauagaguuccaacaaaagaacaacagacuacuagagauuaccagggaauuuaguguuaaugcagguguaacuacaccuguaagcacuuacauguuaacuaauagugaauuauugucauuaaucaaugauaugccuauaacaaaugaucagaaaaaguuaauguccaacaauguucaaauaguuagacagcaaaguuacucuaucauguccauaauaaaagaggaagucuuagcauauguaguacaauuaccacuauaugguguuauagauacacccuguuggaaacuacacacauccccucuauguacaaccaacacaaaagaaggguccaacaucuguuuaacaagaacugacagaggaugguacugugacaaugcaggaucaguaucuuucuucccacaagcugaaacauguaaaguucaaucaaaucgaguauuuugugacacaaugaacaguuuaacauuaccaagugaaguaaaucucugcaauguugacauauucaaccccaaauaugauuguaaaauuaugacuucaaaaacagauguaagcagcuccguuaucacaucucuaggagccauugugucaugcuauggcaaaacuaaauguacagcauccaauaaaaaucguggaaucauaaagacauuuucuaacgggugcgauuauguaucaaauaaagggguggacacugugucuguagguaacacauuauauuauguaaauaagcaagaagguaaaagucucuauguaaaaggugaaccaauaauaaauuucuaugacccauuaguauuccccucugaugaauuugaugcaucaauaucucaagucaacgagaagauuaaccagagccuagcauuuauucguaaauccgaugaauuauuacauaauguaaaugcugguaaauccaccacaaauaucaugauaacuacuauaauuauagugauuauaguaauauuguuaucauuaauugcuguuggacugcucuuauacuguaaggccagauaaggacuagugaagggaacacccaaauuuaauucagccuuaagcacaauuaauuaagagugaaacguaauuguacaagcaguuggucacccaccauagggcaugaucaacaccgcaaccuuuccuuuuucccccagugauucugaaaaaccccucuucccuucagcuugcuuagauguuccaaauuuaguaagcuuaaggcggccuacagaagaaaaagaaaaaaaaggccacaaaaguucccucucacuuucaguaaauaaaauaaaagcagcaacagaaauaaagaaauaaaugaaauucaaaaugaaauaaauauuguguugugcagcauuaaaaaaucaauaaaaauuaaaaaugagcaagaucuaaaaaaaaaaaaaaaaaaaaaaaaaaaaaaaaaaaaaaaaaaaaaaaaaaaaaaaaaaaaaaaaugcaucccccccccccccccccccccccccccccccaaaggcucuuuucagagccaccagaauu

SEQ ID NO: 791 - RNA, 2253 nt, Artificial Sequence
  mRNA product Design g-3 comprising derived and/or modified sequence from HRSV(A2)__F-del (opt1)
gggagaguccgcucagccagguugcagaagcggcuuagcguguguccuaaucuucucucugcguguagguaggccugugccgcaaacaagcuuaccauggagcugcucauccugaaggccaacgccaucaccaccauccugacggcggugaccuucugcuucgccagcggccagaacaucaccgaggaguucuaccaguccaccugcagcgccgucuccaagggguaccucagcgcccugcggacgggcugguacaccuccgugaucaccaucgagcugagcaacaucaaggagaacaagugcaacgggaccgacgccaaggugaagcucaucaagcaggagcuggacaaguacaagaacgcggucacggagcugcagcuccugaugcaguccaccccggcaaccaacaaccgcgcccggcgcgagcugccccgguucaugaacuacacccucaacaacgccaagaagacgaacgugacccugagcaagaagcgcaagcggcgcuuccugggcuuccuccugggggugggcuccgccaucgcgagcggcgucgccguguccaaggugcugcaccucgagggggaggucaacaagaucaagagcgcccugcuguccaccaacaaggccguggugagccucuccaacggcgucagcgugcugaccuccaaggugcuggaccucaagaacuacaucgacaagcagcugcugcccaucgucaacaagcagagcugcuccaucagcaacaucgagacggugaucgaguuccagcagaagaacaaccggcuccuggagaucacccgcgaguucagcgugaacgccggggucaccacccccguguccacguacaugcugaccaacagcgagcuccugucccugaucaacgacaugccgaucaccaacgaccagaagaagcucaugagcaacaacgugcagaucguccggcagcaguccuacagcaucauguccaucaucaaggaggaggugcuggcguacgugguccagcugccccucuacggcgugaucgacacccccugcuggaagcugcacacgagcccccugugcaccaccaacaccaaggagggguccaacaucugccucacgcgcaccgaccggggcugguacugcgacaacgccggcagcgucuccuucuucccgcaggccgagaccugcaaggugcagagcaaccgcguguucugcgacaccaugaacucccugacgcugcccagcgagguaaaccucugcaacgucgacaucuucaaccccaaguacgacugcaagaucaugaccuccaagaccgacgugagcuccagcgugaucaccucccugggggccaucgucagcugcuacggcaagacgaagugcaccgccagcaacaagaaccgggggaucaucaagaccuucuccaacggcugcgacuacgugagcaacaagggcguggacaccguguccgucgggaacacccuguacuacgugaacaagcaggagggcaagagccucuacgugaagggggagcccaucaucaacuucuacgacccgcuggucuuccccuccgacgaguucgacgcgagcaucucccaggugaacgagaagaucaaccagagccuggccuucauccgcaaguccgacgagcugcuccacaacgugaacgccggcaagagcacgaccaacaucaugaucaccaccaucaucaucgucaucaucgugauccugcugucccucaucgccguggggcugcugcucuacugcaaggcccggugaggacuagugaagggaacacccaaauuuaauucagccuuaagcacaauuaauuaagagugaaacguaauuguacaagcaguuggucacccaccauagggcaugaucaacaccgcaaccuuuccuuuuucccccagugauucugaaaaaccccucuucccuucagcuugcuuagauguuccaaauuuaguaagcuuaaggcggccuacagaagaaaaagaaaaaaaaggccacaaaaguucccucucacuuucaguaaauaaaauaaaagcagcaacagaaauaaagaaauaaaugaaauucaaaaugaaauaaauauuguguugugcagcauuaaaaaaucaauaaaaauuaaaaaugagcaagaucuaaaaaaaaaaaaaaaaaaaaaaaaaaaaaaaaaaaaaaaaaaaaaaaaaaaaaaaaaaaaaaaaugcaucccccccccccccccccccccccccccccccaaaggcucuuuucagagccaccagaauu

SEQ ID NO: 792 - RNA, 2253 nt, Artificial Sequence
  mRNA product Design g-3 comprising derived and/or modified sequence from HRSV(A2)__F-del (opt1)
gggagaguccgcucagccagguugcagaagcggcuuagcguguguccuaaucuucucucugcguguagguaggccugugccgcaaacaagcuuaccauggagcugcucauccugaaggccaacgccaucaccaccauccugacggcggugaccuucugcuucgccagcggccagaacaucaccgaggaguucuaccaguccacgugcagcgccgucuccaagggguaccucagcgcccugcgcaccggcugguacaccuccgugaucaccaucgagcugagcaacaucaaggagaacaagugcaacgggaccgacgccaaggugaagcucaucaagcaggagcuggacaaguacaagaacgcggucacggagcugcagcuccugaugcaguccacccccgccaccaacaaccgggcccgccgggagcugccgcgcuucaugaacuacacccucaacaacgccaagaagacgaacgugacccugagcaagaagcggaagcgccgguuccugggcuuccuccugggggugggcuccgcgaucgccagcggcgucgccguguccaaggugcugcaccucgagggggaggucaacaagaucaagagcgcccugcuguccaccaacaaggccguggugagccucuccaacggcgucagcgugcugaccuccaaggugcuggaccucaagaacuacaucgacaagcagcugcugcccaucgucaacaagcagagcugcuccaucagcaacaucgagacggugaucgaguuccagcagaagaacaaccgccuccuggagaucacccgggaguucagcgugaacgcgggggucaccacccccguguccacguacaugcugaccaacagcgagcuccugucccugaucaacgacaugcccaucaccaacgaccagaagaagcucaugagcaacaacgugcagaucguccgccagcaguccuacagcaucauguccaucaucaaggaggaggugcuggccuacgugguccagcugccgcucuacggcgugaucgacacccccugcuggaagcugcacacgagcccccugugcaccaccaacaccaaggagggguccaacaucugccucacgcggaccgaccgcggcugguacugcgacaacgccggcagcgucuccuucuucccccaggccgagaccugcaaggugcagagcaaccggguguucugcgacaccaugaacucccugacgcugccgagcgaggucaaccucugcaacguggacaucuucaaccccaaguacgacugcaagaucaugaccuccaagaccgacgugagcuccagcgucaucaccucccugggggccaucgugagcugcuacggcaagacgaagugcaccgcgagcaacaagaaccgcgggaucaucaagaccuucuccaacggcugcgacuacgugagcaacaagggcgucgacaccguguccguggggaacacccuguacuacgucaacaagcaggagggcaagagccucuacgugaagggggagcccaucaucaacuucuacgacccccugguguucccguccgacgaguucgacgccagcaucucccaggucaacgagaagaucaaccagagccuggccuucauccggaaguccgacgagcuccugcacaacgugaacgccggcaagagcacgaccaacaucaugaucaccaccaucaucaucgugaucaucgucauccugcugucccucaucgccguggggcugcugcucuacugcaaggcgcgcugaggacuagugaagggaacacccaaauuuaauucagccuuaagcacaauuaauuaagagugaaacguaauuguacaagcaguuggucacccaccauagggcaugaucaacaccgcaaccuuuccuuuuucccccagugauucugaaaaaccccucuucccuucagcuugcuuagauguuccaaauuuaguaagcuuaaggcggccuacagaagaaaaagaaaaaaaaggccacaaaaguucccucucacuuucaguaaauaaaauaaaagcagcaacagaaauaaagaaauaaaugaaauucaaaaugaaauaaauauuguguugugcagcauuaaaaaaucaauaaaaauuaaaaaugagcaagaucuaaaaaaaaaaaaaaaaaaaaaaaaaaaaaaaaaaaaaaaaaaaaaaaaaaaaaaaaaaaaaaaaugcaucccccccccccccccccccccccccccccccaaaggcucuuuucagagccaccagaauu

SEQ ID NO: 793 - RNA, 2253 nt, Artificial Sequence
  mRNA product Design g-3 comprising derived and/or modified sequence from HRSV(A2)__F-del (opt2)
gggagaguccgcucagccagguugcagaagcggcuuagcguguguccuaaucuucucucugcguguagguaggccugugccgcaaacaagcuuaccauggagcuccucauccucaaggccaacgccaucaccaccauccucaccgccgucaccuucugcuucgccuccggccagaacaucaccgaggaguucuaccaguccaccugcuccgccgucuccaagggcuaccucuccgcccuccgcaccggcugguacaccuccgucaucaccaucgagcucuccaacaucaaggagaacaagugcaacggcaccgacgccaaggucaagcucaucaagcaggagcucgacaaguacaagaacgccgucaccgagcuccagcuccucaugcaguccacccccgccaccaacaaccgcgcccgccgcgagcucccccgcuucaugaacuacacccucaacaacgccaagaagaccaacgucacccucuccaagaagcgcaagcgccgcuuccucggcuuccuccucggcgucggcuccgccaucgccuccggcgucgccgucuccaagguccuccaccucgagggcgaggucaacaagaucaaguccgcccuccucuccaccaacaaggccgucgucucccucuccaacggcgucuccguccucaccuccaagguccucgaccucaagaacuacaucgacaagcagcuccuccccaucgucaacaagcaguccugcuccaucuccaacaucgagaccgucaucgaguuccagcagaagaacaaccgccuccucgagaucacccgcgaguucuccgucaacgccggcgucaccacccccgucuccaccuacaugcucaccaacuccgagcuccucucccucaucaacgacaugcccaucaccaacgaccagaagaagcucauguccaacaacguccagaucguccgccagcaguccuacuccaucauguccaucaucaaggaggagguccucgccuacgucguccagcucccccucuacggcgucaucgacacccccugcuggaagcuccacaccuccccccucugcaccaccaacaccaaggagggcuccaacaucugccucacccgcaccgaccgcggcugguacugcgacaacgccggcuccgucuccuucuucccccaggccgagaccugcaagguccaguccaaccgcgucuucugcgacaccaugaacucccucacccuccccuccgaggucaaccucugcaacgucgacaucuucaaccccaaguacgacugcaagaucaugaccuccaagaccgacgucuccuccuccgucaucaccucccucggcgccaucgucuccugcuacggcaagaccaagugcaccgccuccaacaagaaccgcggcaucaucaagaccuucuccaacggcugcgacuacgucuccaacaagggcgucgacaccgucuccgucggcaacacccucuacuacgucaacaagcaggagggcaagucccucuacgucaagggcgagcccaucaucaacuucuacgacccccucgucuuccccuccgacgaguucgacgccuccaucucccaggucaacgagaagaucaaccagucccucgccuucauccgcaaguccgacgagcuccuccacaacgucaacgccggcaaguccaccaccaacaucaugaucaccaccaucaucaucgucaucaucgucauccuccucucccucaucgccgucggccuccuccucuacugcaaggcccgcugaggacuagugaagggaacacccaaauuuaauucagccuuaagcacaauuaauuaagagugaaacguaauuguacaagcaguuggucacccaccauagggcaugaucaacaccgcaaccuuuccuuuuucccccagugauucugaaaaaccccucuucccuucagcuugcuuagauguuccaaauuuaguaagcuuaaggcggccuacagaagaaaaagaaaaaaaaggccacaaaaguucccucucacuuucaguaaauaaaauaaaagcagcaacagaaauaaagaaauaaaugaaauucaaaaugaaauaaauauuguguugugcagcauuaaaaaaucaauaaaaauuaaaaaugagcaagaucuaaaaaaaaaaaaaaaaaaaaaaaaaaaaaaaaaaaaaaaaaaaaaaaaaaaaaaaaaaaaaaaaugcaucccccccccccccccccccccccccccccccaaaggcucuuuucagagccaccagaauu

SEQ ID NO: 794 - RNA, 2253 nt, Artificial Sequence
  mRNA product Design g-3 comprising derived and/or modified sequence from HRSV(A2)__F-del (opt3)
gggagaguccgcucagccagguugcagaagcggcuuagcguguguccuaaucuucucucugcguguagguaggccugugccgcaaacaagcuuaccauggagcugcucauccuuaaggccaacgcuauuaccacaauacugacugcagugacguucugcuuugccagcggccagaauaucaccgaagaguucuaccaauccacauguucugcggucucaaaaggguauuugagugcuuuaagaacuggaugguacaccagcguuauuacaaucgaacuguccaacauuaaggagaauaaaugcaacgguaccgacgccaaggugaaacuaaucaagcaggaacucgauaaguauaaaaaugcaguaacugagcugcagcuucugaugcagucuacacccgccaccaacaauagggcucggcgcgaguugccucgauuuaugaacuacacgcucaauaacgcaaagaaaacuaaugugacccugucgaagaaacguaagagaagguuccugggcuuucucuuaggggucggaucagccauagcuagcggcguggccguuaguaaggugcugcaccuugaaggugaggucaacaaaaucaaguccgcguugcugucuacaaauaaagcagugguaagccuauccaacgggguuucagugcucacuucuaagguccuggaccuuaaaaauuauauugauaagcaacuguugccaaucgugaacaaacagagcuguucuauuuccaacaucgaaaccgugauagaguuccagcagaagaauaaccggcuccuggagauuacacgcgaauuuucagucaaugccggaguuaccacgccggugagcacuuacauguuaacaaacagugagcugcucucucuuaucaaugacaugcccauuaccaacgaucaaaagaaacugauguccaauaacguacagaucgugagacagcagagcuauucgaucaugucuauuauaaaggaagaggucuuggcuuacgugguucaacuaccucuguacggcgugaucgacacuccaugcuggaaacuccauacauccccacuguguaccacgaauaccaaggaaggcucaaacauuugccuuacaaggacugaucgggggugguauugugacaaugccggaagugucagcuucuuuccucaggcagagaccugcaaagugcaguccaaccgcguauucugugauacaaugaauagucugacuuugccaagcgagguuaaccucugcaauguggacaucuuuaaccccaaguacgauuguaagauaaugaccucaaaaacagacgucaguuccagcgugauuaccucucugggugcuaucgucucaugcuauggcaagacuaaaugcacggccaguaacaagaaucgagggaucauuaaaacauucagcaacggaugugauuacguguccaauaagggcguugacaccgugucuguagguaacacuuuauauuacgucaauaagcaagaagggaaaucgcuguaugugaagggagagccuaucauuaacuuuuacgacccccuaguuuucccgagcgaugaauuugacgcguccauaucacaggugaaugagaaaaucaaccagagucucgccuucauuagaaagucugaugaacugcuucacaaugucaacgcaggcaaaagcaccacaaauaucaugaucaccacuauuauaaucgugauuaucguaauuuugcugucccucaucgcugugggccugcuucuguacugcaaggccaggugaggacuagugaagggaacacccaaauuuaauucagccuuaagcacaauuaauuaagagugaaacguaauuguacaagcaguuggucacccaccauagggcaugaucaacaccgcaaccuuuccuuuuucccccagugauucugaaaaaccccucuucccuucagcuugcuuagauguuccaaauuuaguaagcuuaaggcggccuacagaagaaaaagaaaaaaaaggccacaaaaguucccucucacuuucaguaaauaaaauaaaagcagcaacagaaauaaagaaauaaaugaaauucaaaaugaaauaaauauuguguugugcagcauuaaaaaaucaauaaaaauuaaaaaugagcaagaucuaaaaaaaaaaaaaaaaaaaaaaaaaaaaaaaaaaaaaaaaaaaaaaaaaaaaaaaaaaaaaaaaugcaucccccccccccccccccccccccccccccccaaaggcucuuuucagagccaccagaauu

SEQ ID NO: 795 - RNA, 2253 nt, Artificial Sequence
  mRNA product Design g-3 comprising derived and/or modified sequence from HRSV(A2)__F-del (opt4)
gggagaguccgcucagccagguugcagaagcggcuuagcguguguccuaaucuucucucugcguguagguaggccugugccgcaaacaagcuuaccauggagcugcugauccugaaggccaacgccaucaccaccauccugaccgccgugaccuucugcuucgccagcggccagaacaucaccgaggaguucuaccagagcaccugcagcgccgugagcaagggcuaccugagcgcccugagaaccggcugguacaccagcgugaucaccaucgagcugagcaacaucaaggagaacaagugcaacggcaccgacgccaaggugaagcugaucaagcaggagcuggacaaguacaagaacgccgugaccgagcugcagcugcugaugcagagcacccccgccaccaacaacagagccagaagagagcugcccagauucaugaacuacacccugaacaacgccaagaagaccaacgugacccugagcaagaagagaaagagaagauuccugggcuuccugcugggcgugggcagcgccaucgccagcggcguggccgugagcaaggugcugcaccuggagggcgaggugaacaagaucaagagcgcccugcugagcaccaacaaggccguggugagccugagcaacggcgugagcgugcugaccagcaaggugcuggaccugaagaacuacaucgacaagcagcugcugcccaucgugaacaagcagagcugcagcaucagcaacaucgagaccgugaucgaguuccagcagaagaacaacagacugcuggagaucaccagagaguucagcgugaacgccggcgugaccacccccgugagcaccuacaugcugaccaacagcgagcugcugagccugaucaacgacaugcccaucaccaacgaccagaagaagcugaugagcaacaacgugcagaucgugagacagcagagcuacagcaucaugagcaucaucaaggaggaggugcuggccuacguggugcagcugccccuguacggcgugaucgacacccccugcuggaagcugcacaccagcccccugugcaccaccaacaccaaggagggcagcaacaucugccugaccagaaccgacagaggcugguacugcgacaacgccggcagcgugagcuucuucccccaggccgagaccugcaaggugcagagcaacagaguguucugcgacaccaugaacagccugacccugcccagcgaggugaaccugugcaacguggacaucuucaaccccaaguacgacugcaagaucaugaccagcaagaccgacgugagcagcagcgugaucaccagccugggcgccaucgugagcugcuacggcaagaccaagugcaccgccagcaacaagaacagaggcaucaucaagaccuucagcaacggcugcgacuacgugagcaacaagggcguggacaccgugagcgugggcaacacccuguacuacgugaacaagcaggagggcaagagccuguacgugaagggcgagcccaucaucaacuucuacgacccccugguguuccccagcgacgaguucgacgccagcaucagccaggugaacgagaagaucaaccagagccuggccuucaucagaaagagcgacgagcugcugcacaacgugaacgccggcaagagcaccaccaacaucaugaucaccaccaucaucaucgugaucaucgugauccugcugagccugaucgccgugggccugcugcuguacugcaaggccagaugaggacuagugaagggaacacccaaauuuaauucagccuuaagcacaauuaauuaagagugaaacguaauuguacaagcaguuggucacccaccauagggcaugaucaacaccgcaaccuuuccuuuuucccccagugauucugaaaaaccccucuucccuucagcuugcuuagauguuccaaauuuaguaagcuuaaggcggccuacagaagaaaaagaaaaaaaaggccacaaaaguucccucucacuuucaguaaauaaaauaaaagcagcaacagaaauaaagaaauaaaugaaauucaaaaugaaauaaauauuguguugugcagcauuaaaaaaucaauaaaaauuaaaaaugagcaagaucuaaaaaaaaaaaaaaaaaaaaaaaaaaaaaaaaaaaaaaaaaaaaaaaaaaaaaaaaaaaaaaaaugcaucccccccccccccccccccccccccccccccaaaggcucuuuucagagccaccagaauu

SEQ ID NO: 796 - RNA, 2253 nt, Artificial Sequence
  mRNA product Design g-3 comprising derived and/or modified sequence from HRSV(A2)__F-del (opt5)
gggagaguccgcucagccagguugcagaagcggcuuagcguguguccuaaucuucucucugcguguagguaggccugugccgcaaacaagcuuaccauggagcugcucauccugaaggccaacgcuauuaccacaauccuuacggccgugaccuucugcuuugcgagcggccagaauauuacagaagaguucuaccaauccaccuguucugcugucagcaaaggguaucuguccgcccucagaacaggaugguacaccucuguuaucacaauugaacugagcaacaucaaggagaauaaaugcaacggcaccgacgccaaggugaaacuuaucaagcaggaacuggauaaguauaaaaaugcugugacggagcuccagcugcugaugcaguccacccccgccacaaacaaucgggcucgcagagagcucccucgguuuaugaacuacacccugaauaacgccaagaaaacaaaugucacccuuucuaagaaacgcaagagacgguuccugggguuucuccugggagugggcagcgcgauugccuccgggguugcugugagcaagguccuucaccuggaaggagaggugaacaaaaucaagucugcccuccuguccacgaauaaagcuguugugagccugucuaacggcgucuccgugcucacaagcaaggugcuggaccuuaaaaauuauauugauaagcaacugcucccgaucgucaacaaacagucuuguuccauuagcaacaucgaaaccguuauugaguuccagcagaagaauaaccgccugcuugagaucacaagagaauuuuccgugaaugccggcgugaccacccccgucucuacauacaugcugacgaacagcgagcuccugucccugaucaaugacaugccuauuaccaacgaucaaaagaaacucaugagcaauaacgugcagaucguucggcagcagucuuauuccauuaugagcaucauuaaggaagaggugcuggcguacgucgugcaacuuccccuguacgggguuaucgacacaccuugcuggaaacuccauaccucuccccuguguacaaccaauacgaaggaaggaagcaacaucugccuuacacgcaccgauagaggcugguauugugacaaugccggguccgugucuuucuuuccucaggcugagaccugcaaaguccagagcaaccggguguucugugauacaaugaacucccugacccucccgagcgaggucaaucugugcaauguggacauuuuuaaccccaaguacgauuguaagaucaugacaucuaaaacggacguuuccagcucugugauuaccucccugggagccaucgucagcugcuauggcaagacaaaaugcaccgcuuccaacaagaaucgcgggauuaucaaaacauucucuaacggaugugauuacgugagcaauaagggcguugacaccguguccgucggcaacacgcucuauuacgugaauaagcaagaagggaaaucucuguaugugaagggagagccuaucauuaacuuuuacgacccccuuguuuucccuagcgaugaauuugacgccuccaucagccaggucaaugagaaaauuaaccagucucuggccuucaucagaaaguccgaugaacuccugcacaaugugaacgcuggcaaaagcaccacaaauauuaugaucaccacaauuaucaucgugauuaucgucauucugcuuucucucaucgcgguggggcugcugcucuacugcaaggcccggugaggacuagugaagggaacacccaaauuuaauucagccuuaagcacaauuaauuaagagugaaacguaauuguacaagcaguuggucacccaccauagggcaugaucaacaccgcaaccuuuccuuuuucccccagugauucugaaaaaccccucuucccuucagcuugcuuagauguuccaaauuuaguaagcuuaaggcggccuacagaagaaaaagaaaaaaaaggccacaaaaguucccucucacuuucaguaaauaaaauaaaagcagcaacagaaauaaagaaauaaaugaaauucaaaaugaaauaaauauuguguugugcagcauuaaaaaaucaauaaaaauuaaaaaugagcaagaucuaaaaaaaaaaaaaaaaaaaaaaaaaaaaaaaaaaaaaaaaaaaaaaaaaaaaaaaaaaaaaaaaugcaucccccccccccccccccccccccccccccccaaaggcucuuuucagagccaccagaauu

SEQ ID NO: 797 - RNA, 2253 nt, Artificial Sequence
  mRNA product Design g-3 comprising derived and/or modified sequence from HRSV(A2)__F-del (opt6)
gggagaguccgcucagccagguugcagaagcggcuuagcguguguccuaaucuucucucugcguguagguaggccugugccgcaaacaagcuuaccauggaauuacuaauacucaaagccaacgcaauaacaacaauacuaacagcaguaacauucugcuucgcaucaggacaaaacaucacagaagaauuuuaccaaaguacaugcagugcagucucuaaaggauaccucagugccuuacgcacaggaugguacacaucaguaauaacaaucgaacuuucaaacauaaaagaaaacaaaugcaauggaaccgacgccaaaguaaaacuaaucaaacaagaacuagacaaauauaaaaaugcaguaacagaauuacaacuccuaaugcaauccacaccagcaacaaauaacagagcaagacgagaacucccucgauucaugaauuacacauuaaacaacgcaaaaaaaacuaacguaacuuuaucaaaaaaaagaaaacguagauuucuaggauuccuacuaggcguaggguccgccauugcaucaggaguagcaguuagcaaaguauuacauuuagaaggagaaguaaauaaaaucaaaagcgcacuacucucaaccaacaaagcaguaguaucacucucaaacggaguaucaguacuaacauccaaaguacucgaccucaaaaacuacauagacaaacaauuacuacccauaguaaacaaacaaucaugcucuauaucaaauaucgaaacaguaaucgaauuucaacaaaaaaacaaucgacuacuugaaauaacaagagaguucuccgucaaugccggagucaccacaccagucucaacauacaugcuaaccaacucugaacuccuaucacuaauaaaugacaugccaauaacaaacgaccaaaaaaaacuaaugucaaauaacguacaaauaguacgacaacaaaguuauuccauaaugaguauaaucaaagaagaaguguuagcauacguaguccaacuaccauuauauggaguaauagacacaccauguuggaaauuacacaccucaccacucugcacuaccaauacaaaagaaggcucaaauauaugccuaacucgcacagacagaggcugguacugcgauaacgcaggauccguaucuuucuuuccccaagcagaaacuugcaaaguacaaucaaacagagucuucugcgacaccaugaauagucucacauuaccaucugaaguaaaccuauguaacguagauauauucaauccaaaauacgacugcaaaauaaugacaucaaaaaccgacgucucuagcaguguaaucacaucacuaggagcaauaguaagcugcuauggaaaaacaaaauguacagcaucaaacaaaaacaggggaauaauaaaaaccuucucaaacggaugugacuacguaucaaauaaaggcguagacacaguaagcguaggaaacacccuauacuacguuaacaaacaagaagggaaaucauuauacguaaaaggagaaccaauaauaaacuucuacgauccacucguauucccauccgacgaauuugacgccagcauaucccaaguuaacgaaaaaauaaaccaaucacuugcauuuauacgaaaaucugaugaacuucuccacaacguaaaugcaggaaaauccaccaccaauauaaugaucacaacuaucaucauaguaauaaucgucauuuuacuaucauuaauagcaguuggccuacuucuauacugcaaagcaagauaaggacuagugaagggaacacccaaauuuaauucagccuuaagcacaauuaauuaagagugaaacguaauuguacaagcaguuggucacccaccauagggcaugaucaacaccgcaaccuuuccuuuuucccccagugauucugaaaaaccccucuucccuucagcuugcuuagauguuccaaauuuaguaagcuuaaggcggccuacagaagaaaaagaaaaaaaaggccacaaaaguucccucucacuuucaguaaauaaaauaaaagcagcaacagaaauaaagaaauaaaugaaauucaaaaugaaauaaauauuguguugugcagcauuaaaaaaucaauaaaaauuaaaaaugagcaagaucuaaaaaaaaaaaaaaaaaaaaaaaaaaaaaaaaaaaaaaaaaaaaaaaaaaaaaaaaaaaaaaaaugcaucccccccccccccccccccccccccccccccaaaggcucuuuucagagccaccagaauu

SEQ ID NO: 798 - RNA, 2253 nt, Artificial Sequence
  mRNA product Design g-3 comprising derived and/or modified sequence from HRSV(A2)__F-del (opt11)
gggagaguccgcucagccagguugcagaagcggcuuagcguguguccuaaucuucucucugcguguagguaggccugugccgcaaacaagcuuaccauggaacuacuaauccuaaaagccaacgcgaucaccaccauccuaacggcagucaccuucugcuucgcaucaggccaaaacaucacagaagaguucuaccaaagcacaugcuccgccguauccaaaggcuaccucagcgcccuacgcacaggcugguacacaucugucaucaccauagaacucuccaacaucaaagaaaacaaaugcaacggcacugacgccaaaguaaagcugaucaaacaagaacucgacaaauacaaaaacgcagucaccgaacuccaacuacucaugcaauccaccccugcaaccaacaacagggcccgccgcgaacucccccgcuucaugaacuacacuuuaaacaacgccaaaaagaccaacgucacacucagcaagaaacggaaacgacgauuccuaggguuucuccuaggcgucggcucggcaaucgccuccggcgucgccguaagcaaaguacuacaccuagaaggcgaagugaacaaaaucaaaagugcccuucucuccaccaacaaggccguagucucucuauccaacggagucucaguccucaccucaaagguccucgaccucaaaaacuacaucgacaaacaacuacuccccauugucaacaagcagucaugcuccauaucaaacaucgaaaccgucaucgaguuccaacagaaaaacaaccgacuccucgaaauaaccagagaguucucggucaacgccggcgucaccaccccagucagcaccuacaugcucacuaacuccgaacuccuaucccucaucaacgacaugccaauuaccaacgaccaaaagaaacuaaugucgaacaacguucaaaucguccgacaacaaaguuacuccaucaugagcauaaucaaagaagaaguucuagcguacgucguccaacucccacuauacggcgucaucgacacuccgugcuggaaacuccacacaucaccccuauguacaaccaacacaaaagaaggcagcaacaucugccucacccgcaccgaccgagggugguauugcgauaacgcuggcagcgucuccuucuucccccaagccgaaaccugcaaaguccaaucaaacagaguauucugcgacaccaugaacucccuuacucucccuagcgaagucaaccucugcaacguugacauauucaaccccaaauacgacugcaaaaucaugaccuccaagaccgacgucuccuccuccgucaucacaucucuaggugccauugucuccugcuacggaaaaaccaaaugcacagccuccaacaaaaaccgcggcaucauaaaaaccuucuccaacggcugcgacuacgucaguaauaaaggcgucgacacgguauccguugggaauacgcuuuacuacguaaauaaacaagaaggcaaaucccucuacgucaaaggugaacccaucauaaacuucuacgacccgcuuguguucccauccgacgaguucgacgccagcaucagccaggucaacgaaaagaucaaccaaucccuagccuucauccgcaaaagcgacgaacuacuacacaacgucaacgccggaaaauccacaaccaacaucaugaucaccaccaucaucaucgucaucaucguaauccuacucucucucaucgccgucggccuccuacuguacuguaaagcccgauagggacuagugaagggaacacccaaauuuaauucagccuuaagcacaauuaauuaagagugaaacguaauuguacaagcaguuggucacccaccauagggcaugaucaacaccgcaaccuuuccuuuuucccccagugauucugaaaaaccccucuucccuucagcuugcuuagauguuccaaauuuaguaagcuuaaggcggccuacagaagaaaaagaaaaaaaaggccacaaaaguucccucucacuuucaguaaauaaaauaaaagcagcaacagaaauaaagaaauaaaugaaauucaaaaugaaauaaauauuguguugugcagcauuaaaaaaucaauaaaaauuaaaaaugagcaagaucuaaaaaaaaaaaaaaaaaaaaaaaaaaaaaaaaaaaaaaaaaaaaaaaaaaaaaaaaaaaaaaaaugcaucccccccccccccccccccccccccccccccaaaggcucuuuucagagccaccagaauu

SEQ ID NO: 799 - RNA, 2048 nt, Artificial Sequence
  mRNA product Design g-4 comprising derived and/or modified sequence from HRSV(A2)__F-del (artificial)
gggagacuccugucgggcggaaguaggaggaguagaguuuaaaaacaguacucuuuuuccgguucgggacguaguugaagcaacgacaagccggauaaccgcucuugagacaggaagcuuaccauggaguugcuaauccucaaagcaaaugcaauuaccacaauccucacugcagucacauuuuguuuugcuucuggucaaaacaucacugaagaauuuuaucaaucaacaugcagugcaguuagcaaaggcuaucuuagugcucugagaacugguugguauaccaguguuauaacuauagaauuaaguaauaucaaggaaaauaaguguaauggaacagaugcuaagguaaaauugauaaaacaagaauuagauaaauauaaaaaugcuguaacagaauugcaguugcucaugcaaagcacaccagcaacaaacaaucgagccagaagagaacuaccaagguuuaugaauuauacacucaacaaugccaaaaaaaccaauguaacauuaagcaagaaaaggaaaagaagauuucuugguuuuuuguuagguguuggaucugcaaucgccaguggcguugcuguaucuaagguccugcaccuagaaggggaagugaacaagaucaaaagugcucuacuauccacaaacaaggcuguagucagcuuaucaaauggaguuagugucuuaaccagcaaaguguuagaccucaaaaacuauauagauaaacaauuguuaccuauugugaacaagcaaagcugcagcauaucaaauauagaaacugugauagaguuccaacaaaagaacaacagacuacuagagauuaccagggaauuuaguguuaaugcagguguaacuacaccuguaagcacuuacauguuaacuaauagugaauuauugucauuaaucaaugauaugccuauaacaaaugaucagaaaaaguuaauguccaacaauguucaaauaguuagacagcaaaguuacucuaucauguccauaauaaaagaggaagucuuagcauauguaguacaauuaccacuauaugguguuauagauacacccuguuggaaacuacacacauccccucuauguacaaccaacacaaaagaaggguccaacaucuguuuaacaagaacugacagaggaugguacugugacaaugcaggaucaguaucuuucuucccacaagcugaaacauguaaaguucaaucaaaucgaguauuuugugacacaaugaacaguuuaacauuaccaagugaaguaaaucucugcaauguugacauauucaaccccaaauaugauuguaaaauuaugacuucaaaaacagauguaagcagcuccguuaucacaucucuaggagccauugugucaugcuauggcaaaacuaaauguacagcauccaauaaaaaucguggaaucauaaagacauuuucuaacgggugcgauuauguaucaaauaaagggguggacacugugucuguagguaacacauuauauuauguaaauaagcaagaagguaaaagucucuauguaaaaggugaaccaauaauaaauuucuaugacccauuaguauuccccucugaugaauuugaugcaucaauaucucaagucaacgagaagauuaaccagagccuagcauuuauucguaaauccgaugaauuauuacauaauguaaaugcugguaaauccaccacaaauaucaugauaacuacuauaauuauagugauuauaguaauauuguuaucauuaauugcuguuggacugcucuuauacuguaaggccagauaaggacuaguaauaaggaaacuguaugaaugucugugggcaggaagugaagagauccuucuguaaagguuuuuggaauuaugucugcugaauaauaaacuuuuuugaaauaauaaaucugguagaaaaaugagaucuaaaaaaaaaaaaaaaaaaaaaaaaaaaaaaaaaaaaaaaaaaaaaaaaaaaaaaaaaaaaaaaaugcaucccccccccccccccccccccccccccccccaaaggcucuuuucagagccaccagaauu

SEQ ID NO: 800 - RNA, 2048 nt, Artificial Sequence
  mRNA product Design g-4 comprising derived and/or modified sequence from HRSV(A2)__F-del (opt1)
gggagacuccugucgggcggaaguaggaggaguagaguuuaaaaacaguacucuuuuuccgguucgggacguaguugaagcaacgacaagccggauaaccgcucuugagacaggaagcuuaccauggagcugcucauccugaaggccaacgccaucaccaccauccugacggcggugaccuucugcuucgccagcggccagaacaucaccgaggaguucuaccaguccaccugcagcgccgucuccaagggguaccucagcgcccugcggacgggcugguacaccuccgugaucaccaucgagcugagcaacaucaaggagaacaagugcaacgggaccgacgccaaggugaagcucaucaagcaggagcuggacaaguacaagaacgcggucacggagcugcagcuccugaugcaguccaccccggcaaccaacaaccgcgcccggcgcgagcugccccgguucaugaacuacacccucaacaacgccaagaagacgaacgugacccugagcaagaagcgcaagcggcgcuuccugggcuuccuccugggggugggcuccgccaucgcgagcggcgucgccguguccaaggugcugcaccucgagggggaggucaacaagaucaagagcgcccugcuguccaccaacaaggccguggugagccucuccaacggcgucagcgugcugaccuccaaggugcuggaccucaagaacuacaucgacaagcagcugcugcccaucgucaacaagcagagcugcuccaucagcaacaucgagacggugaucgaguuccagcagaagaacaaccggcuccuggagaucacccgcgaguucagcgugaacgccggggucaccacccccguguccacguacaugcugaccaacagcgagcuccugucccugaucaacgacaugccgaucaccaacgaccagaagaagcucaugagcaacaacgugcagaucguccggcagcaguccuacagcaucauguccaucaucaaggaggaggugcuggcguacgugguccagcugccccucuacggcgugaucgacacccccugcuggaagcugcacacgagcccccugugcaccaccaacaccaaggagggguccaacaucugccucacgcgcaccgaccggggcugguacugcgacaacgccggcagcgucuccuucuucccgcaggccgagaccugcaaggugcagagcaaccgcguguucugcgacaccaugaacucccugacgcugcccagcgagguaaaccucugcaacgucgacaucuucaaccccaaguacgacugcaagaucaugaccuccaagaccgacgugagcuccagcgugaucaccucccugggggccaucgucagcugcuacggcaagacgaagugcaccgccagcaacaagaaccgggggaucaucaagaccuucuccaacggcugcgacuacgugagcaacaagggcguggacaccguguccgucgggaacacccuguacuacgugaacaagcaggagggcaagagccucuacgugaagggggagcccaucaucaacuucuacgacccgcuggucuuccccuccgacgaguucgacgcgagcaucucccaggugaacgagaagaucaaccagagccuggccuucauccgcaaguccgacgagcugcuccacaacgugaacgccggcaagagcacgaccaacaucaugaucaccaccaucaucaucgucaucaucgugauccugcugucccucaucgccguggggcugcugcucuacugcaaggcccggugaggacuaguaauaaggaaacuguaugaaugucugugggcaggaagugaagagauccuucuguaaagguuuuuggaauuaugucugcugaauaauaaacuuuuuugaaauaauaaaucugguagaaaaaugagaucuaaaaaaaaaaaaaaaaaaaaaaaaaaaaaaaaaaaaaaaaaaaaaaaaaaaaaaaaaaaaaaaaugcaucccccccccccccccccccccccccccccccaaaggcucuuuucagagccaccagaauu

SEQ ID NO: 801 - RNA, 2048 nt, Artificial Sequence
  mRNA product Design g-4 comprising derived and/or modified sequence from HRSV(A2)__F-del (opt1)
gggagacuccugucgggcggaaguaggaggaguagaguuuaaaaacaguacucuuuuuccgguucgggacguaguugaagcaacgacaagccggauaaccgcucuugagacaggaagcuuaccauggagcugcucauccugaaggccaacgccaucaccaccauccugacggcggugaccuucugcuucgccagcggccagaacaucaccgaggaguucuaccaguccacgugcagcgccgucuccaagggguaccucagcgcccugcgcaccggcugguacaccuccgugaucaccaucgagcugagcaacaucaaggagaacaagugcaacgggaccgacgccaaggugaagcucaucaagcaggagcuggacaaguacaagaacgcggucacggagcugcagcuccugaugcaguccacccccgccaccaacaaccgggcccgccgggagcugccgcgcuucaugaacuacacccucaacaacgccaagaagacgaacgugacccugagcaagaagcggaagcgccgguuccugggcuuccuccugggggugggcuccgcgaucgccagcggcgucgccguguccaaggugcugcaccucgagggggaggucaacaagaucaagagcgcccugcuguccaccaacaaggccguggugagccucuccaacggcgucagcgugcugaccuccaaggugcuggaccucaagaacuacaucgacaagcagcugcugcccaucgucaacaagcagagcugcuccaucagcaacaucgagacggugaucgaguuccagcagaagaacaaccgccuccuggagaucacccgggaguucagcgugaacgcgggggucaccacccccguguccacguacaugcugaccaacagcgagcuccugucccugaucaacgacaugcccaucaccaacgaccagaagaagcucaugagcaacaacgugcagaucguccgccagcaguccuacagcaucauguccaucaucaaggaggaggugcuggccuacgugguccagcugccgcucuacggcgugaucgacacccccugcuggaagcugcacacgagcccccugugcaccaccaacaccaaggagggguccaacaucugccucacgcggaccgaccgcggcugguacugcgacaacgccggcagcgucuccuucuucccccaggccgagaccugcaaggugcagagcaaccggguguucugcgacaccaugaacucccugacgcugccgagcgaggucaaccucugcaacguggacaucuucaaccccaaguacgacugcaagaucaugaccuccaagaccgacgugagcuccagcgucaucaccucccugggggccaucgugagcugcuacggcaagacgaagugcaccgcgagcaacaagaaccgcgggaucaucaagaccuucuccaacggcugcgacuacgugagcaacaagggcgucgacaccguguccguggggaacacccuguacuacgucaacaagcaggagggcaagagccucuacgugaagggggagcccaucaucaacuucuacgacccccugguguucccguccgacgaguucgacgccagcaucucccaggucaacgagaagaucaaccagagccuggccuucauccggaaguccgacgagcuccugcacaacgugaacgccggcaagagcacgaccaacaucaugaucaccaccaucaucaucgugaucaucgucauccugcugucccucaucgccguggggcugcugcucuacugcaaggcgcgcugaggacuaguaauaaggaaacuguaugaaugucugugggcaggaagugaagagauccuucuguaaagguuuuuggaauuaugucugcugaauaauaaacuuuuuugaaauaauaaaucugguagaaaaaugagaucuaaaaaaaaaaaaaaaaaaaaaaaaaaaaaaaaaaaaaaaaaaaaaaaaaaaaaaaaaaaaaaaaugcaucccccccccccccccccccccccccccccccaaaggcucuuuucagagccaccagaauu

SEQ ID NO: 802 - RNA, 2048 nt, Artificial Sequence
  mRNA product Design g-4 comprising derived and/or modified sequence from HRSV(A2)__F-del (opt2)
gggagacuccugucgggcggaaguaggaggaguagaguuuaaaaacaguacucuuuuuccgguucgggacguaguugaagcaacgacaagccggauaaccgcucuugagacaggaagcuuaccauggagcuccucauccucaaggccaacgccaucaccaccauccucaccgccgucaccuucugcuucgccuccggccagaacaucaccgaggaguucuaccaguccaccugcuccgccgucuccaagggcuaccucuccgcccuccgcaccggcugguacaccuccgucaucaccaucgagcucuccaacaucaaggagaacaagugcaacggcaccgacgccaaggucaagcucaucaagcaggagcucgacaaguacaagaacgccgucaccgagcuccagcuccucaugcaguccacccccgccaccaacaaccgcgcccgccgcgagcucccccgcuucaugaacuacacccucaacaacgccaagaagaccaacgucacccucuccaagaagcgcaagcgccgcuuccucggcuuccuccucggcgucggcuccgccaucgccuccggcgucgccgucuccaagguccuccaccucgagggcgaggucaacaagaucaaguccgcccuccucuccaccaacaaggccgucgucucccucuccaacggcgucuccguccucaccuccaagguccucgaccucaagaacuacaucgacaagcagcuccuccccaucgucaacaagcaguccugcuccaucuccaacaucgagaccgucaucgaguuccagcagaagaacaaccgccuccucgagaucacccgcgaguucuccgucaacgccggcgucaccacccccgucuccaccuacaugcucaccaacuccgagcuccucucccucaucaacgacaugcccaucaccaacgaccagaagaagcucauguccaacaacguccagaucguccgccagcaguccuacuccaucauguccaucaucaaggaggagguccucgccuacgucguccagcucccccucuacggcgucaucgacacccccugcuggaagcuccacaccuccccccucugcaccaccaacaccaaggagggcuccaacaucugccucacccgcaccgaccgcggcugguacugcgacaacgccggcuccgucuccuucuucccccaggccgagaccugcaagguccaguccaaccgcgucuucugcgacaccaugaacucccucacccuccccuccgaggucaaccucugcaacgucgacaucuucaaccccaaguacgacugcaagaucaugaccuccaagaccgacgucuccuccuccgucaucaccucccucggcgccaucgucuccugcuacggcaagaccaagugcaccgccuccaacaagaaccgcggcaucaucaagaccuucuccaacggcugcgacuacgucuccaacaagggcgucgacaccgucuccgucggcaacacccucuacuacgucaacaagcaggagggcaagucccucuacgucaagggcgagcccaucaucaacuucuacgacccccucgucuuccccuccgacgaguucgacgccuccaucucccaggucaacgagaagaucaaccagucccucgccuucauccgcaaguccgacgagcuccuccacaacgucaacgccggcaaguccaccaccaacaucaugaucaccaccaucaucaucgucaucaucgucauccuccucucccucaucgccgucggccuccuccucuacugcaaggcccgcugaggacuaguaauaaggaaacuguaugaaugucugugggcaggaagugaagagauccuucuguaaagguuuuuggaauuaugucugcugaauaauaaacuuuuuugaaauaauaaaucugguagaaaaaugagaucuaaaaaaaaaaaaaaaaaaaaaaaaaaaaaaaaaaaaaaaaaaaaaaaaaaaaaaaaaaaaaaaaugcaucccccccccccccccccccccccccccccccaaaggcucuuuucagagccaccagaauu

SEQ ID NO: 803 - RNA, 2048 nt, Artificial Sequence
  mRNA product Design g-4 comprising derived and/or modified sequence from HRSV(A2)__F-del (opt3)
gggagacuccugucgggcggaaguaggaggaguagaguuuaaaaacaguacucuuuuuccgguucgggacguaguugaagcaacgacaagccggauaaccgcucuugagacaggaagcuuaccauggagcugcucauccuuaaggccaacgcuauuaccacaauacugacugcagugacguucugcuuugccagcggccagaauaucaccgaagaguucuaccaauccacauguucugcggucucaaaaggguauuugagugcuuuaagaacuggaugguacaccagcguuauuacaaucgaacuguccaacauuaaggagaauaaaugcaacgguaccgacgccaaggugaaacuaaucaagcaggaacucgauaaguauaaaaaugcaguaacugagcugcagcuucugaugcagucuacacccgccaccaacaauagggcucggcgcgaguugccucgauuuaugaacuacacgcucaauaacgcaaagaaaacuaaugugacccugucgaagaaacguaagagaagguuccugggcuuucucuuaggggucggaucagccauagcuagcggcguggccguuaguaaggugcugcaccuugaaggugaggucaacaaaaucaaguccgcguugcugucuacaaauaaagcagugguaagccuauccaacgggguuucagugcucacuucuaagguccuggaccuuaaaaauuauauugauaagcaacuguugccaaucgugaacaaacagagcuguucuauuuccaacaucgaaaccgugauagaguuccagcagaagaauaaccggcuccuggagauuacacgcgaauuuucagucaaugccggaguuaccacgccggugagcacuuacauguuaacaaacagugagcugcucucucuuaucaaugacaugcccauuaccaacgaucaaaagaaacugauguccaauaacguacagaucgugagacagcagagcuauucgaucaugucuauuauaaaggaagaggucuuggcuuacgugguucaacuaccucuguacggcgugaucgacacuccaugcuggaaacuccauacauccccacuguguaccacgaauaccaaggaaggcucaaacauuugccuuacaaggacugaucgggggugguauugugacaaugccggaagugucagcuucuuuccucaggcagagaccugcaaagugcaguccaaccgcguauucugugauacaaugaauagucugacuuugccaagcgagguuaaccucugcaauguggacaucuuuaaccccaaguacgauuguaagauaaugaccucaaaaacagacgucaguuccagcgugauuaccucucugggugcuaucgucucaugcuauggcaagacuaaaugcacggccaguaacaagaaucgagggaucauuaaaacauucagcaacggaugugauuacguguccaauaagggcguugacaccgugucuguagguaacacuuuauauuacgucaauaagcaagaagggaaaucgcuguaugugaagggagagccuaucauuaacuuuuacgacccccuaguuuucccgagcgaugaauuugacgcguccauaucacaggugaaugagaaaaucaaccagagucucgccuucauuagaaagucugaugaacugcuucacaaugucaacgcaggcaaaagcaccacaaauaucaugaucaccacuauuauaaucgugauuaucguaauuuugcugucccucaucgcugugggccugcuucuguacugcaaggccaggugaggacuaguaauaaggaaacuguaugaaugucugugggcaggaagugaagagauccuucuguaaagguuuuuggaauuaugucugcugaauaauaaacuuuuuugaaauaauaaaucugguagaaaaaugagaucuaaaaaaaaaaaaaaaaaaaaaaaaaaaaaaaaaaaaaaaaaaaaaaaaaaaaaaaaaaaaaaaaugcaucccccccccccccccccccccccccccccccaaaggcucuuuucagagccaccagaauu

SEQ ID NO: 804 - RNA, 2048 nt, Artificial Sequence
  mRNA product Design g-4 comprising derived and/or modified sequence from HRSV(A2)__F-del (opt4)
gggagacuccugucgggcggaaguaggaggaguagaguuuaaaaacaguacucuuuuuccgguucgggacguaguugaagcaacgacaagccggauaaccgcucuugagacaggaagcuuaccauggagcugcugauccugaaggccaacgccaucaccaccauccugaccgccgugaccuucugcuucgccagcggccagaacaucaccgaggaguucuaccagagcaccugcagcgccgugagcaagggcuaccugagcgcccugagaaccggcugguacaccagcgugaucaccaucgagcugagcaacaucaaggagaacaagugcaacggcaccgacgccaaggugaagcugaucaagcaggagcuggacaaguacaagaacgccgugaccgagcugcagcugcugaugcagagcacccccgccaccaacaacagagccagaagagagcugcccagauucaugaacuacacccugaacaacgccaagaagaccaacgugacccugagcaagaagagaaagagaagauuccugggcuuccugcugggcgugggcagcgccaucgccagcggcguggccgugagcaaggugcugcaccuggagggcgaggugaacaagaucaagagcgcccugcugagcaccaacaaggccguggugagccugagcaacggcgugagcgugcugaccagcaaggugcuggaccugaagaacuacaucgacaagcagcugcugcccaucgugaacaagcagagcugcagcaucagcaacaucgagaccgugaucgaguuccagcagaagaacaacagacugcuggagaucaccagagaguucagcgugaacgccggcgugaccacccccgugagcaccuacaugcugaccaacagcgagcugcugagccugaucaacgacaugcccaucaccaacgaccagaagaagcugaugagcaacaacgugcagaucgugagacagcagagcuacagcaucaugagcaucaucaaggaggaggugcuggccuacguggugcagcugccccuguacggcgugaucgacacccccugcuggaagcugcacaccagcccccugugcaccaccaacaccaaggagggcagcaacaucugccugaccagaaccgacagaggcugguacugcgacaacgccggcagcgugagcuucuucccccaggccgagaccugcaaggugcagagcaacagaguguucugcgacaccaugaacagccugacccugcccagcgaggugaaccugugcaacguggacaucuucaaccccaaguacgacugcaagaucaugaccagcaagaccgacgugagcagcagcgugaucaccagccugggcgccaucgugagcugcuacggcaagaccaagugcaccgccagcaacaagaacagaggcaucaucaagaccuucagcaacggcugcgacuacgugagcaacaagggcguggacaccgugagcgugggcaacacccuguacuacgugaacaagcaggagggcaagagccuguacgugaagggcgagcccaucaucaacuucuacgacccccugguguuccccagcgacgaguucgacgccagcaucagccaggugaacgagaagaucaaccagagccuggccuucaucagaaagagcgacgagcugcugcacaacgugaacgccggcaagagcaccaccaacaucaugaucaccaccaucaucaucgugaucaucgugauccugcugagccugaucgccgugggccugcugcuguacugcaaggccagaugaggacuaguaauaaggaaacuguaugaaugucugugggcaggaagugaagagauccuucuguaaagguuuuuggaauuaugucugcugaauaauaaacuuuuuugaaauaauaaaucugguagaaaaaugagaucuaaaaaaaaaaaaaaaaaaaaaaaaaaaaaaaaaaaaaaaaaaaaaaaaaaaaaaaaaaaaaaaaugcaucccccccccccccccccccccccccccccccaaaggcucuuuucagagccaccagaauu

SEQ ID NO: 805 - RNA, 2048 nt, Artificial Sequence
  mRNA product Design g-4 comprising derived and/or modified sequence from HRSV(A2)__F-del (opt5)
gggagacuccugucgggcggaaguaggaggaguagaguuuaaaaacaguacucuuuuuccgguucgggacguaguugaagcaacgacaagccggauaaccgcucuugagacaggaagcuuaccauggagcugcucauccugaaggccaacgcuauuaccacaauccuuacggccgugaccuucugcuuugcgagcggccagaauauuacagaagaguucuaccaauccaccuguucugcugucagcaaaggguaucuguccgcccucagaacaggaugguacaccucuguuaucacaauugaacugagcaacaucaaggagaauaaaugcaacggcaccgacgccaaggugaaacuuaucaagcaggaacuggauaaguauaaaaaugcugugacggagcuccagcugcugaugcaguccacccccgccacaaacaaucgggcucgcagagagcucccucgguuuaugaacuacacccugaauaacgccaagaaaacaaaugucacccuuucuaagaaacgcaagagacgguuccugggguuucuccugggagugggcagcgcgauugccuccgggguugcugugagcaagguccuucaccuggaaggagaggugaacaaaaucaagucugcccuccuguccacgaauaaagcuguugugagccugucuaacggcgucuccgugcucacaagcaaggugcuggaccuuaaaaauuauauugauaagcaacugcucccgaucgucaacaaacagucuuguuccauuagcaacaucgaaaccguuauugaguuccagcagaagaauaaccgccugcuugagaucacaagagaauuuuccgugaaugccggcgugaccacccccgucucuacauacaugcugacgaacagcgagcuccugucccugaucaaugacaugccuauuaccaacgaucaaaagaaacucaugagcaauaacgugcagaucguucggcagcagucuuauuccauuaugagcaucauuaaggaagaggugcuggcguacgucgugcaacuuccccuguacgggguuaucgacacaccuugcuggaaacuccauaccucuccccuguguacaaccaauacgaaggaaggaagcaacaucugccuuacacgcaccgauagaggcugguauugugacaaugccggguccgugucuuucuuuccucaggcugagaccugcaaaguccagagcaaccggguguucugugauacaaugaacucccugacccucccgagcgaggucaaucugugcaauguggacauuuuuaaccccaaguacgauuguaagaucaugacaucuaaaacggacguuuccagcucugugauuaccucccugggagccaucgucagcugcuauggcaagacaaaaugcaccgcuuccaacaagaaucgcgggauuaucaaaacauucucuaacggaugugauuacgugagcaauaagggcguugacaccguguccgucggcaacacgcucuauuacgugaauaagcaagaagggaaaucucuguaugugaagggagagccuaucauuaacuuuuacgacccccuuguuuucccuagcgaugaauuugacgccuccaucagccaggucaaugagaaaauuaaccagucucuggccuucaucagaaaguccgaugaacuccugcacaaugugaacgcuggcaaaagcaccacaaauauuaugaucaccacaauuaucaucgugauuaucgucauucugcuuucucucaucgcgguggggcugcugcucuacugcaaggcccggugaggacuaguaauaaggaaacuguaugaaugucugugggcaggaagugaagagauccuucuguaaagguuuuuggaauuaugucugcugaauaauaaacuuuuuugaaauaauaaaucugguagaaaaaugagaucuaaaaaaaaaaaaaaaaaaaaaaaaaaaaaaaaaaaaaaaaaaaaaaaaaaaaaaaaaaaaaaaaugcaucccccccccccccccccccccccccccccccaaaggcucuuuucagagccaccagaauu

SEQ ID NO: 806 - RNA, 2048 nt, Artificial Sequence
  mRNA product Design g-4 comprising derived and/or modified sequence from HRSV(A2)__F-del (opt6)
gggagacuccugucgggcggaaguaggaggaguagaguuuaaaaacaguacucuuuuuccgguucgggacguaguugaagcaacgacaagccggauaaccgcucuugagacaggaagcuuaccauggaauuacuaauacucaaagccaacgcaauaacaacaauacuaacagcaguaacauucugcuucgcaucaggacaaaacaucacagaagaauuuuaccaaaguacaugcagugcagucucuaaaggauaccucagugccuuacgcacaggaugguacacaucaguaauaacaaucgaacuuucaaacauaaaagaaaacaaaugcaauggaaccgacgccaaaguaaaacuaaucaaacaagaacuagacaaauauaaaaaugcaguaacagaauuacaacuccuaaugcaauccacaccagcaacaaauaacagagcaagacgagaacucccucgauucaugaauuacacauuaaacaacgcaaaaaaaacuaacguaacuuuaucaaaaaaaagaaaacguagauuucuaggauuccuacuaggcguaggguccgccauugcaucaggaguagcaguuagcaaaguauuacauuuagaaggagaaguaaauaaaaucaaaagcgcacuacucucaaccaacaaagcaguaguaucacucucaaacggaguaucaguacuaacauccaaaguacucgaccucaaaaacuacauagacaaacaauuacuacccauaguaaacaaacaaucaugcucuauaucaaauaucgaaacaguaaucgaauuucaacaaaaaaacaaucgacuacuugaaauaacaagagaguucuccgucaaugccggagucaccacaccagucucaacauacaugcuaaccaacucugaacuccuaucacuaauaaaugacaugccaauaacaaacgaccaaaaaaaacuaaugucaaauaacguacaaauaguacgacaacaaaguuauuccauaaugaguauaaucaaagaagaaguguuagcauacguaguccaacuaccauuauauggaguaauagacacaccauguuggaaauuacacaccucaccacucugcacuaccaauacaaaagaaggcucaaauauaugccuaacucgcacagacagaggcugguacugcgauaacgcaggauccguaucuuucuuuccccaagcagaaacuugcaaaguacaaucaaacagagucuucugcgacaccaugaauagucucacauuaccaucugaaguaaaccuauguaacguagauauauucaauccaaaauacgacugcaaaauaaugacaucaaaaaccgacgucucuagcaguguaaucacaucacuaggagcaauaguaagcugcuauggaaaaacaaaauguacagcaucaaacaaaaacaggggaauaauaaaaaccuucucaaacggaugugacuacguaucaaauaaaggcguagacacaguaagcguaggaaacacccuauacuacguuaacaaacaagaagggaaaucauuauacguaaaaggagaaccaauaauaaacuucuacgauccacucguauucccauccgacgaauuugacgccagcauaucccaaguuaacgaaaaaauaaaccaaucacuugcauuuauacgaaaaucugaugaacuucuccacaacguaaaugcaggaaaauccaccaccaauauaaugaucacaacuaucaucauaguaauaaucgucauuuuacuaucauuaauagcaguuggccuacuucuauacugcaaagcaagauaaggacuaguaauaaggaaacuguaugaaugucugugggcaggaagugaagagauccuucuguaaagguuuuuggaauuaugucugcugaauaauaaacuuuuuugaaauaauaaaucugguagaaaaaugagaucuaaaaaaaaaaaaaaaaaaaaaaaaaaaaaaaaaaaaaaaaaaaaaaaaaaaaaaaaaaaaaaaaugcaucccccccccccccccccccccccccccccccaaaggcucuuuucagagccaccagaauu

SEQ ID NO: 807 - RNA, 2048 nt, Artificial Sequence
  mRNA product Design g-4 comprising derived and/or modified sequence from HRSV(A2)__F-del (opt11)
gggagacuccugucgggcggaaguaggaggaguagaguuuaaaaacaguacucuuuuuccgguucgggacguaguugaagcaacgacaagccggauaaccgcucuugagacaggaagcuuaccauggaacuacuaauccuaaaagccaacgcgaucaccaccauccuaacggcagucaccuucugcuucgcaucaggccaaaacaucacagaagaguucuaccaaagcacaugcuccgccguauccaaaggcuaccucagcgcccuacgcacaggcugguacacaucugucaucaccauagaacucuccaacaucaaagaaaacaaaugcaacggcacugacgccaaaguaaagcugaucaaacaagaacucgacaaauacaaaaacgcagucaccgaacuccaacuacucaugcaauccaccccugcaaccaacaacagggcccgccgcgaacucccccgcuucaugaacuacacuuuaaacaacgccaaaaagaccaacgucacacucagcaagaaacggaaacgacgauuccuaggguuucuccuaggcgucggcucggcaaucgccuccggcgucgccguaagcaaaguacuacaccuagaaggcgaagugaacaaaaucaaaagugcccuucucuccaccaacaaggccguagucucucuauccaacggagucucaguccucaccucaaagguccucgaccucaaaaacuacaucgacaaacaacuacuccccauugucaacaagcagucaugcuccauaucaaacaucgaaaccgucaucgaguuccaacagaaaaacaaccgacuccucgaaauaaccagagaguucucggucaacgccggcgucaccaccccagucagcaccuacaugcucacuaacuccgaacuccuaucccucaucaacgacaugccaauuaccaacgaccaaaagaaacuaaugucgaacaacguucaaaucguccgacaacaaaguuacuccaucaugagcauaaucaaagaagaaguucuagcguacgucguccaacucccacuauacggcgucaucgacacuccgugcuggaaacuccacacaucaccccuauguacaaccaacacaaaagaaggcagcaacaucugccucacccgcaccgaccgagggugguauugcgauaacgcuggcagcgucuccuucuucccccaagccgaaaccugcaaaguccaaucaaacagaguauucugcgacaccaugaacucccuuacucucccuagcgaagucaaccucugcaacguugacauauucaaccccaaauacgacugcaaaaucaugaccuccaagaccgacgucuccuccuccgucaucacaucucuaggugccauugucuccugcuacggaaaaaccaaaugcacagccuccaacaaaaaccgcggcaucauaaaaaccuucuccaacggcugcgacuacgucaguaauaaaggcgucgacacgguauccguugggaauacgcuuuacuacguaaauaaacaagaaggcaaaucccucuacgucaaaggugaacccaucauaaacuucuacgacccgcuuguguucccauccgacgaguucgacgccagcaucagccaggucaacgaaaagaucaaccaaucccuagccuucauccgcaaaagcgacgaacuacuacacaacgucaacgccggaaaauccacaaccaacaucaugaucaccaccaucaucaucgucaucaucguaauccuacucucucucaucgccgucggccuccuacuguacuguaaagcccgauagggacuaguaauaaggaaacuguaugaaugucugugggcaggaagugaagagauccuucuguaaagguuuuuggaauuaugucugcugaauaauaaacuuuuuugaaauaauaaaucugguagaaaaaugagaucuaaaaaaaaaaaaaaaaaaaaaaaaaaaaaaaaaaaaaaaaaaaaaaaaaaaaaaaaaaaaaaaaugcaucccccccccccccccccccccccccccccccaaaggcucuuuucagagccaccagaauu

SEQ ID NO: 808 - RNA, 2024 nt, Artificial Sequence
  mRNA product Design g-5 comprising derived and/or modified sequence from HRSV(A2)__F-del (artificial)
gggagacccgugacccggaaguuguacggcuacgcgacuuucccucccacaaacccucgcgcccuuccuuuccuacuugggcccggcagaaagcuuaccauggaguugcuaauccucaaagcaaaugcaauuaccacaauccucacugcagucacauuuuguuuugcuucuggucaaaacaucacugaagaauuuuaucaaucaacaugcagugcaguuagcaaaggcuaucuuagugcucugagaacugguugguauaccaguguuauaacuauagaauuaaguaauaucaaggaaaauaaguguaauggaacagaugcuaagguaaaauugauaaaacaagaauuagauaaauauaaaaaugcuguaacagaauugcaguugcucaugcaaagcacaccagcaacaaacaaucgagccagaagagaacuaccaagguuuaugaauuauacacucaacaaugccaaaaaaaccaauguaacauuaagcaagaaaaggaaaagaagauuucuugguuuuuuguuagguguuggaucugcaaucgccaguggcguugcuguaucuaagguccugcaccuagaaggggaagugaacaagaucaaaagugcucuacuauccacaaacaaggcuguagucagcuuaucaaauggaguuagugucuuaaccagcaaaguguuagaccucaaaaacuauauagauaaacaauuguuaccuauugugaacaagcaaagcugcagcauaucaaauauagaaacugugauagaguuccaacaaaagaacaacagacuacuagagauuaccagggaauuuaguguuaaugcagguguaacuacaccuguaagcacuuacauguuaacuaauagugaauuauugucauuaaucaaugauaugccuauaacaaaugaucagaaaaaguuaauguccaacaauguucaaauaguuagacagcaaaguuacucuaucauguccauaauaaaagaggaagucuuagcauauguaguacaauuaccacuauaugguguuauagauacacccuguuggaaacuacacacauccccucuauguacaaccaacacaaaagaaggguccaacaucuguuuaacaagaacugacagaggaugguacugugacaaugcaggaucaguaucuuucuucccacaagcugaaacauguaaaguucaaucaaaucgaguauuuugugacacaaugaacaguuuaacauuaccaagugaaguaaaucucugcaauguugacauauucaaccccaaauaugauuguaaaauuaugacuucaaaaacagauguaagcagcuccguuaucacaucucuaggagccauugugucaugcuauggcaaaacuaaauguacagcauccaauaaaaaucguggaaucauaaagacauuuucuaacgggugcgauuauguaucaaauaaagggguggacacugugucuguagguaacacauuauauuauguaaauaagcaagaagguaaaagucucuauguaaaaggugaaccaauaauaaauuucuaugacccauuaguauuccccucugaugaauuugaugcaucaauaucucaagucaacgagaagauuaaccagagccuagcauuuauucguaaauccgaugaauuauuacauaauguaaaugcugguaaauccaccacaaauaucaugauaacuacuauaauuauagugauuauaguaauauuguuaucauuaauugcuguuggacugcucuuauacuguaaggccagauaaggacuaguaauaaggaaacuguaugaaugucugugggcaggaagugaagagauccuucuguaaagguuuuuggaauuaugucugcugaauaauaaacuuuuuugaaauaauaaaucugguagaaaaaugagaucuaaaaaaaaaaaaaaaaaaaaaaaaaaaaaaaaaaaaaaaaaaaaaaaaaaaaaaaaaaaaaaaaugcaucccccccccccccccccccccccccccccccaaaggcucuuuucagagccaccagaauu

SEQ ID NO: 809 - RNA, 2024 nt, Artificial Sequence
  mRNA product Design g-5 comprising derived and/or modified sequence from HRSV(A2)__F-del (opt1)
gggagacccgugacccggaaguuguacggcuacgcgacuuucccucccacaaacccucgcgcccuuccuuuccuacuugggcccggcagaaagcuuaccauggagcugcucauccugaaggccaacgccaucaccaccauccugacggcggugaccuucugcuucgccagcggccagaacaucaccgaggaguucuaccaguccaccugcagcgccgucuccaagggguaccucagcgcccugcggacgggcugguacaccuccgugaucaccaucgagcugagcaacaucaaggagaacaagugcaacgggaccgacgccaaggugaagcucaucaagcaggagcuggacaaguacaagaacgcggucacggagcugcagcuccugaugcaguccaccccggcaaccaacaaccgcgcccggcgcgagcugccccgguucaugaacuacacccucaacaacgccaagaagacgaacgugacccugagcaagaagcgcaagcggcgcuuccugggcuuccuccugggggugggcuccgccaucgcgagcggcgucgccguguccaaggugcugcaccucgagggggaggucaacaagaucaagagcgcccugcuguccaccaacaaggccguggugagccucuccaacggcgucagcgugcugaccuccaaggugcuggaccucaagaacuacaucgacaagcagcugcugcccaucgucaacaagcagagcugcuccaucagcaacaucgagacggugaucgaguuccagcagaagaacaaccggcuccuggagaucacccgcgaguucagcgugaacgccggggucaccacccccguguccacguacaugcugaccaacagcgagcuccugucccugaucaacgacaugccgaucaccaacgaccagaagaagcucaugagcaacaacgugcagaucguccggcagcaguccuacagcaucauguccaucaucaaggaggaggugcuggcguacgugguccagcugccccucuacggcgugaucgacacccccugcuggaagcugcacacgagcccccugugcaccaccaacaccaaggagggguccaacaucugccucacgcgcaccgaccggggcugguacugcgacaacgccggcagcgucuccuucuucccgcaggccgagaccugcaaggugcagagcaaccgcguguucugcgacaccaugaacucccugacgcugcccagcgagguaaaccucugcaacgucgacaucuucaaccccaaguacgacugcaagaucaugaccuccaagaccgacgugagcuccagcgugaucaccucccugggggccaucgucagcugcuacggcaagacgaagugcaccgccagcaacaagaaccgggggaucaucaagaccuucuccaacggcugcgacuacgugagcaacaagggcguggacaccguguccgucgggaacacccuguacuacgugaacaagcaggagggcaagagccucuacgugaagggggagcccaucaucaacuucuacgacccgcuggucuuccccuccgacgaguucgacgcgagcaucucccaggugaacgagaagaucaaccagagccuggccuucauccgcaaguccgacgagcugcuccacaacgugaacgccggcaagagcacgaccaacaucaugaucaccaccaucaucaucgucaucaucgugauccugcugucccucaucgccguggggcugcugcucuacugcaaggcccggugaggacuaguaauaaggaaacuguaugaaugucugugggcaggaagugaagagauccuucuguaaagguuuuuggaauuaugucugcugaauaauaaacuuuuuugaaauaauaaaucugguagaaaaaugagaucuaaaaaaaaaaaaaaaaaaaaaaaaaaaaaaaaaaaaaaaaaaaaaaaaaaaaaaaaaaaaaaaaugcaucccccccccccccccccccccccccccccccaaaggcucuuuucagagccaccagaauu

SEQ ID NO: 810 - RNA, 2024 nt, Artificial Sequence
  mRNA product Design g-5 comprising derived and/or modified sequence from HRSV(A2)__F-del (opt1)
gggagacccgugacccggaaguuguacggcuacgcgacuuucccucccacaaacccucgcgcccuuccuuuccuacuugggcccggcagaaagcuuaccauggagcugcucauccugaaggccaacgccaucaccaccauccugacggcggugaccuucugcuucgccagcggccagaacaucaccgaggaguucuaccaguccacgugcagcgccgucuccaagggguaccucagcgcccugcgcaccggcugguacaccuccgugaucaccaucgagcugagcaacaucaaggagaacaagugcaacgggaccgacgccaaggugaagcucaucaagcaggagcuggacaaguacaagaacgcggucacggagcugcagcuccugaugcaguccacccccgccaccaacaaccgggcccgccgggagcugccgcgcuucaugaacuacacccucaacaacgccaagaagacgaacgugacccugagcaagaagcggaagcgccgguuccugggcuuccuccugggggugggcuccgcgaucgccagcggcgucgccguguccaaggugcugcaccucgagggggaggucaacaagaucaagagcgcccugcuguccaccaacaaggccguggugagccucuccaacggcgucagcgugcugaccuccaaggugcuggaccucaagaacuacaucgacaagcagcugcugcccaucgucaacaagcagagcugcuccaucagcaacaucgagacggugaucgaguuccagcagaagaacaaccgccuccuggagaucacccgggaguucagcgugaacgcgggggucaccacccccguguccacguacaugcugaccaacagcgagcuccugucccugaucaacgacaugcccaucaccaacgaccagaagaagcucaugagcaacaacgugcagaucguccgccagcaguccuacagcaucauguccaucaucaaggaggaggugcuggccuacgugguccagcugccgcucuacggcgugaucgacacccccugcuggaagcugcacacgagcccccugugcaccaccaacaccaaggagggguccaacaucugccucacgcggaccgaccgcggcugguacugcgacaacgccggcagcgucuccuucuucccccaggccgagaccugcaaggugcagagcaaccggguguucugcgacaccaugaacucccugacgcugccgagcgaggucaaccucugcaacguggacaucuucaaccccaaguacgacugcaagaucaugaccuccaagaccgacgugagcuccagcgucaucaccucccugggggccaucgugagcugcuacggcaagacgaagugcaccgcgagcaacaagaaccgcgggaucaucaagaccuucuccaacggcugcgacuacgugagcaacaagggcgucgacaccguguccguggggaacacccuguacuacgucaacaagcaggagggcaagagccucuacgugaagggggagcccaucaucaacuucuacgacccccugguguucccguccgacgaguucgacgccagcaucucccaggucaacgagaagaucaaccagagccuggccuucauccggaaguccgacgagcuccugcacaacgugaacgccggcaagagcacgaccaacaucaugaucaccaccaucaucaucgugaucaucgucauccugcugucccucaucgccguggggcugcugcucuacugcaaggcgcgcugaggacuaguaauaaggaaacuguaugaaugucugugggcaggaagugaagagauccuucuguaaagguuuuuggaauuaugucugcugaauaauaaacuuuuuugaaauaauaaaucugguagaaaaaugagaucuaaaaaaaaaaaaaaaaaaaaaaaaaaaaaaaaaaaaaaaaaaaaaaaaaaaaaaaaaaaaaaaaugcaucccccccccccccccccccccccccccccccaaaggcucuuuucagagccaccagaauu

SEQ ID NO: 811 - RNA, 2024 nt, Artificial Sequence
  mRNA product Design g-5 comprising derived and/or modified sequence from HRSV(A2)__F-del (opt2)
gggagacccgugacccggaaguuguacggcuacgcgacuuucccucccacaaacccucgcgcccuuccuuuccuacuugggcccggcagaaagcuuaccauggagcuccucauccucaaggccaacgccaucaccaccauccucaccgccgucaccuucugcuucgccuccggccagaacaucaccgaggaguucuaccaguccaccugcuccgccgucuccaagggcuaccucuccgcccuccgcaccggcugguacaccuccgucaucaccaucgagcucuccaacaucaaggagaacaagugcaacggcaccgacgccaaggucaagcucaucaagcaggagcucgacaaguacaagaacgccgucaccgagcuccagcuccucaugcaguccacccccgccaccaacaaccgcgcccgccgcgagcucccccgcuucaugaacuacacccucaacaacgccaagaagaccaacgucacccucuccaagaagcgcaagcgccgcuuccucggcuuccuccucggcgucggcuccgccaucgccuccggcgucgccgucuccaagguccuccaccucgagggcgaggucaacaagaucaaguccgcccuccucuccaccaacaaggccgucgucucccucuccaacggcgucuccguccucaccuccaagguccucgaccucaagaacuacaucgacaagcagcuccuccccaucgucaacaagcaguccugcuccaucuccaacaucgagaccgucaucgaguuccagcagaagaacaaccgccuccucgagaucacccgcgaguucuccgucaacgccggcgucaccacccccgucuccaccuacaugcucaccaacuccgagcuccucucccucaucaacgacaugcccaucaccaacgaccagaagaagcucauguccaacaacguccagaucguccgccagcaguccuacuccaucauguccaucaucaaggaggagguccucgccuacgucguccagcucccccucuacggcgucaucgacacccccugcuggaagcuccacaccuccccccucugcaccaccaacaccaaggagggcuccaacaucugccucacccgcaccgaccgcggcugguacugcgacaacgccggcuccgucuccuucuucccccaggccgagaccugcaagguccaguccaaccgcgucuucugcgacaccaugaacucccucacccuccccuccgaggucaaccucugcaacgucgacaucuucaaccccaaguacgacugcaagaucaugaccuccaagaccgacgucuccuccuccgucaucaccucccucggcgccaucgucuccugcuacggcaagaccaagugcaccgccuccaacaagaaccgcggcaucaucaagaccuucuccaacggcugcgacuacgucuccaacaagggcgucgacaccgucuccgucggcaacacccucuacuacgucaacaagcaggagggcaagucccucuacgucaagggcgagcccaucaucaacuucuacgacccccucgucuuccccuccgacgaguucgacgccuccaucucccaggucaacgagaagaucaaccagucccucgccuucauccgcaaguccgacgagcuccuccacaacgucaacgccggcaaguccaccaccaacaucaugaucaccaccaucaucaucgucaucaucgucauccuccucucccucaucgccgucggccuccuccucuacugcaaggcccgcugaggacuaguaauaaggaaacuguaugaaugucugugggcaggaagugaagagauccuucuguaaagguuuuuggaauuaugucugcugaauaauaaacuuuuuugaaauaauaaaucugguagaaaaaugagaucuaaaaaaaaaaaaaaaaaaaaaaaaaaaaaaaaaaaaaaaaaaaaaaaaaaaaaaaaaaaaaaaaugcaucccccccccccccccccccccccccccccccaaaggcucuuuucagagccaccagaauu

SEQ ID NO: 812 - RNA, 2024 nt, Artificial Sequence
  mRNA product Design g-5 comprising derived and/or modified sequence from HRSV(A2)__F-del (opt3)
gggagacccgugacccggaaguuguacggcuacgcgacuuucccucccacaaacccucgcgcccuuccuuuccuacuugggcccggcagaaagcuuaccauggagcugcucauccuuaaggccaacgcuauuaccacaauacugacugcagugacguucugcuuugccagcggccagaauaucaccgaagaguucuaccaauccacauguucugcggucucaaaaggguauuugagugcuuuaagaacuggaugguacaccagcguuauuacaaucgaacuguccaacauuaaggagaauaaaugcaacgguaccgacgccaaggugaaacuaaucaagcaggaacucgauaaguauaaaaaugcaguaacugagcugcagcuucugaugcagucuacacccgccaccaacaauagggcucggcgcgaguugccucgauuuaugaacuacacgcucaauaacgcaaagaaaacuaaugugacccugucgaagaaacguaagagaagguuccugggcuuucucuuaggggucggaucagccauagcuagcggcguggccguuaguaaggugcugcaccuugaaggugaggucaacaaaaucaaguccgcguugcugucuacaaauaaagcagugguaagccuauccaacgggguuucagugcucacuucuaagguccuggaccuuaaaaauuauauugauaagcaacuguugccaaucgugaacaaacagagcuguucuauuuccaacaucgaaaccgugauagaguuccagcagaagaauaaccggcuccuggagauuacacgcgaauuuucagucaaugccggaguuaccacgccggugagcacuuacauguuaacaaacagugagcugcucucucuuaucaaugacaugcccauuaccaacgaucaaaagaaacugauguccaauaacguacagaucgugagacagcagagcuauucgaucaugucuauuauaaaggaagaggucuuggcuuacgugguucaacuaccucuguacggcgugaucgacacuccaugcuggaaacuccauacauccccacuguguaccacgaauaccaaggaaggcucaaacauuugccuuacaaggacugaucgggggugguauugugacaaugccggaagugucagcuucuuuccucaggcagagaccugcaaagugcaguccaaccgcguauucugugauacaaugaauagucugacuuugccaagcgagguuaaccucugcaauguggacaucuuuaaccccaaguacgauuguaagauaaugaccucaaaaacagacgucaguuccagcgugauuaccucucugggugcuaucgucucaugcuauggcaagacuaaaugcacggccaguaacaagaaucgagggaucauuaaaacauucagcaacggaugugauuacguguccaauaagggcguugacaccgugucuguagguaacacuuuauauuacgucaauaagcaagaagggaaaucgcuguaugugaagggagagccuaucauuaacuuuuacgacccccuaguuuucccgagcgaugaauuugacgcguccauaucacaggugaaugagaaaaucaaccagagucucgccuucauuagaaagucugaugaacugcuucacaaugucaacgcaggcaaaagcaccacaaauaucaugaucaccacuauuauaaucgugauuaucguaauuuugcugucccucaucgcugugggccugcuucuguacugcaaggccaggugaggacuaguaauaaggaaacuguaugaaugucugugggcaggaagugaagagauccuucuguaaagguuuuuggaauuaugucugcugaauaauaaacuuuuuugaaauaauaaaucugguagaaaaaugagaucuaaaaaaaaaaaaaaaaaaaaaaaaaaaaaaaaaaaaaaaaaaaaaaaaaaaaaaaaaaaaaaaaugcaucccccccccccccccccccccccccccccccaaaggcucuuuucagagccaccagaauu

SEQ ID NO: 813 - RNA, 2024 nt, Artificial Sequence
  mRNA product Design g-5 comprising derived and/or modified sequence from HRSV(A2)__F-del (opt4)
gggagacccgugacccggaaguuguacggcuacgcgacuuucccucccacaaacccucgcgcccuuccuuuccuacuugggcccggcagaaagcuuaccauggagcugcugauccugaaggccaacgccaucaccaccauccugaccgccgugaccuucugcuucgccagcggccagaacaucaccgaggaguucuaccagagcaccugcagcgccgugagcaagggcuaccugagcgcccugagaaccggcugguacaccagcgugaucaccaucgagcugagcaacaucaaggagaacaagugcaacggcaccgacgccaaggugaagcugaucaagcaggagcuggacaaguacaagaacgccgugaccgagcugcagcugcugaugcagagcacccccgccaccaacaacagagccagaagagagcugcccagauucaugaacuacacccugaacaacgccaagaagaccaacgugacccugagcaagaagagaaagagaagauuccugggcuuccugcugggcgugggcagcgccaucgccagcggcguggccgugagcaaggugcugcaccuggagggcgaggugaacaagaucaagagcgcccugcugagcaccaacaaggccguggugagccugagcaacggcgugagcgugcugaccagcaaggugcuggaccugaagaacuacaucgacaagcagcugcugcccaucgugaacaagcagagcugcagcaucagcaacaucgagaccgugaucgaguuccagcagaagaacaacagacugcuggagaucaccagagaguucagcgugaacgccggcgugaccacccccgugagcaccuacaugcugaccaacagcgagcugcugagccugaucaacgacaugcccaucaccaacgaccagaagaagcugaugagcaacaacgugcagaucgugagacagcagagcuacagcaucaugagcaucaucaaggaggaggugcuggccuacguggugcagcugccccuguacggcgugaucgacacccccugcuggaagcugcacaccagcccccugugcaccaccaacaccaaggagggcagcaacaucugccugaccagaaccgacagaggcugguacugcgacaacgccggcagcgugagcuucuucccccaggccgagaccugcaaggugcagagcaacagaguguucugcgacaccaugaacagccugacccugcccagcgaggugaaccugugcaacguggacaucuucaaccccaaguacgacugcaagaucaugaccagcaagaccgacgugagcagcagcgugaucaccagccugggcgccaucgugagcugcuacggcaagaccaagugcaccgccagcaacaagaacagaggcaucaucaagaccuucagcaacggcugcgacuacgugagcaacaagggcguggacaccgugagcgugggcaacacccuguacuacgugaacaagcaggagggcaagagccuguacgugaagggcgagcccaucaucaacuucuacgacccccugguguuccccagcgacgaguucgacgccagcaucagccaggugaacgagaagaucaaccagagccuggccuucaucagaaagagcgacgagcugcugcacaacgugaacgccggcaagagcaccaccaacaucaugaucaccaccaucaucaucgugaucaucgugauccugcugagccugaucgccgugggccugcugcuguacugcaaggccagaugaggacuaguaauaaggaaacuguaugaaugucugugggcaggaagugaagagauccuucuguaaagguuuuuggaauuaugucugcugaauaauaaacuuuuuugaaauaauaaaucugguagaaaaaugagaucuaaaaaaaaaaaaaaaaaaaaaaaaaaaaaaaaaaaaaaaaaaaaaaaaaaaaaaaaaaaaaaaaugcaucccccccccccccccccccccccccccccccaaaggcucuuuucagagccaccagaauu

SEQ ID NO: 814 - RNA, 2024 nt, Artificial Sequence
  mRNA product Design g-5 comprising derived and/or modified sequence from HRSV(A2)__F-del (opt5)
gggagacccgugacccggaaguuguacggcuacgcgacuuucccucccacaaacccucgcgcccuuccuuuccuacuugggcccggcagaaagcuuaccauggagcugcucauccugaaggccaacgcuauuaccacaauccuuacggccgugaccuucugcuuugcgagcggccagaauauuacagaagaguucuaccaauccaccuguucugcugucagcaaaggguaucuguccgcccucagaacaggaugguacaccucuguuaucacaauugaacugagcaacaucaaggagaauaaaugcaacggcaccgacgccaaggugaaacuuaucaagcaggaacuggauaaguauaaaaaugcugugacggagcuccagcugcugaugcaguccacccccgccacaaacaaucgggcucgcagagagcucccucgguuuaugaacuacacccugaauaacgccaagaaaacaaaugucacccuuucuaagaaacgcaagagacgguuccugggguuucuccugggagugggcagcgcgauugccuccgggguugcugugagcaagguccuucaccuggaaggagaggugaacaaaaucaagucugcccuccuguccacgaauaaagcuguugugagccugucuaacggcgucuccgugcucacaagcaaggugcuggaccuuaaaaauuauauugauaagcaacugcucccgaucgucaacaaacagucuuguuccauuagcaacaucgaaaccguuauugaguuccagcagaagaauaaccgccugcuugagaucacaagagaauuuuccgugaaugccggcgugaccacccccgucucuacauacaugcugacgaacagcgagcuccugucccugaucaaugacaugccuauuaccaacgaucaaaagaaacucaugagcaauaacgugcagaucguucggcagcagucuuauuccauuaugagcaucauuaaggaagaggugcuggcguacgucgugcaacuuccccuguacgggguuaucgacacaccuugcuggaaacuccauaccucuccccuguguacaaccaauacgaaggaaggaagcaacaucugccuuacacgcaccgauagaggcugguauugugacaaugccggguccgugucuuucuuuccucaggcugagaccugcaaaguccagagcaaccggguguucugugauacaaugaacucccugacccucccgagcgaggucaaucugugcaauguggacauuuuuaaccccaaguacgauuguaagaucaugacaucuaaaacggacguuuccagcucugugauuaccucccugggagccaucgucagcugcuauggcaagacaaaaugcaccgcuuccaacaagaaucgcgggauuaucaaaacauucucuaacggaugugauuacgugagcaauaagggcguugacaccguguccgucggcaacacgcucuauuacgugaauaagcaagaagggaaaucucuguaugugaagggagagccuaucauuaacuuuuacgacccccuuguuuucccuagcgaugaauuugacgccuccaucagccaggucaaugagaaaauuaaccagucucuggccuucaucagaaaguccgaugaacuccugcacaaugugaacgcuggcaaaagcaccacaaauauuaugaucaccacaauuaucaucgugauuaucgucauucugcuuucucucaucgcgguggggcugcugcucuacugcaaggcccggugaggacuaguaauaaggaaacuguaugaaugucugugggcaggaagugaagagauccuucuguaaagguuuuuggaauuaugucugcugaauaauaaacuuuuuugaaauaauaaaucugguagaaaaaugagaucuaaaaaaaaaaaaaaaaaaaaaaaaaaaaaaaaaaaaaaaaaaaaaaaaaaaaaaaaaaaaaaaaugcaucccccccccccccccccccccccccccccccaaaggcucuuuucagagccaccagaauu

SEQ ID NO: 815 - RNA, 2024 nt, Artificial Sequence
  mRNA product Design g-5 comprising derived and/or modified sequence from HRSV(A2)__F-del (opt6)
gggagacccgugacccggaaguuguacggcuacgcgacuuucccucccacaaacccucgcgcccuuccuuuccuacuugggcccggcagaaagcuuaccauggaauuacuaauacucaaagccaacgcaauaacaacaauacuaacagcaguaacauucugcuucgcaucaggacaaaacaucacagaagaauuuuaccaaaguacaugcagugcagucucuaaaggauaccucagugccuuacgcacaggaugguacacaucaguaauaacaaucgaacuuucaaacauaaaagaaaacaaaugcaauggaaccgacgccaaaguaaaacuaaucaaacaagaacuagacaaauauaaaaaugcaguaacagaauuacaacuccuaaugcaauccacaccagcaacaaauaacagagcaagacgagaacucccucgauucaugaauuacacauuaaacaacgcaaaaaaaacuaacguaacuuuaucaaaaaaaagaaaacguagauuucuaggauuccuacuaggcguaggguccgccauugcaucaggaguagcaguuagcaaaguauuacauuuagaaggagaaguaaauaaaaucaaaagcgcacuacucucaaccaacaaagcaguaguaucacucucaaacggaguaucaguacuaacauccaaaguacucgaccucaaaaacuacauagacaaacaauuacuacccauaguaaacaaacaaucaugcucuauaucaaauaucgaaacaguaaucgaauuucaacaaaaaaacaaucgacuacuugaaauaacaagagaguucuccgucaaugccggagucaccacaccagucucaacauacaugcuaaccaacucugaacuccuaucacuaauaaaugacaugccaauaacaaacgaccaaaaaaaacuaaugucaaauaacguacaaauaguacgacaacaaaguuauuccauaaugaguauaaucaaagaagaaguguuagcauacguaguccaacuaccauuauauggaguaauagacacaccauguuggaaauuacacaccucaccacucugcacuaccaauacaaaagaaggcucaaauauaugccuaacucgcacagacagaggcugguacugcgauaacgcaggauccguaucuuucuuuccccaagcagaaacuugcaaaguacaaucaaacagagucuucugcgacaccaugaauagucucacauuaccaucugaaguaaaccuauguaacguagauauauucaauccaaaauacgacugcaaaauaaugacaucaaaaaccgacgucucuagcaguguaaucacaucacuaggagcaauaguaagcugcuauggaaaaacaaaauguacagcaucaaacaaaaacaggggaauaauaaaaaccuucucaaacggaugugacuacguaucaaauaaaggcguagacacaguaagcguaggaaacacccuauacuacguuaacaaacaagaagggaaaucauuauacguaaaaggagaaccaauaauaaacuucuacgauccacucguauucccauccgacgaauuugacgccagcauaucccaaguuaacgaaaaaauaaaccaaucacuugcauuuauacgaaaaucugaugaacuucuccacaacguaaaugcaggaaaauccaccaccaauauaaugaucacaacuaucaucauaguaauaaucgucauuuuacuaucauuaauagcaguuggccuacuucuauacugcaaagcaagauaaggacuaguaauaaggaaacuguaugaaugucugugggcaggaagugaagagauccuucuguaaagguuuuuggaauuaugucugcugaauaauaaacuuuuuugaaauaauaaaucugguagaaaaaugagaucuaaaaaaaaaaaaaaaaaaaaaaaaaaaaaaaaaaaaaaaaaaaaaaaaaaaaaaaaaaaaaaaaugcaucccccccccccccccccccccccccccccccaaaggcucuuuucagagccaccagaauu

SEQ ID NO: 816 - RNA, 2024 nt, Artificial Sequence
  mRNA product Design g-5 comprising derived and/or modified sequence from HRSV(A2)__F-del (opt11)
gggagacccgugacccggaaguuguacggcuacgcgacuuucccucccacaaacccucgcgcccuuccuuuccuacuugggcccggcagaaagcuuaccauggaacuacuaauccuaaaagccaacgcgaucaccaccauccuaacggcagucaccuucugcuucgcaucaggccaaaacaucacagaagaguucuaccaaagcacaugcuccgccguauccaaaggcuaccucagcgcccuacgcacaggcugguacacaucugucaucaccauagaacucuccaacaucaaagaaaacaaaugcaacggcacugacgccaaaguaaagcugaucaaacaagaacucgacaaauacaaaaacgcagucaccgaacuccaacuacucaugcaauccaccccugcaaccaacaacagggcccgccgcgaacucccccgcuucaugaacuacacuuuaaacaacgccaaaaagaccaacgucacacucagcaagaaacggaaacgacgauuccuaggguuucuccuaggcgucggcucggcaaucgccuccggcgucgccguaagcaaaguacuacaccuagaaggcgaagugaacaaaaucaaaagugcccuucucuccaccaacaaggccguagucucucuauccaacggagucucaguccucaccucaaagguccucgaccucaaaaacuacaucgacaaacaacuacuccccauugucaacaagcagucaugcuccauaucaaacaucgaaaccgucaucgaguuccaacagaaaaacaaccgacuccucgaaauaaccagagaguucucggucaacgccggcgucaccaccccagucagcaccuacaugcucacuaacuccgaacuccuaucccucaucaacgacaugccaauuaccaacgaccaaaagaaacuaaugucgaacaacguucaaaucguccgacaacaaaguuacuccaucaugagcauaaucaaagaagaaguucuagcguacgucguccaacucccacuauacggcgucaucgacacuccgugcuggaaacuccacacaucaccccuauguacaaccaacacaaaagaaggcagcaacaucugccucacccgcaccgaccgagggugguauugcgauaacgcuggcagcgucuccuucuucccccaagccgaaaccugcaaaguccaaucaaacagaguauucugcgacaccaugaacucccuuacucucccuagcgaagucaaccucugcaacguugacauauucaaccccaaauacgacugcaaaaucaugaccuccaagaccgacgucuccuccuccgucaucacaucucuaggugccauugucuccugcuacggaaaaaccaaaugcacagccuccaacaaaaaccgcggcaucauaaaaaccuucuccaacggcugcgacuacgucaguaauaaaggcgucgacacgguauccguugggaauacgcuuuacuacguaaauaaacaagaaggcaaaucccucuacgucaaaggugaacccaucauaaacuucuacgacccgcuuguguucccauccgacgaguucgacgccagcaucagccaggucaacgaaaagaucaaccaaucccuagccuucauccgcaaaagcgacgaacuacuacacaacgucaacgccggaaaauccacaaccaacaucaugaucaccaccaucaucaucgucaucaucguaauccuacucucucucaucgccgucggccuccuacuguacuguaaagcccgauagggacuaguaauaaggaaacuguaugaaugucugugggcaggaagugaagagauccuucuguaaagguuuuuggaauuaugucugcugaauaauaaacuuuuuugaaauaauaaaucugguagaaaaaugagaucuaaaaaaaaaaaaaaaaaaaaaaaaaaaaaaaaaaaaaaaaaaaaaaaaaaaaaaaaaaaaaaaaugcaucccccccccccccccccccccccccccccccaaaggcucuuuucagagccaccagaauu

SEQ ID NO: 817 - RNA, 2040 nt, Artificial Sequence
  mRNA product Design h-1 comprising derived and/or modified sequence from HRSV(A2)__F-del (artificial)
gggagacccgugacccggaaguuguacggcuacgcgacuuucccucccacaaacccucgcgcccuuccuuuccuacuugggcccggcagaaagcuuaccauggaguugcuaauccucaaagcaaaugcaauuaccacaauccucacugcagucacauuuuguuuugcuucuggucaaaacaucacugaagaauuuuaucaaucaacaugcagugcaguuagcaaaggcuaucuuagugcucugagaacugguugguauaccaguguuauaacuauagaauuaaguaauaucaaggaaaauaaguguaauggaacagaugcuaagguaaaauugauaaaacaagaauuagauaaauauaaaaaugcuguaacagaauugcaguugcucaugcaaagcacaccagcaacaaacaaucgagccagaagagaacuaccaagguuuaugaauuauacacucaacaaugccaaaaaaaccaauguaacauuaagcaagaaaaggaaaagaagauuucuugguuuuuuguuagguguuggaucugcaaucgccaguggcguugcuguaucuaagguccugcaccuagaaggggaagugaacaagaucaaaagugcucuacuauccacaaacaaggcuguagucagcuuaucaaauggaguuagugucuuaaccagcaaaguguuagaccucaaaaacuauauagauaaacaauuguuaccuauugugaacaagcaaagcugcagcauaucaaauauagaaacugugauagaguuccaacaaaagaacaacagacuacuagagauuaccagggaauuuaguguuaaugcagguguaacuacaccuguaagcacuuacauguuaacuaauagugaauuauugucauuaaucaaugauaugccuauaacaaaugaucagaaaaaguuaauguccaacaauguucaaauaguuagacagcaaaguuacucuaucauguccauaauaaaagaggaagucuuagcauauguaguacaauuaccacuauaugguguuauagauacacccuguuggaaacuacacacauccccucuauguacaaccaacacaaaagaaggguccaacaucuguuuaacaagaacugacagaggaugguacugugacaaugcaggaucaguaucuuucuucccacaagcugaaacauguaaaguucaaucaaaucgaguauuuugugacacaaugaacaguuuaacauuaccaagugaaguaaaucucugcaauguugacauauucaaccccaaauaugauuguaaaauuaugacuucaaaaacagauguaagcagcuccguuaucacaucucuaggagccauugugucaugcuauggcaaaacuaaauguacagcauccaauaaaaaucguggaaucauaaagacauuuucuaacgggugcgauuauguaucaaauaaagggguggacacugugucuguagguaacacauuauauuauguaaauaagcaagaagguaaaagucucuauguaaaaggugaaccaauaauaaauuucuaugacccauuaguauuccccucugaugaauuugaugcaucaauaucucaagucaacgagaagauuaaccagagccuagcauuuauucguaaauccgaugaauuauuacauaauguaaaugcugguaaauccaccacaaauaucaugauaacuacuauaauuauagugauuauaguaauauuguuaucauuaauugcuguuggacugcucuuauacuguaaggccagauaaggacuaguacuggcugcaucucccuuuccucuguccuccauccuucucccaggauggugaagggggaccugguacccagugauccccaccccaggauccuaaaucaugacuuaccugcuaauaaaaacucauuggaaaagugagaagaucuaaaaaaaaaaaaaaaaaaaaaaaaaaaaaaaaaaaaaaaaaaaaaaaaaaaaaaaaaaaaaaaaugcaucccccccccccccccccccccccccccccccaaaggcucuuuucagagccaccagaauu

SEQ ID NO: 818 - RNA, 2040 nt, Artificial Sequence
  mRNA product Design h-1 comprising derived and/or modified sequence from HRSV(A2)__F-del (opt1)
gggagacccgugacccggaaguuguacggcuacgcgacuuucccucccacaaacccucgcgcccuuccuuuccuacuugggcccggcagaaagcuuaccauggagcugcucauccugaaggccaacgccaucaccaccauccugacggcggugaccuucugcuucgccagcggccagaacaucaccgaggaguucuaccaguccaccugcagcgccgucuccaagggguaccucagcgcccugcggacgggcugguacaccuccgugaucaccaucgagcugagcaacaucaaggagaacaagugcaacgggaccgacgccaaggugaagcucaucaagcaggagcuggacaaguacaagaacgcggucacggagcugcagcuccugaugcaguccaccccggcaaccaacaaccgcgcccggcgcgagcugccccgguucaugaacuacacccucaacaacgccaagaagacgaacgugacccugagcaagaagcgcaagcggcgcuuccugggcuuccuccugggggugggcuccgccaucgcgagcggcgucgccguguccaaggugcugcaccucgagggggaggucaacaagaucaagagcgcccugcuguccaccaacaaggccguggugagccucuccaacggcgucagcgugcugaccuccaaggugcuggaccucaagaacuacaucgacaagcagcugcugcccaucgucaacaagcagagcugcuccaucagcaacaucgagacggugaucgaguuccagcagaagaacaaccggcuccuggagaucacccgcgaguucagcgugaacgccggggucaccacccccguguccacguacaugcugaccaacagcgagcuccugucccugaucaacgacaugccgaucaccaacgaccagaagaagcucaugagcaacaacgugcagaucguccggcagcaguccuacagcaucauguccaucaucaaggaggaggugcuggcguacgugguccagcugccccucuacggcgugaucgacacccccugcuggaagcugcacacgagcccccugugcaccaccaacaccaaggagggguccaacaucugccucacgcgcaccgaccggggcugguacugcgacaacgccggcagcgucuccuucuucccgcaggccgagaccugcaaggugcagagcaaccgcguguucugcgacaccaugaacucccugacgcugcccagcgagguaaaccucugcaacgucgacaucuucaaccccaaguacgacugcaagaucaugaccuccaagaccgacgugagcuccagcgugaucaccucccugggggccaucgucagcugcuacggcaagacgaagugcaccgccagcaacaagaaccgggggaucaucaagaccuucuccaacggcugcgacuacgugagcaacaagggcguggacaccguguccgucgggaacacccuguacuacgugaacaagcaggagggcaagagccucuacgugaagggggagcccaucaucaacuucuacgacccgcuggucuuccccuccgacgaguucgacgcgagcaucucccaggugaacgagaagaucaaccagagccuggccuucauccgcaaguccgacgagcugcuccacaacgugaacgccggcaagagcacgaccaacaucaugaucaccaccaucaucaucgucaucaucgugauccugcugucccucaucgccguggggcugcugcucuacugcaaggcccggugaggacuaguacuggcugcaucucccuuuccucuguccuccauccuucucccaggauggugaagggggaccugguacccagugauccccaccccaggauccuaaaucaugacuuaccugcuaauaaaaacucauuggaaaagugagaagaucuaaaaaaaaaaaaaaaaaaaaaaaaaaaaaaaaaaaaaaaaaaaaaaaaaaaaaaaaaaaaaaaaugcaucccccccccccccccccccccccccccccccaaaggcucuuuucagagccaccagaauu

SEQ ID NO: 819 - RNA, 2040 nt, Artificial Sequence
  mRNA product Design h-1 comprising derived and/or modified sequence from HRSV(A2)__F-del (opt1)
gggagacccgugacccggaaguuguacggcuacgcgacuuucccucccacaaacccucgcgcccuuccuuuccuacuugggcccggcagaaagcuuaccauggagcugcucauccugaaggccaacgccaucaccaccauccugacggcggugaccuucugcuucgccagcggccagaacaucaccgaggaguucuaccaguccacgugcagcgccgucuccaagggguaccucagcgcccugcgcaccggcugguacaccuccgugaucaccaucgagcugagcaacaucaaggagaacaagugcaacgggaccgacgccaaggugaagcucaucaagcaggagcuggacaaguacaagaacgcggucacggagcugcagcuccugaugcaguccacccccgccaccaacaaccgggcccgccgggagcugccgcgcuucaugaacuacacccucaacaacgccaagaagacgaacgugacccugagcaagaagcggaagcgccgguuccugggcuuccuccugggggugggcuccgcgaucgccagcggcgucgccguguccaaggugcugcaccucgagggggaggucaacaagaucaagagcgcccugcuguccaccaacaaggccguggugagccucuccaacggcgucagcgugcugaccuccaaggugcuggaccucaagaacuacaucgacaagcagcugcugcccaucgucaacaagcagagcugcuccaucagcaacaucgagacggugaucgaguuccagcagaagaacaaccgccuccuggagaucacccgggaguucagcgugaacgcgggggucaccacccccguguccacguacaugcugaccaacagcgagcuccugucccugaucaacgacaugcccaucaccaacgaccagaagaagcucaugagcaacaacgugcagaucguccgccagcaguccuacagcaucauguccaucaucaaggaggaggugcuggccuacgugguccagcugccgcucuacggcgugaucgacacccccugcuggaagcugcacacgagcccccugugcaccaccaacaccaaggagggguccaacaucugccucacgcggaccgaccgcggcugguacugcgacaacgccggcagcgucuccuucuucccccaggccgagaccugcaaggugcagagcaaccggguguucugcgacaccaugaacucccugacgcugccgagcgaggucaaccucugcaacguggacaucuucaaccccaaguacgacugcaagaucaugaccuccaagaccgacgugagcuccagcgucaucaccucccugggggccaucgugagcugcuacggcaagacgaagugcaccgcgagcaacaagaaccgcgggaucaucaagaccuucuccaacggcugcgacuacgugagcaacaagggcgucgacaccguguccguggggaacacccuguacuacgucaacaagcaggagggcaagagccucuacgugaagggggagcccaucaucaacuucuacgacccccugguguucccguccgacgaguucgacgccagcaucucccaggucaacgagaagaucaaccagagccuggccuucauccggaaguccgacgagcuccugcacaacgugaacgccggcaagagcacgaccaacaucaugaucaccaccaucaucaucgugaucaucgucauccugcugucccucaucgccguggggcugcugcucuacugcaaggcgcgcugaggacuaguacuggcugcaucucccuuuccucuguccuccauccuucucccaggauggugaagggggaccugguacccagugauccccaccccaggauccuaaaucaugacuuaccugcuaauaaaaacucauuggaaaagugagaagaucuaaaaaaaaaaaaaaaaaaaaaaaaaaaaaaaaaaaaaaaaaaaaaaaaaaaaaaaaaaaaaaaaugcaucccccccccccccccccccccccccccccccaaaggcucuuuucagagccaccagaauu

SEQ ID NO: 820 - RNA, 2040 nt, Artificial Sequence
  mRNA product Design h-1 comprising derived and/or modified sequence from HRSV(A2)__F-del (opt2)
gggagacccgugacccggaaguuguacggcuacgcgacuuucccucccacaaacccucgcgcccuuccuuuccuacuugggcccggcagaaagcuuaccauggagcuccucauccucaaggccaacgccaucaccaccauccucaccgccgucaccuucugcuucgccuccggccagaacaucaccgaggaguucuaccaguccaccugcuccgccgucuccaagggcuaccucuccgcccuccgcaccggcugguacaccuccgucaucaccaucgagcucuccaacaucaaggagaacaagugcaacggcaccgacgccaaggucaagcucaucaagcaggagcucgacaaguacaagaacgccgucaccgagcuccagcuccucaugcaguccacccccgccaccaacaaccgcgcccgccgcgagcucccccgcuucaugaacuacacccucaacaacgccaagaagaccaacgucacccucuccaagaagcgcaagcgccgcuuccucggcuuccuccucggcgucggcuccgccaucgccuccggcgucgccgucuccaagguccuccaccucgagggcgaggucaacaagaucaaguccgcccuccucuccaccaacaaggccgucgucucccucuccaacggcgucuccguccucaccuccaagguccucgaccucaagaacuacaucgacaagcagcuccuccccaucgucaacaagcaguccugcuccaucuccaacaucgagaccgucaucgaguuccagcagaagaacaaccgccuccucgagaucacccgcgaguucuccgucaacgccggcgucaccacccccgucuccaccuacaugcucaccaacuccgagcuccucucccucaucaacgacaugcccaucaccaacgaccagaagaagcucauguccaacaacguccagaucguccgccagcaguccuacuccaucauguccaucaucaaggaggagguccucgccuacgucguccagcucccccucuacggcgucaucgacacccccugcuggaagcuccacaccuccccccucugcaccaccaacaccaaggagggcuccaacaucugccucacccgcaccgaccgcggcugguacugcgacaacgccggcuccgucuccuucuucccccaggccgagaccugcaagguccaguccaaccgcgucuucugcgacaccaugaacucccucacccuccccuccgaggucaaccucugcaacgucgacaucuucaaccccaaguacgacugcaagaucaugaccuccaagaccgacgucuccuccuccgucaucaccucccucggcgccaucgucuccugcuacggcaagaccaagugcaccgccuccaacaagaaccgcggcaucaucaagaccuucuccaacggcugcgacuacgucuccaacaagggcgucgacaccgucuccgucggcaacacccucuacuacgucaacaagcaggagggcaagucccucuacgucaagggcgagcccaucaucaacuucuacgacccccucgucuuccccuccgacgaguucgacgccuccaucucccaggucaacgagaagaucaaccagucccucgccuucauccgcaaguccgacgagcuccuccacaacgucaacgccggcaaguccaccaccaacaucaugaucaccaccaucaucaucgucaucaucgucauccuccucucccucaucgccgucggccuccuccucuacugcaaggcccgcugaggacuaguacuggcugcaucucccuuuccucuguccuccauccuucucccaggauggugaagggggaccugguacccagugauccccaccccaggauccuaaaucaugacuuaccugcuaauaaaaacucauuggaaaagugagaagaucuaaaaaaaaaaaaaaaaaaaaaaaaaaaaaaaaaaaaaaaaaaaaaaaaaaaaaaaaaaaaaaaaugcaucccccccccccccccccccccccccccccccaaaggcucuuuucagagccaccagaauu

SEQ ID NO: 821 - RNA, 2040 nt, Artificial Sequence
  mRNA product Design h-1 comprising derived and/or modified sequence from HRSV(A2)__F-del (opt3)
gggagacccgugacccggaaguuguacggcuacgcgacuuucccucccacaaacccucgcgcccuuccuuuccuacuugggcccggcagaaagcuuaccauggagcugcucauccuuaaggccaacgcuauuaccacaauacugacugcagugacguucugcuuugccagcggccagaauaucaccgaagaguucuaccaauccacauguucugcggucucaaaaggguauuugagugcuuuaagaacuggaugguacaccagcguuauuacaaucgaacuguccaacauuaaggagaauaaaugcaacgguaccgacgccaaggugaaacuaaucaagcaggaacucgauaaguauaaaaaugcaguaacugagcugcagcuucugaugcagucuacacccgccaccaacaauagggcucggcgcgaguugccucgauuuaugaacuacacgcucaauaacgcaaagaaaacuaaugugacccugucgaagaaacguaagagaagguuccugggcuuucucuuaggggucggaucagccauagcuagcggcguggccguuaguaaggugcugcaccuugaaggugaggucaacaaaaucaaguccgcguugcugucuacaaauaaagcagugguaagccuauccaacgggguuucagugcucacuucuaagguccuggaccuuaaaaauuauauugauaagcaacuguugccaaucgugaacaaacagagcuguucuauuuccaacaucgaaaccgugauagaguuccagcagaagaauaaccggcuccuggagauuacacgcgaauuuucagucaaugccggaguuaccacgccggugagcacuuacauguuaacaaacagugagcugcucucucuuaucaaugacaugcccauuaccaacgaucaaaagaaacugauguccaauaacguacagaucgugagacagcagagcuauucgaucaugucuauuauaaaggaagaggucuuggcuuacgugguucaacuaccucuguacggcgugaucgacacuccaugcuggaaacuccauacauccccacuguguaccacgaauaccaaggaaggcucaaacauuugccuuacaaggacugaucgggggugguauugugacaaugccggaagugucagcuucuuuccucaggcagagaccugcaaagugcaguccaaccgcguauucugugauacaaugaauagucugacuuugccaagcgagguuaaccucugcaauguggacaucuuuaaccccaaguacgauuguaagauaaugaccucaaaaacagacgucaguuccagcgugauuaccucucugggugcuaucgucucaugcuauggcaagacuaaaugcacggccaguaacaagaaucgagggaucauuaaaacauucagcaacggaugugauuacguguccaauaagggcguugacaccgugucuguagguaacacuuuauauuacgucaauaagcaagaagggaaaucgcuguaugugaagggagagccuaucauuaacuuuuacgacccccuaguuuucccgagcgaugaauuugacgcguccauaucacaggugaaugagaaaaucaaccagagucucgccuucauuagaaagucugaugaacugcuucacaaugucaacgcaggcaaaagcaccacaaauaucaugaucaccacuauuauaaucgugauuaucguaauuuugcugucccucaucgcugugggccugcuucuguacugcaaggccaggugaggacuaguacuggcugcaucucccuuuccucuguccuccauccuucucccaggauggugaagggggaccugguacccagugauccccaccccaggauccuaaaucaugacuuaccugcuaauaaaaacucauuggaaaagugagaagaucuaaaaaaaaaaaaaaaaaaaaaaaaaaaaaaaaaaaaaaaaaaaaaaaaaaaaaaaaaaaaaaaaugcaucccccccccccccccccccccccccccccccaaaggcucuuuucagagccaccagaauu

SEQ ID NO: 822 - RNA, 2040 nt, Artificial Sequence
  mRNA product Design h-1 comprising derived and/or modified sequence from HRSV(A2)__F-del (opt4)
gggagacccgugacccggaaguuguacggcuacgcgacuuucccucccacaaacccucgcgcccuuccuuuccuacuugggcccggcagaaagcuuaccauggagcugcugauccugaaggccaacgccaucaccaccauccugaccgccgugaccuucugcuucgccagcggccagaacaucaccgaggaguucuaccagagcaccugcagcgccgugagcaagggcuaccugagcgcccugagaaccggcugguacaccagcgugaucaccaucgagcugagcaacaucaaggagaacaagugcaacggcaccgacgccaaggugaagcugaucaagcaggagcuggacaaguacaagaacgccgugaccgagcugcagcugcugaugcagagcacccccgccaccaacaacagagccagaagagagcugcccagauucaugaacuacacccugaacaacgccaagaagaccaacgugacccugagcaagaagagaaagagaagauuccugggcuuccugcugggcgugggcagcgccaucgccagcggcguggccgugagcaaggugcugcaccuggagggcgaggugaacaagaucaagagcgcccugcugagcaccaacaaggccguggugagccugagcaacggcgugagcgugcugaccagcaaggugcuggaccugaagaacuacaucgacaagcagcugcugcccaucgugaacaagcagagcugcagcaucagcaacaucgagaccgugaucgaguuccagcagaagaacaacagacugcuggagaucaccagagaguucagcgugaacgccggcgugaccacccccgugagcaccuacaugcugaccaacagcgagcugcugagccugaucaacgacaugcccaucaccaacgaccagaagaagcugaugagcaacaacgugcagaucgugagacagcagagcuacagcaucaugagcaucaucaaggaggaggugcuggccuacguggugcagcugccccuguacggcgugaucgacacccccugcuggaagcugcacaccagcccccugugcaccaccaacaccaaggagggcagcaacaucugccugaccagaaccgacagaggcugguacugcgacaacgccggcagcgugagcuucuucccccaggccgagaccugcaaggugcagagcaacagaguguucugcgacaccaugaacagccugacccugcccagcgaggugaaccugugcaacguggacaucuucaaccccaaguacgacugcaagaucaugaccagcaagaccgacgugagcagcagcgugaucaccagccugggcgccaucgugagcugcuacggcaagaccaagugcaccgccagcaacaagaacagaggcaucaucaagaccuucagcaacggcugcgacuacgugagcaacaagggcguggacaccgugagcgugggcaacacccuguacuacgugaacaagcaggagggcaagagccuguacgugaagggcgagcccaucaucaacuucuacgacccccugguguuccccagcgacgaguucgacgccagcaucagccaggugaacgagaagaucaaccagagccuggccuucaucagaaagagcgacgagcugcugcacaacgugaacgccggcaagagcaccaccaacaucaugaucaccaccaucaucaucgugaucaucgugauccugcugagccugaucgccgugggccugcugcuguacugcaaggccagaugaggacuaguacuggcugcaucucccuuuccucuguccuccauccuucucccaggauggugaagggggaccugguacccagugauccccaccccaggauccuaaaucaugacuuaccugcuaauaaaaacucauuggaaaagugagaagaucuaaaaaaaaaaaaaaaaaaaaaaaaaaaaaaaaaaaaaaaaaaaaaaaaaaaaaaaaaaaaaaaaugcaucccccccccccccccccccccccccccccccaaaggcucuuuucagagccaccagaauu

SEQ ID NO: 823 - RNA, 2040 nt, Artificial Sequence
  mRNA product Design h-1 comprising derived and/or modified sequence from HRSV(A2)__F-del (opt5)
gggagacccgugacccggaaguuguacggcuacgcgacuuucccucccacaaacccucgcgcccuuccuuuccuacuugggcccggcagaaagcuuaccauggagcugcucauccugaaggccaacgcuauuaccacaauccuuacggccgugaccuucugcuuugcgagcggccagaauauuacagaagaguucuaccaauccaccuguucugcugucagcaaaggguaucuguccgcccucagaacaggaugguacaccucuguuaucacaauugaacugagcaacaucaaggagaauaaaugcaacggcaccgacgccaaggugaaacuuaucaagcaggaacuggauaaguauaaaaaugcugugacggagcuccagcugcugaugcaguccacccccgccacaaacaaucgggcucgcagagagcucccucgguuuaugaacuacacccugaauaacgccaagaaaacaaaugucacccuuucuaagaaacgcaagagacgguuccugggguuucuccugggagugggcagcgcgauugccuccgggguugcugugagcaagguccuucaccuggaaggagaggugaacaaaaucaagucugcccuccuguccacgaauaaagcuguugugagccugucuaacggcgucuccgugcucacaagcaaggugcuggaccuuaaaaauuauauugauaagcaacugcucccgaucgucaacaaacagucuuguuccauuagcaacaucgaaaccguuauugaguuccagcagaagaauaaccgccugcuugagaucacaagagaauuuuccgugaaugccggcgugaccacccccgucucuacauacaugcugacgaacagcgagcuccugucccugaucaaugacaugccuauuaccaacgaucaaaagaaacucaugagcaauaacgugcagaucguucggcagcagucuuauuccauuaugagcaucauuaaggaagaggugcuggcguacgucgugcaacuuccccuguacgggguuaucgacacaccuugcuggaaacuccauaccucuccccuguguacaaccaauacgaaggaaggaagcaacaucugccuuacacgcaccgauagaggcugguauugugacaaugccggguccgugucuuucuuuccucaggcugagaccugcaaaguccagagcaaccggguguucugugauacaaugaacucccugacccucccgagcgaggucaaucugugcaauguggacauuuuuaaccccaaguacgauuguaagaucaugacaucuaaaacggacguuuccagcucugugauuaccucccugggagccaucgucagcugcuauggcaagacaaaaugcaccgcuuccaacaagaaucgcgggauuaucaaaacauucucuaacggaugugauuacgugagcaauaagggcguugacaccguguccgucggcaacacgcucuauuacgugaauaagcaagaagggaaaucucuguaugugaagggagagccuaucauuaacuuuuacgacccccuuguuuucccuagcgaugaauuugacgccuccaucagccaggucaaugagaaaauuaaccagucucuggccuucaucagaaaguccgaugaacuccugcacaaugugaacgcuggcaaaagcaccacaaauauuaugaucaccacaauuaucaucgugauuaucgucauucugcuuucucucaucgcgguggggcugcugcucuacugcaaggcccggugaggacuaguacuggcugcaucucccuuuccucuguccuccauccuucucccaggauggugaagggggaccugguacccagugauccccaccccaggauccuaaaucaugacuuaccugcuaauaaaaacucauuggaaaagugagaagaucuaaaaaaaaaaaaaaaaaaaaaaaaaaaaaaaaaaaaaaaaaaaaaaaaaaaaaaaaaaaaaaaaugcaucccccccccccccccccccccccccccccccaaaggcucuuuucagagccaccagaauu

SEQ ID NO: 824 - RNA, 2040 nt, Artificial Sequence
  mRNA product Design h-1 comprising derived and/or modified sequence from HRSV(A2)__F-del (opt6)
gggagacccgugacccggaaguuguacggcuacgcgacuuucccucccacaaacccucgcgcccuuccuuuccuacuugggcccggcagaaagcuuaccauggaauuacuaauacucaaagccaacgcaauaacaacaauacuaacagcaguaacauucugcuucgcaucaggacaaaacaucacagaagaauuuuaccaaaguacaugcagugcagucucuaaaggauaccucagugccuuacgcacaggaugguacacaucaguaauaacaaucgaacuuucaaacauaaaagaaaacaaaugcaauggaaccgacgccaaaguaaaacuaaucaaacaagaacuagacaaauauaaaaaugcaguaacagaauuacaacuccuaaugcaauccacaccagcaacaaauaacagagcaagacgagaacucccucgauucaugaauuacacauuaaacaacgcaaaaaaaacuaacguaacuuuaucaaaaaaaagaaaacguagauuucuaggauuccuacuaggcguaggguccgccauugcaucaggaguagcaguuagcaaaguauuacauuuagaaggagaaguaaauaaaaucaaaagcgcacuacucucaaccaacaaagcaguaguaucacucucaaacggaguaucaguacuaacauccaaaguacucgaccucaaaaacuacauagacaaacaauuacuacccauaguaaacaaacaaucaugcucuauaucaaauaucgaaacaguaaucgaauuucaacaaaaaaacaaucgacuacuugaaauaacaagagaguucuccgucaaugccggagucaccacaccagucucaacauacaugcuaaccaacucugaacuccuaucacuaauaaaugacaugccaauaacaaacgaccaaaaaaaacuaaugucaaauaacguacaaauaguacgacaacaaaguuauuccauaaugaguauaaucaaagaagaaguguuagcauacguaguccaacuaccauuauauggaguaauagacacaccauguuggaaauuacacaccucaccacucugcacuaccaauacaaaagaaggcucaaauauaugccuaacucgcacagacagaggcugguacugcgauaacgcaggauccguaucuuucuuuccccaagcagaaacuugcaaaguacaaucaaacagagucuucugcgacaccaugaauagucucacauuaccaucugaaguaaaccuauguaacguagauauauucaauccaaaauacgacugcaaaauaaugacaucaaaaaccgacgucucuagcaguguaaucacaucacuaggagcaauaguaagcugcuauggaaaaacaaaauguacagcaucaaacaaaaacaggggaauaauaaaaaccuucucaaacggaugugacuacguaucaaauaaaggcguagacacaguaagcguaggaaacacccuauacuacguuaacaaacaagaagggaaaucauuauacguaaaaggagaaccaauaauaaacuucuacgauccacucguauucccauccgacgaauuugacgccagcauaucccaaguuaacgaaaaaauaaaccaaucacuugcauuuauacgaaaaucugaugaacuucuccacaacguaaaugcaggaaaauccaccaccaauauaaugaucacaacuaucaucauaguaauaaucgucauuuuacuaucauuaauagcaguuggccuacuucuauacugcaaagcaagauaaggacuaguacuggcugcaucucccuuuccucuguccuccauccuucucccaggauggugaagggggaccugguacccagugauccccaccccaggauccuaaaucaugacuuaccugcuaauaaaaacucauuggaaaagugagaagaucuaaaaaaaaaaaaaaaaaaaaaaaaaaaaaaaaaaaaaaaaaaaaaaaaaaaaaaaaaaaaaaaaugcaucccccccccccccccccccccccccccccccaaaggcucuuuucagagccaccagaauu

SEQ ID NO: 825 - RNA, 2040 nt, Artificial Sequence
  mRNA product Design h-1 comprising derived and/or modified sequence from HRSV(A2)__F-del (opt11)
gggagacccgugacccggaaguuguacggcuacgcgacuuucccucccacaaacccucgcgcccuuccuuuccuacuugggcccggcagaaagcuuaccauggaacuacuaauccuaaaagccaacgcgaucaccaccauccuaacggcagucaccuucugcuucgcaucaggccaaaacaucacagaagaguucuaccaaagcacaugcuccgccguauccaaaggcuaccucagcgcccuacgcacaggcugguacacaucugucaucaccauagaacucuccaacaucaaagaaaacaaaugcaacggcacugacgccaaaguaaagcugaucaaacaagaacucgacaaauacaaaaacgcagucaccgaacuccaacuacucaugcaauccaccccugcaaccaacaacagggcccgccgcgaacucccccgcuucaugaacuacacuuuaaacaacgccaaaaagaccaacgucacacucagcaagaaacggaaacgacgauuccuaggguuucuccuaggcgucggcucggcaaucgccuccggcgucgccguaagcaaaguacuacaccuagaaggcgaagugaacaaaaucaaaagugcccuucucuccaccaacaaggccguagucucucuauccaacggagucucaguccucaccucaaagguccucgaccucaaaaacuacaucgacaaacaacuacuccccauugucaacaagcagucaugcuccauaucaaacaucgaaaccgucaucgaguuccaacagaaaaacaaccgacuccucgaaauaaccagagaguucucggucaacgccggcgucaccaccccagucagcaccuacaugcucacuaacuccgaacuccuaucccucaucaacgacaugccaauuaccaacgaccaaaagaaacuaaugucgaacaacguucaaaucguccgacaacaaaguuacuccaucaugagcauaaucaaagaagaaguucuagcguacgucguccaacucccacuauacggcgucaucgacacuccgugcuggaaacuccacacaucaccccuauguacaaccaacacaaaagaaggcagcaacaucugccucacccgcaccgaccgagggugguauugcgauaacgcuggcagcgucuccuucuucccccaagccgaaaccugcaaaguccaaucaaacagaguauucugcgacaccaugaacucccuuacucucccuagcgaagucaaccucugcaacguugacauauucaaccccaaauacgacugcaaaaucaugaccuccaagaccgacgucuccuccuccgucaucacaucucuaggugccauugucuccugcuacggaaaaaccaaaugcacagccuccaacaaaaaccgcggcaucauaaaaaccuucuccaacggcugcgacuacgucaguaauaaaggcgucgacacgguauccguugggaauacgcuuuacuacguaaauaaacaagaaggcaaaucccucuacgucaaaggugaacccaucauaaacuucuacgacccgcuuguguucccauccgacgaguucgacgccagcaucagccaggucaacgaaaagaucaaccaaucccuagccuucauccgcaaaagcgacgaacuacuacacaacgucaacgccggaaaauccacaaccaacaucaugaucaccaccaucaucaucgucaucaucguaauccuacucucucucaucgccgucggccuccuacuguacuguaaagcccgauagggacuaguacuggcugcaucucccuuuccucuguccuccauccuucucccaggauggugaagggggaccugguacccagugauccccaccccaggauccuaaaucaugacuuaccugcuaauaaaaacucauuggaaaagugagaagaucuaaaaaaaaaaaaaaaaaaaaaaaaaaaaaaaaaaaaaaaaaaaaaaaaaaaaaaaaaaaaaaaaugcaucccccccccccccccccccccccccccccccaaaggcucuuuucagagccaccagaauu

SEQ ID NO: 826 - RNA, 2256 nt, Artificial Sequence
  mRNA product Design h-2 comprising derived and/or modified sequence from HRSV(A2)__F-del (artificial)
gggagacccgugacccggaaguuguacggcuacgcgacuuucccucccacaaacccucgcgcccuuccuuuccuacuugggcccggcagaaagcuuaccauggaguugcuaauccucaaagcaaaugcaauuaccacaauccucacugcagucacauuuuguuuugcuucuggucaaaacaucacugaagaauuuuaucaaucaacaugcagugcaguuagcaaaggcuaucuuagugcucugagaacugguugguauaccaguguuauaacuauagaauuaaguaauaucaaggaaaauaaguguaauggaacagaugcuaagguaaaauugauaaaacaagaauuagauaaauauaaaaaugcuguaacagaauugcaguugcucaugcaaagcacaccagcaacaaacaaucgagccagaagagaacuaccaagguuuaugaauuauacacucaacaaugccaaaaaaaccaauguaacauuaagcaagaaaaggaaaagaagauuucuugguuuuuuguuagguguuggaucugcaaucgccaguggcguugcuguaucuaagguccugcaccuagaaggggaagugaacaagaucaaaagugcucuacuauccacaaacaaggcuguagucagcuuaucaaauggaguuagugucuuaaccagcaaaguguuagaccucaaaaacuauauagauaaacaauuguuaccuauugugaacaagcaaagcugcagcauaucaaauauagaaacugugauagaguuccaacaaaagaacaacagacuacuagagauuaccagggaauuuaguguuaaugcagguguaacuacaccuguaagcacuuacauguuaacuaauagugaauuauugucauuaaucaaugauaugccuauaacaaaugaucagaaaaaguuaauguccaacaauguucaaauaguuagacagcaaaguuacucuaucauguccauaauaaaagaggaagucuuagcauauguaguacaauuaccacuauaugguguuauagauacacccuguuggaaacuacacacauccccucuauguacaaccaacacaaaagaaggguccaacaucuguuuaacaagaacugacagaggaugguacugugacaaugcaggaucaguaucuuucuucccacaagcugaaacauguaaaguucaaucaaaucgaguauuuugugacacaaugaacaguuuaacauuaccaagugaaguaaaucucugcaauguugacauauucaaccccaaauaugauuguaaaauuaugacuucaaaaacagauguaagcagcuccguuaucacaucucuaggagccauugugucaugcuauggcaaaacuaaauguacagcauccaauaaaaaucguggaaucauaaagacauuuucuaacgggugcgauuauguaucaaauaaagggguggacacugugucuguagguaacacauuauauuauguaaauaagcaagaagguaaaagucucuauguaaaaggugaaccaauaauaaauuucuaugacccauuaguauuccccucugaugaauuugaugcaucaauaucucaagucaacgagaagauuaaccagagccuagcauuuauucguaaauccgaugaauuauuacauaauguaaaugcugguaaauccaccacaaauaucaugauaacuacuauaauuauagugauuauaguaauauuguuaucauuaauugcuguuggacugcucuuauacuguaaggccagauaaggacuagugaagggaacacccaaauuuaauucagccuuaagcacaauuaauuaagagugaaacguaauuguacaagcaguuggucacccaccauagggcaugaucaacaccgcaaccuuuccuuuuucccccagugauucugaaaaaccccucuucccuucagcuugcuuagauguuccaaauuuaguaagcuuaaggcggccuacagaagaaaaagaaaaaaaaggccacaaaaguucccucucacuuucaguaaauaaaauaaaagcagcaacagaaauaaagaaauaaaugaaauucaaaaugaaauaaauauuguguugugcagcauuaaaaaaucaauaaaaauuaaaaaugagcaagaucuaaaaaaaaaaaaaaaaaaaaaaaaaaaaaaaaaaaaaaaaaaaaaaaaaaaaaaaaaaaaaaaaugcaucccccccccccccccccccccccccccccccaaaggcucuuuucagagccaccagaauu

SEQ ID NO: 827 - RNA, 2256 nt, Artificial Sequence
  mRNA product Design h-2 comprising derived and/or modified sequence from HRSV(A2)__F-del (opt1)
gggagacccgugacccggaaguuguacggcuacgcgacuuucccucccacaaacccucgcgcccuuccuuuccuacuugggcccggcagaaagcuuaccauggagcugcucauccugaaggccaacgccaucaccaccauccugacggcggugaccuucugcuucgccagcggccagaacaucaccgaggaguucuaccaguccaccugcagcgccgucuccaagggguaccucagcgcccugcggacgggcugguacaccuccgugaucaccaucgagcugagcaacaucaaggagaacaagugcaacgggaccgacgccaaggugaagcucaucaagcaggagcuggacaaguacaagaacgcggucacggagcugcagcuccugaugcaguccaccccggcaaccaacaaccgcgcccggcgcgagcugccccgguucaugaacuacacccucaacaacgccaagaagacgaacgugacccugagcaagaagcgcaagcggcgcuuccugggcuuccuccugggggugggcuccgccaucgcgagcggcgucgccguguccaaggugcugcaccucgagggggaggucaacaagaucaagagcgcccugcuguccaccaacaaggccguggugagccucuccaacggcgucagcgugcugaccuccaaggugcuggaccucaagaacuacaucgacaagcagcugcugcccaucgucaacaagcagagcugcuccaucagcaacaucgagacggugaucgaguuccagcagaagaacaaccggcuccuggagaucacccgcgaguucagcgugaacgccggggucaccacccccguguccacguacaugcugaccaacagcgagcuccugucccugaucaacgacaugccgaucaccaacgaccagaagaagcucaugagcaacaacgugcagaucguccggcagcaguccuacagcaucauguccaucaucaaggaggaggugcuggcguacgugguccagcugccccucuacggcgugaucgacacccccugcuggaagcugcacacgagcccccugugcaccaccaacaccaaggagggguccaacaucugccucacgcgcaccgaccggggcugguacugcgacaacgccggcagcgucuccuucuucccgcaggccgagaccugcaaggugcagagcaaccgcguguucugcgacaccaugaacucccugacgcugcccagcgagguaaaccucugcaacgucgacaucuucaaccccaaguacgacugcaagaucaugaccuccaagaccgacgugagcuccagcgugaucaccucccugggggccaucgucagcugcuacggcaagacgaagugcaccgccagcaacaagaaccgggggaucaucaagaccuucuccaacggcugcgacuacgugagcaacaagggcguggacaccguguccgucgggaacacccuguacuacgugaacaagcaggagggcaagagccucuacgugaagggggagcccaucaucaacuucuacgacccgcuggucuuccccuccgacgaguucgacgcgagcaucucccaggugaacgagaagaucaaccagagccuggccuucauccgcaaguccgacgagcugcuccacaacgugaacgccggcaagagcacgaccaacaucaugaucaccaccaucaucaucgucaucaucgugauccugcugucccucaucgccguggggcugcugcucuacugcaaggcccggugaggacuagugaagggaacacccaaauuuaauucagccuuaagcacaauuaauuaagagugaaacguaauuguacaagcaguuggucacccaccauagggcaugaucaacaccgcaaccuuuccuuuuucccccagugauucugaaaaaccccucuucccuucagcuugcuuagauguuccaaauuuaguaagcuuaaggcggccuacagaagaaaaagaaaaaaaaggccacaaaaguucccucucacuuucaguaaauaaaauaaaagcagcaacagaaauaaagaaauaaaugaaauucaaaaugaaauaaauauuguguugugcagcauuaaaaaaucaauaaaaauuaaaaaugagcaagaucuaaaaaaaaaaaaaaaaaaaaaaaaaaaaaaaaaaaaaaaaaaaaaaaaaaaaaaaaaaaaaaaaugcaucccccccccccccccccccccccccccccccaaaggcucuuuucagagccaccagaauu

SEQ ID NO: 828 - RNA, 2256 nt, Artificial Sequence
  mRNA product Design h-2 comprising derived and/or modified sequence from HRSV(A2)__F-del (opt1)
gggagacccgugacccggaaguuguacggcuacgcgacuuucccucccacaaacccucgcgcccuuccuuuccuacuugggcccggcagaaagcuuaccauggagcugcucauccugaaggccaacgccaucaccaccauccugacggcggugaccuucugcuucgccagcggccagaacaucaccgaggaguucuaccaguccacgugcagcgccgucuccaagggguaccucagcgcccugcgcaccggcugguacaccuccgugaucaccaucgagcugagcaacaucaaggagaacaagugcaacgggaccgacgccaaggugaagcucaucaagcaggagcuggacaaguacaagaacgcggucacggagcugcagcuccugaugcaguccacccccgccaccaacaaccgggcccgccgggagcugccgcgcuucaugaacuacacccucaacaacgccaagaagacgaacgugacccugagcaagaagcggaagcgccgguuccugggcuuccuccugggggugggcuccgcgaucgccagcggcgucgccguguccaaggugcugcaccucgagggggaggucaacaagaucaagagcgcccugcuguccaccaacaaggccguggugagccucuccaacggcgucagcgugcugaccuccaaggugcuggaccucaagaacuacaucgacaagcagcugcugcccaucgucaacaagcagagcugcuccaucagcaacaucgagacggugaucgaguuccagcagaagaacaaccgccuccuggagaucacccgggaguucagcgugaacgcgggggucaccacccccguguccacguacaugcugaccaacagcgagcuccugucccugaucaacgacaugcccaucaccaacgaccagaagaagcucaugagcaacaacgugcagaucguccgccagcaguccuacagcaucauguccaucaucaaggaggaggugcuggccuacgugguccagcugccgcucuacggcgugaucgacacccccugcuggaagcugcacacgagcccccugugcaccaccaacaccaaggagggguccaacaucugccucacgcggaccgaccgcggcugguacugcgacaacgccggcagcgucuccuucuucccccaggccgagaccugcaaggugcagagcaaccggguguucugcgacaccaugaacucccugacgcugccgagcgaggucaaccucugcaacguggacaucuucaaccccaaguacgacugcaagaucaugaccuccaagaccgacgugagcuccagcgucaucaccucccugggggccaucgugagcugcuacggcaagacgaagugcaccgcgagcaacaagaaccgcgggaucaucaagaccuucuccaacggcugcgacuacgugagcaacaagggcgucgacaccguguccguggggaacacccuguacuacgucaacaagcaggagggcaagagccucuacgugaagggggagcccaucaucaacuucuacgacccccugguguucccguccgacgaguucgacgccagcaucucccaggucaacgagaagaucaaccagagccuggccuucauccggaaguccgacgagcuccugcacaacgugaacgccggcaagagcacgaccaacaucaugaucaccaccaucaucaucgugaucaucgucauccugcugucccucaucgccguggggcugcugcucuacugcaaggcgcgcugaggacuagugaagggaacacccaaauuuaauucagccuuaagcacaauuaauuaagagugaaacguaauuguacaagcaguuggucacccaccauagggcaugaucaacaccgcaaccuuuccuuuuucccccagugauucugaaaaaccccucuucccuucagcuugcuuagauguuccaaauuuaguaagcuuaaggcggccuacagaagaaaaagaaaaaaaaggccacaaaaguucccucucacuuucaguaaauaaaauaaaagcagcaacagaaauaaagaaauaaaugaaauucaaaaugaaauaaauauuguguugugcagcauuaaaaaaucaauaaaaauuaaaaaugagcaagaucuaaaaaaaaaaaaaaaaaaaaaaaaaaaaaaaaaaaaaaaaaaaaaaaaaaaaaaaaaaaaaaaaugcaucccccccccccccccccccccccccccccccaaaggcucuuuucagagccaccagaauu

SEQ ID NO: 829 - RNA, 2256 nt, Artificial Sequence
  mRNA product Design h-2 comprising derived and/or modified sequence from HRSV(A2)__F-del (opt2)
gggagacccgugacccggaaguuguacggcuacgcgacuuucccucccacaaacccucgcgcccuuccuuuccuacuugggcccggcagaaagcuuaccauggagcuccucauccucaaggccaacgccaucaccaccauccucaccgccgucaccuucugcuucgccuccggccagaacaucaccgaggaguucuaccaguccaccugcuccgccgucuccaagggcuaccucuccgcccuccgcaccggcugguacaccuccgucaucaccaucgagcucuccaacaucaaggagaacaagugcaacggcaccgacgccaaggucaagcucaucaagcaggagcucgacaaguacaagaacgccgucaccgagcuccagcuccucaugcaguccacccccgccaccaacaaccgcgcccgccgcgagcucccccgcuucaugaacuacacccucaacaacgccaagaagaccaacgucacccucuccaagaagcgcaagcgccgcuuccucggcuuccuccucggcgucggcuccgccaucgccuccggcgucgccgucuccaagguccuccaccucgagggcgaggucaacaagaucaaguccgcccuccucuccaccaacaaggccgucgucucccucuccaacggcgucuccguccucaccuccaagguccucgaccucaagaacuacaucgacaagcagcuccuccccaucgucaacaagcaguccugcuccaucuccaacaucgagaccgucaucgaguuccagcagaagaacaaccgccuccucgagaucacccgcgaguucuccgucaacgccggcgucaccacccccgucuccaccuacaugcucaccaacuccgagcuccucucccucaucaacgacaugcccaucaccaacgaccagaagaagcucauguccaacaacguccagaucguccgccagcaguccuacuccaucauguccaucaucaaggaggagguccucgccuacgucguccagcucccccucuacggcgucaucgacacccccugcuggaagcuccacaccuccccccucugcaccaccaacaccaaggagggcuccaacaucugccucacccgcaccgaccgcggcugguacugcgacaacgccggcuccgucuccuucuucccccaggccgagaccugcaagguccaguccaaccgcgucuucugcgacaccaugaacucccucacccuccccuccgaggucaaccucugcaacgucgacaucuucaaccccaaguacgacugcaagaucaugaccuccaagaccgacgucuccuccuccgucaucaccucccucggcgccaucgucuccugcuacggcaagaccaagugcaccgccuccaacaagaaccgcggcaucaucaagaccuucuccaacggcugcgacuacgucuccaacaagggcgucgacaccgucuccgucggcaacacccucuacuacgucaacaagcaggagggcaagucccucuacgucaagggcgagcccaucaucaacuucuacgacccccucgucuuccccuccgacgaguucgacgccuccaucucccaggucaacgagaagaucaaccagucccucgccuucauccgcaaguccgacgagcuccuccacaacgucaacgccggcaaguccaccaccaacaucaugaucaccaccaucaucaucgucaucaucgucauccuccucucccucaucgccgucggccuccuccucuacugcaaggcccgcugaggacuagugaagggaacacccaaauuuaauucagccuuaagcacaauuaauuaagagugaaacguaauuguacaagcaguuggucacccaccauagggcaugaucaacaccgcaaccuuuccuuuuucccccagugauucugaaaaaccccucuucccuucagcuugcuuagauguuccaaauuuaguaagcuuaaggcggccuacagaagaaaaagaaaaaaaaggccacaaaaguucccucucacuuucaguaaauaaaauaaaagcagcaacagaaauaaagaaauaaaugaaauucaaaaugaaauaaauauuguguugugcagcauuaaaaaaucaauaaaaauuaaaaaugagcaagaucuaaaaaaaaaaaaaaaaaaaaaaaaaaaaaaaaaaaaaaaaaaaaaaaaaaaaaaaaaaaaaaaaugcaucccccccccccccccccccccccccccccccaaaggcucuuuucagagccaccagaauu

SEQ ID NO: 830 - RNA, 2256 nt, Artificial Sequence
  mRNA product Design h-2 comprising derived and/or modified sequence from HRSV(A2)__F-del (opt3)
gggagacccgugacccggaaguuguacggcuacgcgacuuucccucccacaaacccucgcgcccuuccuuuccuacuugggcccggcagaaagcuuaccauggagcugcucauccuuaaggccaacgcuauuaccacaauacugacugcagugacguucugcuuugccagcggccagaauaucaccgaagaguucuaccaauccacauguucugcggucucaaaaggguauuugagugcuuuaagaacuggaugguacaccagcguuauuacaaucgaacuguccaacauuaaggagaauaaaugcaacgguaccgacgccaaggugaaacuaaucaagcaggaacucgauaaguauaaaaaugcaguaacugagcugcagcuucugaugcagucuacacccgccaccaacaauagggcucggcgcgaguugccucgauuuaugaacuacacgcucaauaacgcaaagaaaacuaaugugacccugucgaagaaacguaagagaagguuccugggcuuucucuuaggggucggaucagccauagcuagcggcguggccguuaguaaggugcugcaccuugaaggugaggucaacaaaaucaaguccgcguugcugucuacaaauaaagcagugguaagccuauccaacgggguuucagugcucacuucuaagguccuggaccuuaaaaauuauauugauaagcaacuguugccaaucgugaacaaacagagcuguucuauuuccaacaucgaaaccgugauagaguuccagcagaagaauaaccggcuccuggagauuacacgcgaauuuucagucaaugccggaguuaccacgccggugagcacuuacauguuaacaaacagugagcugcucucucuuaucaaugacaugcccauuaccaacgaucaaaagaaacugauguccaauaacguacagaucgugagacagcagagcuauucgaucaugucuauuauaaaggaagaggucuuggcuuacgugguucaacuaccucuguacggcgugaucgacacuccaugcuggaaacuccauacauccccacuguguaccacgaauaccaaggaaggcucaaacauuugccuuacaaggacugaucgggggugguauugugacaaugccggaagugucagcuucuuuccucaggcagagaccugcaaagugcaguccaaccgcguauucugugauacaaugaauagucugacuuugccaagcgagguuaaccucugcaauguggacaucuuuaaccccaaguacgauuguaagauaaugaccucaaaaacagacgucaguuccagcgugauuaccucucugggugcuaucgucucaugcuauggcaagacuaaaugcacggccaguaacaagaaucgagggaucauuaaaacauucagcaacggaugugauuacguguccaauaagggcguugacaccgugucuguagguaacacuuuauauuacgucaauaagcaagaagggaaaucgcuguaugugaagggagagccuaucauuaacuuuuacgacccccuaguuuucccgagcgaugaauuugacgcguccauaucacaggugaaugagaaaaucaaccagagucucgccuucauuagaaagucugaugaacugcuucacaaugucaacgcaggcaaaagcaccacaaauaucaugaucaccacuauuauaaucgugauuaucguaauuuugcugucccucaucgcugugggccugcuucuguacugcaaggccaggugaggacuagugaagggaacacccaaauuuaauucagccuuaagcacaauuaauuaagagugaaacguaauuguacaagcaguuggucacccaccauagggcaugaucaacaccgcaaccuuuccuuuuucccccagugauucugaaaaaccccucuucccuucagcuugcuuagauguuccaaauuuaguaagcuuaaggcggccuacagaagaaaaagaaaaaaaaggccacaaaaguucccucucacuuucaguaaauaaaauaaaagcagcaacagaaauaaagaaauaaaugaaauucaaaaugaaauaaauauuguguugugcagcauuaaaaaaucaauaaaaauuaaaaaugagcaagaucuaaaaaaaaaaaaaaaaaaaaaaaaaaaaaaaaaaaaaaaaaaaaaaaaaaaaaaaaaaaaaaaaugcaucccccccccccccccccccccccccccccccaaaggcucuuuucagagccaccagaauu

SEQ ID NO: 831 - RNA, 2256 nt, Artificial Sequence
  mRNA product Design h-2 comprising derived and/or modified sequence from HRSV(A2)__F-del (opt4)
gggagacccgugacccggaaguuguacggcuacgcgacuuucccucccacaaacccucgcgcccuuccuuuccuacuugggcccggcagaaagcuuaccauggagcugcugauccugaaggccaacgccaucaccaccauccugaccgccgugaccuucugcuucgccagcggccagaacaucaccgaggaguucuaccagagcaccugcagcgccgugagcaagggcuaccugagcgcccugagaaccggcugguacaccagcgugaucaccaucgagcugagcaacaucaaggagaacaagugcaacggcaccgacgccaaggugaagcugaucaagcaggagcuggacaaguacaagaacgccgugaccgagcugcagcugcugaugcagagcacccccgccaccaacaacagagccagaagagagcugcccagauucaugaacuacacccugaacaacgccaagaagaccaacgugacccugagcaagaagagaaagagaagauuccugggcuuccugcugggcgugggcagcgccaucgccagcggcguggccgugagcaaggugcugcaccuggagggcgaggugaacaagaucaagagcgcccugcugagcaccaacaaggccguggugagccugagcaacggcgugagcgugcugaccagcaaggugcuggaccugaagaacuacaucgacaagcagcugcugcccaucgugaacaagcagagcugcagcaucagcaacaucgagaccgugaucgaguuccagcagaagaacaacagacugcuggagaucaccagagaguucagcgugaacgccggcgugaccacccccgugagcaccuacaugcugaccaacagcgagcugcugagccugaucaacgacaugcccaucaccaacgaccagaagaagcugaugagcaacaacgugcagaucgugagacagcagagcuacagcaucaugagcaucaucaaggaggaggugcuggccuacguggugcagcugccccuguacggcgugaucgacacccccugcuggaagcugcacaccagcccccugugcaccaccaacaccaaggagggcagcaacaucugccugaccagaaccgacagaggcugguacugcgacaacgccggcagcgugagcuucuucccccaggccgagaccugcaaggugcagagcaacagaguguucugcgacaccaugaacagccugacccugcccagcgaggugaaccugugcaacguggacaucuucaaccccaaguacgacugcaagaucaugaccagcaagaccgacgugagcagcagcgugaucaccagccugggcgccaucgugagcugcuacggcaagaccaagugcaccgccagcaacaagaacagaggcaucaucaagaccuucagcaacggcugcgacuacgugagcaacaagggcguggacaccgugagcgugggcaacacccuguacuacgugaacaagcaggagggcaagagccuguacgugaagggcgagcccaucaucaacuucuacgacccccugguguuccccagcgacgaguucgacgccagcaucagccaggugaacgagaagaucaaccagagccuggccuucaucagaaagagcgacgagcugcugcacaacgugaacgccggcaagagcaccaccaacaucaugaucaccaccaucaucaucgugaucaucgugauccugcugagccugaucgccgugggccugcugcuguacugcaaggccagaugaggacuagugaagggaacacccaaauuuaauucagccuuaagcacaauuaauuaagagugaaacguaauuguacaagcaguuggucacccaccauagggcaugaucaacaccgcaaccuuuccuuuuucccccagugauucugaaaaaccccucuucccuucagcuugcuuagauguuccaaauuuaguaagcuuaaggcggccuacagaagaaaaagaaaaaaaaggccacaaaaguucccucucacuuucaguaaauaaaauaaaagcagcaacagaaauaaagaaauaaaugaaauucaaaaugaaauaaauauuguguugugcagcauuaaaaaaucaauaaaaauuaaaaaugagcaagaucuaaaaaaaaaaaaaaaaaaaaaaaaaaaaaaaaaaaaaaaaaaaaaaaaaaaaaaaaaaaaaaaaugcaucccccccccccccccccccccccccccccccaaaggcucuuuucagagccaccagaauu

SEQ ID NO: 832 - RNA, 2256 nt, Artificial Sequence
  mRNA product Design h-2 comprising derived and/or modified sequence from HRSV(A2)__F-del (opt5)
gggagacccgugacccggaaguuguacggcuacgcgacuuucccucccacaaacccucgcgcccuuccuuuccuacuugggcccggcagaaagcuuaccauggagcugcucauccugaaggccaacgcuauuaccacaauccuuacggccgugaccuucugcuuugcgagcggccagaauauuacagaagaguucuaccaauccaccuguucugcugucagcaaaggguaucuguccgcccucagaacaggaugguacaccucuguuaucacaauugaacugagcaacaucaaggagaauaaaugcaacggcaccgacgccaaggugaaacuuaucaagcaggaacuggauaaguauaaaaaugcugugacggagcuccagcugcugaugcaguccacccccgccacaaacaaucgggcucgcagagagcucccucgguuuaugaacuacacccugaauaacgccaagaaaacaaaugucacccuuucuaagaaacgcaagagacgguuccugggguuucuccugggagugggcagcgcgauugccuccgggguugcugugagcaagguccuucaccuggaaggagaggugaacaaaaucaagucugcccuccuguccacgaauaaagcuguugugagccugucuaacggcgucuccgugcucacaagcaaggugcuggaccuuaaaaauuauauugauaagcaacugcucccgaucgucaacaaacagucuuguuccauuagcaacaucgaaaccguuauugaguuccagcagaagaauaaccgccugcuugagaucacaagagaauuuuccgugaaugccggcgugaccacccccgucucuacauacaugcugacgaacagcgagcuccugucccugaucaaugacaugccuauuaccaacgaucaaaagaaacucaugagcaauaacgugcagaucguucggcagcagucuuauuccauuaugagcaucauuaaggaagaggugcuggcguacgucgugcaacuuccccuguacgggguuaucgacacaccuugcuggaaacuccauaccucuccccuguguacaaccaauacgaaggaaggaagcaacaucugccuuacacgcaccgauagaggcugguauugugacaaugccggguccgugucuuucuuuccucaggcugagaccugcaaaguccagagcaaccggguguucugugauacaaugaacucccugacccucccgagcgaggucaaucugugcaauguggacauuuuuaaccccaaguacgauuguaagaucaugacaucuaaaacggacguuuccagcucugugauuaccucccugggagccaucgucagcugcuauggcaagacaaaaugcaccgcuuccaacaagaaucgcgggauuaucaaaacauucucuaacggaugugauuacgugagcaauaagggcguugacaccguguccgucggcaacacgcucuauuacgugaauaagcaagaagggaaaucucuguaugugaagggagagccuaucauuaacuuuuacgacccccuuguuuucccuagcgaugaauuugacgccuccaucagccaggucaaugagaaaauuaaccagucucuggccuucaucagaaaguccgaugaacuccugcacaaugugaacgcuggcaaaagcaccacaaauauuaugaucaccacaauuaucaucgugauuaucgucauucugcuuucucucaucgcgguggggcugcugcucuacugcaaggcccggugaggacuagugaagggaacacccaaauuuaauucagccuuaagcacaauuaauuaagagugaaacguaauuguacaagcaguuggucacccaccauagggcaugaucaacaccgcaaccuuuccuuuuucccccagugauucugaaaaaccccucuucccuucagcuugcuuagauguuccaaauuuaguaagcuuaaggcggccuacagaagaaaaagaaaaaaaaggccacaaaaguucccucucacuuucaguaaauaaaauaaaagcagcaacagaaauaaagaaauaaaugaaauucaaaaugaaauaaauauuguguugugcagcauuaaaaaaucaauaaaaauuaaaaaugagcaagaucuaaaaaaaaaaaaaaaaaaaaaaaaaaaaaaaaaaaaaaaaaaaaaaaaaaaaaaaaaaaaaaaaugcaucccccccccccccccccccccccccccccccaaaggcucuuuucagagccaccagaauu

SEQ ID NO: 833 - RNA, 2256 nt, Artificial Sequence
  mRNA product Design h-2 comprising derived and/or modified sequence from HRSV(A2)__F-del (opt6)
gggagacccgugacccggaaguuguacggcuacgcgacuuucccucccacaaacccucgcgcccuuccuuuccuacuugggcccggcagaaagcuuaccauggaauuacuaauacucaaagccaacgcaauaacaacaauacuaacagcaguaacauucugcuucgcaucaggacaaaacaucacagaagaauuuuaccaaaguacaugcagugcagucucuaaaggauaccucagugccuuacgcacaggaugguacacaucaguaauaacaaucgaacuuucaaacauaaaagaaaacaaaugcaauggaaccgacgccaaaguaaaacuaaucaaacaagaacuagacaaauauaaaaaugcaguaacagaauuacaacuccuaaugcaauccacaccagcaacaaauaacagagcaagacgagaacucccucgauucaugaauuacacauuaaacaacgcaaaaaaaacuaacguaacuuuaucaaaaaaaagaaaacguagauuucuaggauuccuacuaggcguaggguccgccauugcaucaggaguagcaguuagcaaaguauuacauuuagaaggagaaguaaauaaaaucaaaagcgcacuacucucaaccaacaaagcaguaguaucacucucaaacggaguaucaguacuaacauccaaaguacucgaccucaaaaacuacauagacaaacaauuacuacccauaguaaacaaacaaucaugcucuauaucaaauaucgaaacaguaaucgaauuucaacaaaaaaacaaucgacuacuugaaauaacaagagaguucuccgucaaugccggagucaccacaccagucucaacauacaugcuaaccaacucugaacuccuaucacuaauaaaugacaugccaauaacaaacgaccaaaaaaaacuaaugucaaauaacguacaaauaguacgacaacaaaguuauuccauaaugaguauaaucaaagaagaaguguuagcauacguaguccaacuaccauuauauggaguaauagacacaccauguuggaaauuacacaccucaccacucugcacuaccaauacaaaagaaggcucaaauauaugccuaacucgcacagacagaggcugguacugcgauaacgcaggauccguaucuuucuuuccccaagcagaaacuugcaaaguacaaucaaacagagucuucugcgacaccaugaauagucucacauuaccaucugaaguaaaccuauguaacguagauauauucaauccaaaauacgacugcaaaauaaugacaucaaaaaccgacgucucuagcaguguaaucacaucacuaggagcaauaguaagcugcuauggaaaaacaaaauguacagcaucaaacaaaaacaggggaauaauaaaaaccuucucaaacggaugugacuacguaucaaauaaaggcguagacacaguaagcguaggaaacacccuauacuacguuaacaaacaagaagggaaaucauuauacguaaaaggagaaccaauaauaaacuucuacgauccacucguauucccauccgacgaauuugacgccagcauaucccaaguuaacgaaaaaauaaaccaaucacuugcauuuauacgaaaaucugaugaacuucuccacaacguaaaugcaggaaaauccaccaccaauauaaugaucacaacuaucaucauaguaauaaucgucauuuuacuaucauuaauagcaguuggccuacuucuauacugcaaagcaagauaaggacuagugaagggaacacccaaauuuaauucagccuuaagcacaauuaauuaagagugaaacguaauuguacaagcaguuggucacccaccauagggcaugaucaacaccgcaaccuuuccuuuuucccccagugauucugaaaaaccccucuucccuucagcuugcuuagauguuccaaauuuaguaagcuuaaggcggccuacagaagaaaaagaaaaaaaaggccacaaaaguucccucucacuuucaguaaauaaaauaaaagcagcaacagaaauaaagaaauaaaugaaauucaaaaugaaauaaauauuguguugugcagcauuaaaaaaucaauaaaaauuaaaaaugagcaagaucuaaaaaaaaaaaaaaaaaaaaaaaaaaaaaaaaaaaaaaaaaaaaaaaaaaaaaaaaaaaaaaaaugcaucccccccccccccccccccccccccccccccaaaggcucuuuucagagccaccagaauu

SEQ ID NO: 834 - RNA, 2256 nt, Artificial Sequence
  mRNA product Design h-2 comprising derived and/or modified sequence from HRSV(A2)__F-del (opt11)
gggagacccgugacccggaaguuguacggcuacgcgacuuucccucccacaaacccucgcgcccuuccuuuccuacuugggcccggcagaaagcuuaccauggaacuacuaauccuaaaagccaacgcgaucaccaccauccuaacggcagucaccuucugcuucgcaucaggccaaaacaucacagaagaguucuaccaaagcacaugcuccgccguauccaaaggcuaccucagcgcccuacgcacaggcugguacacaucugucaucaccauagaacucuccaacaucaaagaaaacaaaugcaacggcacugacgccaaaguaaagcugaucaaacaagaacucgacaaauacaaaaacgcagucaccgaacuccaacuacucaugcaauccaccccugcaaccaacaacagggcccgccgcgaacucccccgcuucaugaacuacacuuuaaacaacgccaaaaagaccaacgucacacucagcaagaaacggaaacgacgauuccuaggguuucuccuaggcgucggcucggcaaucgccuccggcgucgccguaagcaaaguacuacaccuagaaggcgaagugaacaaaaucaaaagugcccuucucuccaccaacaaggccguagucucucuauccaacggagucucaguccucaccucaaagguccucgaccucaaaaacuacaucgacaaacaacuacuccccauugucaacaagcagucaugcuccauaucaaacaucgaaaccgucaucgaguuccaacagaaaaacaaccgacuccucgaaauaaccagagaguucucggucaacgccggcgucaccaccccagucagcaccuacaugcucacuaacuccgaacuccuaucccucaucaacgacaugccaauuaccaacgaccaaaagaaacuaaugucgaacaacguucaaaucguccgacaacaaaguuacuccaucaugagcauaaucaaagaagaaguucuagcguacgucguccaacucccacuauacggcgucaucgacacuccgugcuggaaacuccacacaucaccccuauguacaaccaacacaaaagaaggcagcaacaucugccucacccgcaccgaccgagggugguauugcgauaacgcuggcagcgucuccuucuucccccaagccgaaaccugcaaaguccaaucaaacagaguauucugcgacaccaugaacucccuuacucucccuagcgaagucaaccucugcaacguugacauauucaaccccaaauacgacugcaaaaucaugaccuccaagaccgacgucuccuccuccgucaucacaucucuaggugccauugucuccugcuacggaaaaaccaaaugcacagccuccaacaaaaaccgcggcaucauaaaaaccuucuccaacggcugcgacuacgucaguaauaaaggcgucgacacgguauccguugggaauacgcuuuacuacguaaauaaacaagaaggcaaaucccucuacgucaaaggugaacccaucauaaacuucuacgacccgcuuguguucccauccgacgaguucgacgccagcaucagccaggucaacgaaaagaucaaccaaucccuagccuucauccgcaaaagcgacgaacuacuacacaacgucaacgccggaaaauccacaaccaacaucaugaucaccaccaucaucaucgucaucaucguaauccuacucucucucaucgccgucggccuccuacuguacuguaaagcccgauagggacuagugaagggaacacccaaauuuaauucagccuuaagcacaauuaauuaagagugaaacguaauuguacaagcaguuggucacccaccauagggcaugaucaacaccgcaaccuuuccuuuuucccccagugauucugaaaaaccccucuucccuucagcuugcuuagauguuccaaauuuaguaagcuuaaggcggccuacagaagaaaaagaaaaaaaaggccacaaaaguucccucucacuuucaguaaauaaaauaaaagcagcaacagaaauaaagaaauaaaugaaauucaaaaugaaauaaauauuguguugugcagcauuaaaaaaucaauaaaaauuaaaaaugagcaagaucuaaaaaaaaaaaaaaaaaaaaaaaaaaaaaaaaaaaaaaaaaaaaaaaaaaaaaaaaaaaaaaaaugcaucccccccccccccccccccccccccccccccaaaggcucuuuucagagccaccagaauu

SEQ ID NO: 835 - RNA, 2036 nt, Artificial Sequence
  mRNA product Design h-3 comprising derived and/or modified sequence from HRSV(A2)__F-del (artificial)
gggagacccgugacccggaaguuguacggcuacgcgacuuucccucccacaaacccucgcgcccuuccuuuccuacuugggcccggcagaaagcuuaccauggaguugcuaauccucaaagcaaaugcaauuaccacaauccucacugcagucacauuuuguuuugcuucuggucaaaacaucacugaagaauuuuaucaaucaacaugcagugcaguuagcaaaggcuaucuuagugcucugagaacugguugguauaccaguguuauaacuauagaauuaaguaauaucaaggaaaauaaguguaauggaacagaugcuaagguaaaauugauaaaacaagaauuagauaaauauaaaaaugcuguaacagaauugcaguugcucaugcaaagcacaccagcaacaaacaaucgagccagaagagaacuaccaagguuuaugaauuauacacucaacaaugccaaaaaaaccaauguaacauuaagcaagaaaaggaaaagaagauuucuugguuuuuuguuagguguuggaucugcaaucgccaguggcguugcuguaucuaagguccugcaccuagaaggggaagugaacaagaucaaaagugcucuacuauccacaaacaaggcuguagucagcuuaucaaauggaguuagugucuuaaccagcaaaguguuagaccucaaaaacuauauagauaaacaauuguuaccuauugugaacaagcaaagcugcagcauaucaaauauagaaacugugauagaguuccaacaaaagaacaacagacuacuagagauuaccagggaauuuaguguuaaugcagguguaacuacaccuguaagcacuuacauguuaacuaauagugaauuauugucauuaaucaaugauaugccuauaacaaaugaucagaaaaaguuaauguccaacaauguucaaauaguuagacagcaaaguuacucuaucauguccauaauaaaagaggaagucuuagcauauguaguacaauuaccacuauaugguguuauagauacacccuguuggaaacuacacacauccccucuauguacaaccaacacaaaagaaggguccaacaucuguuuaacaagaacugacagaggaugguacugugacaaugcaggaucaguaucuuucuucccacaagcugaaacauguaaaguucaaucaaaucgaguauuuugugacacaaugaacaguuuaacauuaccaagugaaguaaaucucugcaauguugacauauucaaccccaaauaugauuguaaaauuaugacuucaaaaacagauguaagcagcuccguuaucacaucucuaggagccauugugucaugcuauggcaaaacuaaauguacagcauccaauaaaaaucguggaaucauaaagacauuuucuaacgggugcgauuauguaucaaauaaagggguggacacugugucuguagguaacacauuauauuauguaaauaagcaagaagguaaaagucucuauguaaaaggugaaccaauaauaaauuucuaugacccauuaguauuccccucugaugaauuugaugcaucaauaucucaagucaacgagaagauuaaccagagccuagcauuuauucguaaauccgaugaauuauuacauaauguaaaugcugguaaauccaccacaaauaucaugauaacuacuauaauuauagugauuauaguaauauuguuaucauuaauugcuguuggacugcucuuauacuguaaggccagauaaggacuaguggaagcauuuuccuggcugauuaaaagaaauuacucagcuauggucaucuguuccuguuagaaggcuaugcagcauauuauauacuaugcgcauguuaugaaaugcauaauaaaaaauuuuaaaaaaucuaaaagaucuaaaaaaaaaaaaaaaaaaaaaaaaaaaaaaaaaaaaaaaaaaaaaaaaaaaaaaaaaaaaaaaaugcaucccccccccccccccccccccccccccccccaaaggcucuuuucagagccaccagaauu

SEQ ID NO: 836 - RNA, 2036 nt, Artificial Sequence
  mRNA product Design h-3 comprising derived and/or modified sequence from HRSV(A2)__F-del (opt1)
gggagacccgugacccggaaguuguacggcuacgcgacuuucccucccacaaacccucgcgcccuuccuuuccuacuugggcccggcagaaagcuuaccauggagcugcucauccugaaggccaacgccaucaccaccauccugacggcggugaccuucugcuucgccagcggccagaacaucaccgaggaguucuaccaguccaccugcagcgccgucuccaagggguaccucagcgcccugcggacgggcugguacaccuccgugaucaccaucgagcugagcaacaucaaggagaacaagugcaacgggaccgacgccaaggugaagcucaucaagcaggagcuggacaaguacaagaacgcggucacggagcugcagcuccugaugcaguccaccccggcaaccaacaaccgcgcccggcgcgagcugccccgguucaugaacuacacccucaacaacgccaagaagacgaacgugacccugagcaagaagcgcaagcggcgcuuccugggcuuccuccugggggugggcuccgccaucgcgagcggcgucgccguguccaaggugcugcaccucgagggggaggucaacaagaucaagagcgcccugcuguccaccaacaaggccguggugagccucuccaacggcgucagcgugcugaccuccaaggugcuggaccucaagaacuacaucgacaagcagcugcugcccaucgucaacaagcagagcugcuccaucagcaacaucgagacggugaucgaguuccagcagaagaacaaccggcuccuggagaucacccgcgaguucagcgugaacgccggggucaccacccccguguccacguacaugcugaccaacagcgagcuccugucccugaucaacgacaugccgaucaccaacgaccagaagaagcucaugagcaacaacgugcagaucguccggcagcaguccuacagcaucauguccaucaucaaggaggaggugcuggcguacgugguccagcugccccucuacggcgugaucgacacccccugcuggaagcugcacacgagcccccugugcaccaccaacaccaaggagggguccaacaucugccucacgcgcaccgaccggggcugguacugcgacaacgccggcagcgucuccuucuucccgcaggccgagaccugcaaggugcagagcaaccgcguguucugcgacaccaugaacucccugacgcugcccagcgagguaaaccucugcaacgucgacaucuucaaccccaaguacgacugcaagaucaugaccuccaagaccgacgugagcuccagcgugaucaccucccugggggccaucgucagcugcuacggcaagacgaagugcaccgccagcaacaagaaccgggggaucaucaagaccuucuccaacggcugcgacuacgugagcaacaagggcguggacaccguguccgucgggaacacccuguacuacgugaacaagcaggagggcaagagccucuacgugaagggggagcccaucaucaacuucuacgacccgcuggucuuccccuccgacgaguucgacgcgagcaucucccaggugaacgagaagaucaaccagagccuggccuucauccgcaaguccgacgagcugcuccacaacgugaacgccggcaagagcacgaccaacaucaugaucaccaccaucaucaucgucaucaucgugauccugcugucccucaucgccguggggcugcugcucuacugcaaggcccggugaggacuaguggaagcauuuuccuggcugauuaaaagaaauuacucagcuauggucaucuguuccuguuagaaggcuaugcagcauauuauauacuaugcgcauguuaugaaaugcauaauaaaaaauuuuaaaaaaucuaaaagaucuaaaaaaaaaaaaaaaaaaaaaaaaaaaaaaaaaaaaaaaaaaaaaaaaaaaaaaaaaaaaaaaaugcaucccccccccccccccccccccccccccccccaaaggcucuuuucagagccaccagaauu

SEQ ID NO: 837 - RNA, 2036 nt, Artificial Sequence
  mRNA product Design h-3 comprising derived and/or modified sequence from HRSV(A2)__F-del (opt1)
gggagacccgugacccggaaguuguacggcuacgcgacuuucccucccacaaacccucgcgcccuuccuuuccuacuugggcccggcagaaagcuuaccauggagcugcucauccugaaggccaacgccaucaccaccauccugacggcggugaccuucugcuucgccagcggccagaacaucaccgaggaguucuaccaguccacgugcagcgccgucuccaagggguaccucagcgcccugcgcaccggcugguacaccuccgugaucaccaucgagcugagcaacaucaaggagaacaagugcaacgggaccgacgccaaggugaagcucaucaagcaggagcuggacaaguacaagaacgcggucacggagcugcagcuccugaugcaguccacccccgccaccaacaaccgggcccgccgggagcugccgcgcuucaugaacuacacccucaacaacgccaagaagacgaacgugacccugagcaagaagcggaagcgccgguuccugggcuuccuccugggggugggcuccgcgaucgccagcggcgucgccguguccaaggugcugcaccucgagggggaggucaacaagaucaagagcgcccugcuguccaccaacaaggccguggugagccucuccaacggcgucagcgugcugaccuccaaggugcuggaccucaagaacuacaucgacaagcagcugcugcccaucgucaacaagcagagcugcuccaucagcaacaucgagacggugaucgaguuccagcagaagaacaaccgccuccuggagaucacccgggaguucagcgugaacgcgggggucaccacccccguguccacguacaugcugaccaacagcgagcuccugucccugaucaacgacaugcccaucaccaacgaccagaagaagcucaugagcaacaacgugcagaucguccgccagcaguccuacagcaucauguccaucaucaaggaggaggugcuggccuacgugguccagcugccgcucuacggcgugaucgacacccccugcuggaagcugcacacgagcccccugugcaccaccaacaccaaggagggguccaacaucugccucacgcggaccgaccgcggcugguacugcgacaacgccggcagcgucuccuucuucccccaggccgagaccugcaaggugcagagcaaccggguguucugcgacaccaugaacucccugacgcugccgagcgaggucaaccucugcaacguggacaucuucaaccccaaguacgacugcaagaucaugaccuccaagaccgacgugagcuccagcgucaucaccucccugggggccaucgugagcugcuacggcaagacgaagugcaccgcgagcaacaagaaccgcgggaucaucaagaccuucuccaacggcugcgacuacgugagcaacaagggcgucgacaccguguccguggggaacacccuguacuacgucaacaagcaggagggcaagagccucuacgugaagggggagcccaucaucaacuucuacgacccccugguguucccguccgacgaguucgacgccagcaucucccaggucaacgagaagaucaaccagagccuggccuucauccggaaguccgacgagcuccugcacaacgugaacgccggcaagagcacgaccaacaucaugaucaccaccaucaucaucgugaucaucgucauccugcugucccucaucgccguggggcugcugcucuacugcaaggcgcgcugaggacuaguggaagcauuuuccuggcugauuaaaagaaauuacucagcuauggucaucuguuccuguuagaaggcuaugcagcauauuauauacuaugcgcauguuaugaaaugcauaauaaaaaauuuuaaaaaaucuaaaagaucuaaaaaaaaaaaaaaaaaaaaaaaaaaaaaaaaaaaaaaaaaaaaaaaaaaaaaaaaaaaaaaaaugcaucccccccccccccccccccccccccccccccaaaggcucuuuucagagccaccagaauu

SEQ ID NO: 838 - RNA, 2036 nt, Artificial Sequence
  mRNA product Design h-3 comprising derived and/or modified sequence from HRSV(A2)__F-del (opt2)
gggagacccgugacccggaaguuguacggcuacgcgacuuucccucccacaaacccucgcgcccuuccuuuccuacuugggcccggcagaaagcuuaccauggagcuccucauccucaaggccaacgccaucaccaccauccucaccgccgucaccuucugcuucgccuccggccagaacaucaccgaggaguucuaccaguccaccugcuccgccgucuccaagggcuaccucuccgcccuccgcaccggcugguacaccuccgucaucaccaucgagcucuccaacaucaaggagaacaagugcaacggcaccgacgccaaggucaagcucaucaagcaggagcucgacaaguacaagaacgccgucaccgagcuccagcuccucaugcaguccacccccgccaccaacaaccgcgcccgccgcgagcucccccgcuucaugaacuacacccucaacaacgccaagaagaccaacgucacccucuccaagaagcgcaagcgccgcuuccucggcuuccuccucggcgucggcuccgccaucgccuccggcgucgccgucuccaagguccuccaccucgagggcgaggucaacaagaucaaguccgcccuccucuccaccaacaaggccgucgucucccucuccaacggcgucuccguccucaccuccaagguccucgaccucaagaacuacaucgacaagcagcuccuccccaucgucaacaagcaguccugcuccaucuccaacaucgagaccgucaucgaguuccagcagaagaacaaccgccuccucgagaucacccgcgaguucuccgucaacgccggcgucaccacccccgucuccaccuacaugcucaccaacuccgagcuccucucccucaucaacgacaugcccaucaccaacgaccagaagaagcucauguccaacaacguccagaucguccgccagcaguccuacuccaucauguccaucaucaaggaggagguccucgccuacgucguccagcucccccucuacggcgucaucgacacccccugcuggaagcuccacaccuccccccucugcaccaccaacaccaaggagggcuccaacaucugccucacccgcaccgaccgcggcugguacugcgacaacgccggcuccgucuccuucuucccccaggccgagaccugcaagguccaguccaaccgcgucuucugcgacaccaugaacucccucacccuccccuccgaggucaaccucugcaacgucgacaucuucaaccccaaguacgacugcaagaucaugaccuccaagaccgacgucuccuccuccgucaucaccucccucggcgccaucgucuccugcuacggcaagaccaagugcaccgccuccaacaagaaccgcggcaucaucaagaccuucuccaacggcugcgacuacgucuccaacaagggcgucgacaccgucuccgucggcaacacccucuacuacgucaacaagcaggagggcaagucccucuacgucaagggcgagcccaucaucaacuucuacgacccccucgucuuccccuccgacgaguucgacgccuccaucucccaggucaacgagaagaucaaccagucccucgccuucauccgcaaguccgacgagcuccuccacaacgucaacgccggcaaguccaccaccaacaucaugaucaccaccaucaucaucgucaucaucgucauccuccucucccucaucgccgucggccuccuccucuacugcaaggcccgcugaggacuaguggaagcauuuuccuggcugauuaaaagaaauuacucagcuauggucaucuguuccuguuagaaggcuaugcagcauauuauauacuaugcgcauguuaugaaaugcauaauaaaaaauuuuaaaaaaucuaaaagaucuaaaaaaaaaaaaaaaaaaaaaaaaaaaaaaaaaaaaaaaaaaaaaaaaaaaaaaaaaaaaaaaaugcaucccccccccccccccccccccccccccccccaaaggcucuuuucagagccaccagaauu

SEQ ID NO: 839 - RNA, 2036 nt, Artificial Sequence
  mRNA product Design h-3 comprising derived and/or modified sequence from HRSV(A2)__F-del (opt3)
gggagacccgugacccggaaguuguacggcuacgcgacuuucccucccacaaacccucgcgcccuuccuuuccuacuugggcccggcagaaagcuuaccauggagcugcucauccuuaaggccaacgcuauuaccacaauacugacugcagugacguucugcuuugccagcggccagaauaucaccgaagaguucuaccaauccacauguucugcggucucaaaaggguauuugagugcuuuaagaacuggaugguacaccagcguuauuacaaucgaacuguccaacauuaaggagaauaaaugcaacgguaccgacgccaaggugaaacuaaucaagcaggaacucgauaaguauaaaaaugcaguaacugagcugcagcuucugaugcagucuacacccgccaccaacaauagggcucggcgcgaguugccucgauuuaugaacuacacgcucaauaacgcaaagaaaacuaaugugacccugucgaagaaacguaagagaagguuccugggcuuucucuuaggggucggaucagccauagcuagcggcguggccguuaguaaggugcugcaccuugaaggugaggucaacaaaaucaaguccgcguugcugucuacaaauaaagcagugguaagccuauccaacgggguuucagugcucacuucuaagguccuggaccuuaaaaauuauauugauaagcaacuguugccaaucgugaacaaacagagcuguucuauuuccaacaucgaaaccgugauagaguuccagcagaagaauaaccggcuccuggagauuacacgcgaauuuucagucaaugccggaguuaccacgccggugagcacuuacauguuaacaaacagugagcugcucucucuuaucaaugacaugcccauuaccaacgaucaaaagaaacugauguccaauaacguacagaucgugagacagcagagcuauucgaucaugucuauuauaaaggaagaggucuuggcuuacgugguucaacuaccucuguacggcgugaucgacacuccaugcuggaaacuccauacauccccacuguguaccacgaauaccaaggaaggcucaaacauuugccuuacaaggacugaucgggggugguauugugacaaugccggaagugucagcuucuuuccucaggcagagaccugcaaagugcaguccaaccgcguauucugugauacaaugaauagucugacuuugccaagcgagguuaaccucugcaauguggacaucuuuaaccccaaguacgauuguaagauaaugaccucaaaaacagacgucaguuccagcgugauuaccucucugggugcuaucgucucaugcuauggcaagacuaaaugcacggccaguaacaagaaucgagggaucauuaaaacauucagcaacggaugugauuacguguccaauaagggcguugacaccgugucuguagguaacacuuuauauuacgucaauaagcaagaagggaaaucgcuguaugugaagggagagccuaucauuaacuuuuacgacccccuaguuuucccgagcgaugaauuugacgcguccauaucacaggugaaugagaaaaucaaccagagucucgccuucauuagaaagucugaugaacugcuucacaaugucaacgcaggcaaaagcaccacaaauaucaugaucaccacuauuauaaucgugauuaucguaauuuugcugucccucaucgcugugggccugcuucuguacugcaaggccaggugaggacuaguggaagcauuuuccuggcugauuaaaagaaauuacucagcuauggucaucuguuccuguuagaaggcuaugcagcauauuauauacuaugcgcauguuaugaaaugcauaauaaaaaauuuuaaaaaaucuaaaagaucuaaaaaaaaaaaaaaaaaaaaaaaaaaaaaaaaaaaaaaaaaaaaaaaaaaaaaaaaaaaaaaaaugcaucccccccccccccccccccccccccccccccaaaggcucuuuucagagccaccagaauu

SEQ ID NO: 840 - RNA, 2036 nt, Artificial Sequence
  mRNA product Design h-3 comprising derived and/or modified sequence from HRSV(A2)__F-del (opt4)
gggagacccgugacccggaaguuguacggcuacgcgacuuucccucccacaaacccucgcgcccuuccuuuccuacuugggcccggcagaaagcuuaccauggagcugcugauccugaaggccaacgccaucaccaccauccugaccgccgugaccuucugcuucgccagcggccagaacaucaccgaggaguucuaccagagcaccugcagcgccgugagcaagggcuaccugagcgcccugagaaccggcugguacaccagcgugaucaccaucgagcugagcaacaucaaggagaacaagugcaacggcaccgacgccaaggugaagcugaucaagcaggagcuggacaaguacaagaacgccgugaccgagcugcagcugcugaugcagagcacccccgccaccaacaacagagccagaagagagcugcccagauucaugaacuacacccugaacaacgccaagaagaccaacgugacccugagcaagaagagaaagagaagauuccugggcuuccugcugggcgugggcagcgccaucgccagcggcguggccgugagcaaggugcugcaccuggagggcgaggugaacaagaucaagagcgcccugcugagcaccaacaaggccguggugagccugagcaacggcgugagcgugcugaccagcaaggugcuggaccugaagaacuacaucgacaagcagcugcugcccaucgugaacaagcagagcugcagcaucagcaacaucgagaccgugaucgaguuccagcagaagaacaacagacugcuggagaucaccagagaguucagcgugaacgccggcgugaccacccccgugagcaccuacaugcugaccaacagcgagcugcugagccugaucaacgacaugcccaucaccaacgaccagaagaagcugaugagcaacaacgugcagaucgugagacagcagagcuacagcaucaugagcaucaucaaggaggaggugcuggccuacguggugcagcugccccuguacggcgugaucgacacccccugcuggaagcugcacaccagcccccugugcaccaccaacaccaaggagggcagcaacaucugccugaccagaaccgacagaggcugguacugcgacaacgccggcagcgugagcuucuucccccaggccgagaccugcaaggugcagagcaacagaguguucugcgacaccaugaacagccugacccugcccagcgaggugaaccugugcaacguggacaucuucaaccccaaguacgacugcaagaucaugaccagcaagaccgacgugagcagcagcgugaucaccagccugggcgccaucgugagcugcuacggcaagaccaagugcaccgccagcaacaagaacagaggcaucaucaagaccuucagcaacggcugcgacuacgugagcaacaagggcguggacaccgugagcgugggcaacacccuguacuacgugaacaagcaggagggcaagagccuguacgugaagggcgagcccaucaucaacuucuacgacccccugguguuccccagcgacgaguucgacgccagcaucagccaggugaacgagaagaucaaccagagccuggccuucaucagaaagagcgacgagcugcugcacaacgugaacgccggcaagagcaccaccaacaucaugaucaccaccaucaucaucgugaucaucgugauccugcugagccugaucgccgugggccugcugcuguacugcaaggccagaugaggacuaguggaagcauuuuccuggcugauuaaaagaaauuacucagcuauggucaucuguuccuguuagaaggcuaugcagcauauuauauacuaugcgcauguuaugaaaugcauaauaaaaaauuuuaaaaaaucuaaaagaucuaaaaaaaaaaaaaaaaaaaaaaaaaaaaaaaaaaaaaaaaaaaaaaaaaaaaaaaaaaaaaaaaugcaucccccccccccccccccccccccccccccccaaaggcucuuuucagagccaccagaauu

SEQ ID NO: 841 - RNA, 2036 nt, Artificial Sequence
  mRNA product Design h-3 comprising derived and/or modified sequence from HRSV(A2)__F-del (opt5)
gggagacccgugacccggaaguuguacggcuacgcgacuuucccucccacaaacccucgcgcccuuccuuuccuacuugggcccggcagaaagcuuaccauggagcugcucauccugaaggccaacgcuauuaccacaauccuuacggccgugaccuucugcuuugcgagcggccagaauauuacagaagaguucuaccaauccaccuguucugcugucagcaaaggguaucuguccgcccucagaacaggaugguacaccucuguuaucacaauugaacugagcaacaucaaggagaauaaaugcaacggcaccgacgccaaggugaaacuuaucaagcaggaacuggauaaguauaaaaaugcugugacggagcuccagcugcugaugcaguccacccccgccacaaacaaucgggcucgcagagagcucccucgguuuaugaacuacacccugaauaacgccaagaaaacaaaugucacccuuucuaagaaacgcaagagacgguuccugggguuucuccugggagugggcagcgcgauugccuccgggguugcugugagcaagguccuucaccuggaaggagaggugaacaaaaucaagucugcccuccuguccacgaauaaagcuguugugagccugucuaacggcgucuccgugcucacaagcaaggugcuggaccuuaaaaauuauauugauaagcaacugcucccgaucgucaacaaacagucuuguuccauuagcaacaucgaaaccguuauugaguuccagcagaagaauaaccgccugcuugagaucacaagagaauuuuccgugaaugccggcgugaccacccccgucucuacauacaugcugacgaacagcgagcuccugucccugaucaaugacaugccuauuaccaacgaucaaaagaaacucaugagcaauaacgugcagaucguucggcagcagucuuauuccauuaugagcaucauuaaggaagaggugcuggcguacgucgugcaacuuccccuguacgggguuaucgacacaccuugcuggaaacuccauaccucuccccuguguacaaccaauacgaaggaaggaagcaacaucugccuuacacgcaccgauagaggcugguauugugacaaugccggguccgugucuuucuuuccucaggcugagaccugcaaaguccagagcaaccggguguucugugauacaaugaacucccugacccucccgagcgaggucaaucugugcaauguggacauuuuuaaccccaaguacgauuguaagaucaugacaucuaaaacggacguuuccagcucugugauuaccucccugggagccaucgucagcugcuauggcaagacaaaaugcaccgcuuccaacaagaaucgcgggauuaucaaaacauucucuaacggaugugauuacgugagcaauaagggcguugacaccguguccgucggcaacacgcucuauuacgugaauaagcaagaagggaaaucucuguaugugaagggagagccuaucauuaacuuuuacgacccccuuguuuucccuagcgaugaauuugacgccuccaucagccaggucaaugagaaaauuaaccagucucuggccuucaucagaaaguccgaugaacuccugcacaaugugaacgcuggcaaaagcaccacaaauauuaugaucaccacaauuaucaucgugauuaucgucauucugcuuucucucaucgcgguggggcugcugcucuacugcaaggcccggugaggacuaguggaagcauuuuccuggcugauuaaaagaaauuacucagcuauggucaucuguuccuguuagaaggcuaugcagcauauuauauacuaugcgcauguuaugaaaugcauaauaaaaaauuuuaaaaaaucuaaaagaucuaaaaaaaaaaaaaaaaaaaaaaaaaaaaaaaaaaaaaaaaaaaaaaaaaaaaaaaaaaaaaaaaugcaucccccccccccccccccccccccccccccccaaaggcucuuuucagagccaccagaauu

SEQ ID NO: 842 - RNA, 2036 nt, Artificial Sequence
  mRNA product Design h-3 comprising derived and/or modified sequence from HRSV(A2)__F-del (opt6)
gggagacccgugacccggaaguuguacggcuacgcgacuuucccucccacaaacccucgcgcccuuccuuuccuacuugggcccggcagaaagcuuaccauggaauuacuaauacucaaagccaacgcaauaacaacaauacuaacagcaguaacauucugcuucgcaucaggacaaaacaucacagaagaauuuuaccaaaguacaugcagugcagucucuaaaggauaccucagugccuuacgcacaggaugguacacaucaguaauaacaaucgaacuuucaaacauaaaagaaaacaaaugcaauggaaccgacgccaaaguaaaacuaaucaaacaagaacuagacaaauauaaaaaugcaguaacagaauuacaacuccuaaugcaauccacaccagcaacaaauaacagagcaagacgagaacucccucgauucaugaauuacacauuaaacaacgcaaaaaaaacuaacguaacuuuaucaaaaaaaagaaaacguagauuucuaggauuccuacuaggcguaggguccgccauugcaucaggaguagcaguuagcaaaguauuacauuuagaaggagaaguaaauaaaaucaaaagcgcacuacucucaaccaacaaagcaguaguaucacucucaaacggaguaucaguacuaacauccaaaguacucgaccucaaaaacuacauagacaaacaauuacuacccauaguaaacaaacaaucaugcucuauaucaaauaucgaaacaguaaucgaauuucaacaaaaaaacaaucgacuacuugaaauaacaagagaguucuccgucaaugccggagucaccacaccagucucaacauacaugcuaaccaacucugaacuccuaucacuaauaaaugacaugccaauaacaaacgaccaaaaaaaacuaaugucaaauaacguacaaauaguacgacaacaaaguuauuccauaaugaguauaaucaaagaagaaguguuagcauacguaguccaacuaccauuauauggaguaauagacacaccauguuggaaauuacacaccucaccacucugcacuaccaauacaaaagaaggcucaaauauaugccuaacucgcacagacagaggcugguacugcgauaacgcaggauccguaucuuucuuuccccaagcagaaacuugcaaaguacaaucaaacagagucuucugcgacaccaugaauagucucacauuaccaucugaaguaaaccuauguaacguagauauauucaauccaaaauacgacugcaaaauaaugacaucaaaaaccgacgucucuagcaguguaaucacaucacuaggagcaauaguaagcugcuauggaaaaacaaaauguacagcaucaaacaaaaacaggggaauaauaaaaaccuucucaaacggaugugacuacguaucaaauaaaggcguagacacaguaagcguaggaaacacccuauacuacguuaacaaacaagaagggaaaucauuauacguaaaaggagaaccaauaauaaacuucuacgauccacucguauucccauccgacgaauuugacgccagcauaucccaaguuaacgaaaaaauaaaccaaucacuugcauuuauacgaaaaucugaugaacuucuccacaacguaaaugcaggaaaauccaccaccaauauaaugaucacaacuaucaucauaguaauaaucgucauuuuacuaucauuaauagcaguuggccuacuucuauacugcaaagcaagauaaggacuaguggaagcauuuuccuggcugauuaaaagaaauuacucagcuauggucaucuguuccuguuagaaggcuaugcagcauauuauauacuaugcgcauguuaugaaaugcauaauaaaaaauuuuaaaaaaucuaaaagaucuaaaaaaaaaaaaaaaaaaaaaaaaaaaaaaaaaaaaaaaaaaaaaaaaaaaaaaaaaaaaaaaaugcaucccccccccccccccccccccccccccccccaaaggcucuuuucagagccaccagaauu

SEQ ID NO: 843 - RNA, 2036 nt, Artificial Sequence
  mRNA product Design h-3 comprising derived and/or modified sequence from HRSV(A2)__F-del (opt11)
gggagacccgugacccggaaguuguacggcuacgcgacuuucccucccacaaacccucgcgcccuuccuuuccuacuugggcccggcagaaagcuuaccauggaacuacuaauccuaaaagccaacgcgaucaccaccauccuaacggcagucaccuucugcuucgcaucaggccaaaacaucacagaagaguucuaccaaagcacaugcuccgccguauccaaaggcuaccucagcgcccuacgcacaggcugguacacaucugucaucaccauagaacucuccaacaucaaagaaaacaaaugcaacggcacugacgccaaaguaaagcugaucaaacaagaacucgacaaauacaaaaacgcagucaccgaacuccaacuacucaugcaauccaccccugcaaccaacaacagggcccgccgcgaacucccccgcuucaugaacuacacuuuaaacaacgccaaaaagaccaacgucacacucagcaagaaacggaaacgacgauuccuaggguuucuccuaggcgucggcucggcaaucgccuccggcgucgccguaagcaaaguacuacaccuagaaggcgaagugaacaaaaucaaaagugcccuucucuccaccaacaaggccguagucucucuauccaacggagucucaguccucaccucaaagguccucgaccucaaaaacuacaucgacaaacaacuacuccccauugucaacaagcagucaugcuccauaucaaacaucgaaaccgucaucgaguuccaacagaaaaacaaccgacuccucgaaauaaccagagaguucucggucaacgccggcgucaccaccccagucagcaccuacaugcucacuaacuccgaacuccuaucccucaucaacgacaugccaauuaccaacgaccaaaagaaacuaaugucgaacaacguucaaaucguccgacaacaaaguuacuccaucaugagcauaaucaaagaagaaguucuagcguacgucguccaacucccacuauacggcgucaucgacacuccgugcuggaaacuccacacaucaccccuauguacaaccaacacaaaagaaggcagcaacaucugccucacccgcaccgaccgagggugguauugcgauaacgcuggcagcgucuccuucuucccccaagccgaaaccugcaaaguccaaucaaacagaguauucugcgacaccaugaacucccuuacucucccuagcgaagucaaccucugcaacguugacauauucaaccccaaauacgacugcaaaaucaugaccuccaagaccgacgucuccuccuccgucaucacaucucuaggugccauugucuccugcuacggaaaaaccaaaugcacagccuccaacaaaaaccgcggcaucauaaaaaccuucuccaacggcugcgacuacgucaguaauaaaggcgucgacacgguauccguugggaauacgcuuuacuacguaaauaaacaagaaggcaaaucccucuacgucaaaggugaacccaucauaaacuucuacgacccgcuuguguucccauccgacgaguucgacgccagcaucagccaggucaacgaaaagaucaaccaaucccuagccuucauccgcaaaagcgacgaacuacuacacaacgucaacgccggaaaauccacaaccaacaucaugaucaccaccaucaucaucgucaucaucguaauccuacucucucucaucgccgucggccuccuacuguacuguaaagcccgauagggacuaguggaagcauuuuccuggcugauuaaaagaaauuacucagcuauggucaucuguuccuguuagaaggcuaugcagcauauuauauacuaugcgcauguuaugaaaugcauaauaaaaaauuuuaaaaaaucuaaaagaucuaaaaaaaaaaaaaaaaaaaaaaaaaaaaaaaaaaaaaaaaaaaaaaaaaaaaaaaaaaaaaaaaugcaucccccccccccccccccccccccccccccccaaaggcucuuuucagagccaccagaauu

SEQ ID NO: 844 - RNA, 2099 nt, Artificial Sequence
  mRNA product Design h-4 comprising derived and/or modified sequence from HRSV(A2)__F-del (artificial)
gggagagggcgcuuggcuugcaaggacccugagcugcggcauugaagcacacccaacccaacucgacugaagucagccucacugaaccggaucugagaaucuucucucucugggcuugccagggcucuccgaaccuagcuagcauccucuucaauuccaacuagaaagcuuaccauggaguugcuaauccucaaagcaaaugcaauuaccacaauccucacugcagucacauuuuguuuugcuucuggucaaaacaucacugaagaauuuuaucaaucaacaugcagugcaguuagcaaaggcuaucuuagugcucugagaacugguugguauaccaguguuauaacuauagaauuaaguaauaucaaggaaaauaaguguaauggaacagaugcuaagguaaaauugauaaaacaagaauuagauaaauauaaaaaugcuguaacagaauugcaguugcucaugcaaagcacaccagcaacaaacaaucgagccagaagagaacuaccaagguuuaugaauuauacacucaacaaugccaaaaaaaccaauguaacauuaagcaagaaaaggaaaagaagauuucuugguuuuuuguuagguguuggaucugcaaucgccaguggcguugcuguaucuaagguccugcaccuagaaggggaagugaacaagaucaaaagugcucuacuauccacaaacaaggcuguagucagcuuaucaaauggaguuagugucuuaaccagcaaaguguuagaccucaaaaacuauauagauaaacaauuguuaccuauugugaacaagcaaagcugcagcauaucaaauauagaaacugugauagaguuccaacaaaagaacaacagacuacuagagauuaccagggaauuuaguguuaaugcagguguaacuacaccuguaagcacuuacauguuaacuaauagugaauuauugucauuaaucaaugauaugccuauaacaaaugaucagaaaaaguuaauguccaacaauguucaaauaguuagacagcaaaguuacucuaucauguccauaauaaaagaggaagucuuagcauauguaguacaauuaccacuauaugguguuauagauacacccuguuggaaacuacacacauccccucuauguacaaccaacacaaaagaaggguccaacaucuguuuaacaagaacugacagaggaugguacugugacaaugcaggaucaguaucuuucuucccacaagcugaaacauguaaaguucaaucaaaucgaguauuuugugacacaaugaacaguuuaacauuaccaagugaaguaaaucucugcaauguugacauauucaaccccaaauaugauuguaaaauuaugacuucaaaaacagauguaagcagcuccguuaucacaucucuaggagccauugugucaugcuauggcaaaacuaaauguacagcauccaauaaaaaucguggaaucauaaagacauuuucuaacgggugcgauuauguaucaaauaaagggguggacacugugucuguagguaacacauuauauuauguaaauaagcaagaagguaaaagucucuauguaaaaggugaaccaauaauaaauuucuaugacccauuaguauuccccucugaugaauuugaugcaucaauaucucaagucaacgagaagauuaaccagagccuagcauuuauucguaaauccgaugaauuauuacauaauguaaaugcugguaaauccaccacaaauaucaugauaacuacuauaauuauagugauuauaguaauauuguuaucauuaauugcuguuggacugcucuuauacuguaaggccagauaaggacuaguaauaaggaaacuguaugaaugucugugggcaggaagugaagagauccuucuguaaagguuuuuggaauuaugucugcugaauaauaaacuuuuuugaaauaauaaaucugguagaaaaaugagaucuaaaaaaaaaaaaaaaaaaaaaaaaaaaaaaaaaaaaaaaaaaaaaaaaaaaaaaaaaaaaaaaaugcaucccccccccccccccccccccccccccccccaaaggcucuuuucagagccaccagaauu

SEQ ID NO: 845 - RNA, 2099 nt, Artificial Sequence
  mRNA product Design h-4 comprising derived and/or modified sequence from HRSV(A2)__F-del (opt1)
gggagagggcgcuuggcuugcaaggacccugagcugcggcauugaagcacacccaacccaacucgacugaagucagccucacugaaccggaucugagaaucuucucucucugggcuugccagggcucuccgaaccuagcuagcauccucuucaauuccaacuagaaagcuuaccauggagcugcucauccugaaggccaacgccaucaccaccauccugacggcggugaccuucugcuucgccagcggccagaacaucaccgaggaguucuaccaguccaccugcagcgccgucuccaagggguaccucagcgcccugcggacgggcugguacaccuccgugaucaccaucgagcugagcaacaucaaggagaacaagugcaacgggaccgacgccaaggugaagcucaucaagcaggagcuggacaaguacaagaacgcggucacggagcugcagcuccugaugcaguccaccccggcaaccaacaaccgcgcccggcgcgagcugccccgguucaugaacuacacccucaacaacgccaagaagacgaacgugacccugagcaagaagcgcaagcggcgcuuccugggcuuccuccugggggugggcuccgccaucgcgagcggcgucgccguguccaaggugcugcaccucgagggggaggucaacaagaucaagagcgcccugcuguccaccaacaaggccguggugagccucuccaacggcgucagcgugcugaccuccaaggugcuggaccucaagaacuacaucgacaagcagcugcugcccaucgucaacaagcagagcugcuccaucagcaacaucgagacggugaucgaguuccagcagaagaacaaccggcuccuggagaucacccgcgaguucagcgugaacgccggggucaccacccccguguccacguacaugcugaccaacagcgagcuccugucccugaucaacgacaugccgaucaccaacgaccagaagaagcucaugagcaacaacgugcagaucguccggcagcaguccuacagcaucauguccaucaucaaggaggaggugcuggcguacgugguccagcugccccucuacggcgugaucgacacccccugcuggaagcugcacacgagcccccugugcaccaccaacaccaaggagggguccaacaucugccucacgcgcaccgaccggggcugguacugcgacaacgccggcagcgucuccuucuucccgcaggccgagaccugcaaggugcagagcaaccgcguguucugcgacaccaugaacucccugacgcugcccagcgagguaaaccucugcaacgucgacaucuucaaccccaaguacgacugcaagaucaugaccuccaagaccgacgugagcuccagcgugaucaccucccugggggccaucgucagcugcuacggcaagacgaagugcaccgccagcaacaagaaccgggggaucaucaagaccuucuccaacggcugcgacuacgugagcaacaagggcguggacaccguguccgucgggaacacccuguacuacgugaacaagcaggagggcaagagccucuacgugaagggggagcccaucaucaacuucuacgacccgcuggucuuccccuccgacgaguucgacgcgagcaucucccaggugaacgagaagaucaaccagagccuggccuucauccgcaaguccgacgagcugcuccacaacgugaacgccggcaagagcacgaccaacaucaugaucaccaccaucaucaucgucaucaucgugauccugcugucccucaucgccguggggcugcugcucuacugcaaggcccggugaggacuaguaauaaggaaacuguaugaaugucugugggcaggaagugaagagauccuucuguaaagguuuuuggaauuaugucugcugaauaauaaacuuuuuugaaauaauaaaucugguagaaaaaugagaucuaaaaaaaaaaaaaaaaaaaaaaaaaaaaaaaaaaaaaaaaaaaaaaaaaaaaaaaaaaaaaaaaugcaucccccccccccccccccccccccccccccccaaaggcucuuuucagagccaccagaauu

SEQ ID NO: 846 - RNA, 2099 nt, Artificial Sequence
  mRNA product Design h-4 comprising derived and/or modified sequence from HRSV(A2)__F-del (opt1)
gggagagggcgcuuggcuugcaaggacccugagcugcggcauugaagcacacccaacccaacucgacugaagucagccucacugaaccggaucugagaaucuucucucucugggcuugccagggcucuccgaaccuagcuagcauccucuucaauuccaacuagaaagcuuaccauggagcugcucauccugaaggccaacgccaucaccaccauccugacggcggugaccuucugcuucgccagcggccagaacaucaccgaggaguucuaccaguccacgugcagcgccgucuccaagggguaccucagcgcccugcgcaccggcugguacaccuccgugaucaccaucgagcugagcaacaucaaggagaacaagugcaacgggaccgacgccaaggugaagcucaucaagcaggagcuggacaaguacaagaacgcggucacggagcugcagcuccugaugcaguccacccccgccaccaacaaccgggcccgccgggagcugccgcgcuucaugaacuacacccucaacaacgccaagaagacgaacgugacccugagcaagaagcggaagcgccgguuccugggcuuccuccugggggugggcuccgcgaucgccagcggcgucgccguguccaaggugcugcaccucgagggggaggucaacaagaucaagagcgcccugcuguccaccaacaaggccguggugagccucuccaacggcgucagcgugcugaccuccaaggugcuggaccucaagaacuacaucgacaagcagcugcugcccaucgucaacaagcagagcugcuccaucagcaacaucgagacggugaucgaguuccagcagaagaacaaccgccuccuggagaucacccgggaguucagcgugaacgcgggggucaccacccccguguccacguacaugcugaccaacagcgagcuccugucccugaucaacgacaugcccaucaccaacgaccagaagaagcucaugagcaacaacgugcagaucguccgccagcaguccuacagcaucauguccaucaucaaggaggaggugcuggccuacgugguccagcugccgcucuacggcgugaucgacacccccugcuggaagcugcacacgagcccccugugcaccaccaacaccaaggagggguccaacaucugccucacgcggaccgaccgcggcugguacugcgacaacgccggcagcgucuccuucuucccccaggccgagaccugcaaggugcagagcaaccggguguucugcgacaccaugaacucccugacgcugccgagcgaggucaaccucugcaacguggacaucuucaaccccaaguacgacugcaagaucaugaccuccaagaccgacgugagcuccagcgucaucaccucccugggggccaucgugagcugcuacggcaagacgaagugcaccgcgagcaacaagaaccgcgggaucaucaagaccuucuccaacggcugcgacuacgugagcaacaagggcgucgacaccguguccguggggaacacccuguacuacgucaacaagcaggagggcaagagccucuacgugaagggggagcccaucaucaacuucuacgacccccugguguucccguccgacgaguucgacgccagcaucucccaggucaacgagaagaucaaccagagccuggccuucauccggaaguccgacgagcuccugcacaacgugaacgccggcaagagcacgaccaacaucaugaucaccaccaucaucaucgugaucaucgucauccugcugucccucaucgccguggggcugcugcucuacugcaaggcgcgcugaggacuaguaauaaggaaacuguaugaaugucugugggcaggaagugaagagauccuucuguaaagguuuuuggaauuaugucugcugaauaauaaacuuuuuugaaauaauaaaucugguagaaaaaugagaucuaaaaaaaaaaaaaaaaaaaaaaaaaaaaaaaaaaaaaaaaaaaaaaaaaaaaaaaaaaaaaaaaugcaucccccccccccccccccccccccccccccccaaaggcucuuuucagagccaccagaauu

SEQ ID NO: 847 - RNA, 2099 nt, Artificial Sequence
  mRNA product Design h-4 comprising derived and/or modified sequence from HRSV(A2)__F-del (opt2)
gggagagggcgcuuggcuugcaaggacccugagcugcggcauugaagcacacccaacccaacucgacugaagucagccucacugaaccggaucugagaaucuucucucucugggcuugccagggcucuccgaaccuagcuagcauccucuucaauuccaacuagaaagcuuaccauggagcuccucauccucaaggccaacgccaucaccaccauccucaccgccgucaccuucugcuucgccuccggccagaacaucaccgaggaguucuaccaguccaccugcuccgccgucuccaagggcuaccucuccgcccuccgcaccggcugguacaccuccgucaucaccaucgagcucuccaacaucaaggagaacaagugcaacggcaccgacgccaaggucaagcucaucaagcaggagcucgacaaguacaagaacgccgucaccgagcuccagcuccucaugcaguccacccccgccaccaacaaccgcgcccgccgcgagcucccccgcuucaugaacuacacccucaacaacgccaagaagaccaacgucacccucuccaagaagcgcaagcgccgcuuccucggcuuccuccucggcgucggcuccgccaucgccuccggcgucgccgucuccaagguccuccaccucgagggcgaggucaacaagaucaaguccgcccuccucuccaccaacaaggccgucgucucccucuccaacggcgucuccguccucaccuccaagguccucgaccucaagaacuacaucgacaagcagcuccuccccaucgucaacaagcaguccugcuccaucuccaacaucgagaccgucaucgaguuccagcagaagaacaaccgccuccucgagaucacccgcgaguucuccgucaacgccggcgucaccacccccgucuccaccuacaugcucaccaacuccgagcuccucucccucaucaacgacaugcccaucaccaacgaccagaagaagcucauguccaacaacguccagaucguccgccagcaguccuacuccaucauguccaucaucaaggaggagguccucgccuacgucguccagcucccccucuacggcgucaucgacacccccugcuggaagcuccacaccuccccccucugcaccaccaacaccaaggagggcuccaacaucugccucacccgcaccgaccgcggcugguacugcgacaacgccggcuccgucuccuucuucccccaggccgagaccugcaagguccaguccaaccgcgucuucugcgacaccaugaacucccucacccuccccuccgaggucaaccucugcaacgucgacaucuucaaccccaaguacgacugcaagaucaugaccuccaagaccgacgucuccuccuccgucaucaccucccucggcgccaucgucuccugcuacggcaagaccaagugcaccgccuccaacaagaaccgcggcaucaucaagaccuucuccaacggcugcgacuacgucuccaacaagggcgucgacaccgucuccgucggcaacacccucuacuacgucaacaagcaggagggcaagucccucuacgucaagggcgagcccaucaucaacuucuacgacccccucgucuuccccuccgacgaguucgacgccuccaucucccaggucaacgagaagaucaaccagucccucgccuucauccgcaaguccgacgagcuccuccacaacgucaacgccggcaaguccaccaccaacaucaugaucaccaccaucaucaucgucaucaucgucauccuccucucccucaucgccgucggccuccuccucuacugcaaggcccgcugaggacuaguaauaaggaaacuguaugaaugucugugggcaggaagugaagagauccuucuguaaagguuuuuggaauuaugucugcugaauaauaaacuuuuuugaaauaauaaaucugguagaaaaaugagaucuaaaaaaaaaaaaaaaaaaaaaaaaaaaaaaaaaaaaaaaaaaaaaaaaaaaaaaaaaaaaaaaaugcaucccccccccccccccccccccccccccccccaaaggcucuuuucagagccaccagaauu

SEQ ID NO: 848 - RNA, 2099 nt, Artificial Sequence
  mRNA product Design h-4 comprising derived and/or modified sequence from HRSV(A2)__F-del (opt3)
gggagagggcgcuuggcuugcaaggacccugagcugcggcauugaagcacacccaacccaacucgacugaagucagccucacugaaccggaucugagaaucuucucucucugggcuugccagggcucuccgaaccuagcuagcauccucuucaauuccaacuagaaagcuuaccauggagcugcucauccuuaaggccaacgcuauuaccacaauacugacugcagugacguucugcuuugccagcggccagaauaucaccgaagaguucuaccaauccacauguucugcggucucaaaaggguauuugagugcuuuaagaacuggaugguacaccagcguuauuacaaucgaacuguccaacauuaaggagaauaaaugcaacgguaccgacgccaaggugaaacuaaucaagcaggaacucgauaaguauaaaaaugcaguaacugagcugcagcuucugaugcagucuacacccgccaccaacaauagggcucggcgcgaguugccucgauuuaugaacuacacgcucaauaacgcaaagaaaacuaaugugacccugucgaagaaacguaagagaagguuccugggcuuucucuuaggggucggaucagccauagcuagcggcguggccguuaguaaggugcugcaccuugaaggugaggucaacaaaaucaaguccgcguugcugucuacaaauaaagcagugguaagccuauccaacgggguuucagugcucacuucuaagguccuggaccuuaaaaauuauauugauaagcaacuguugccaaucgugaacaaacagagcuguucuauuuccaacaucgaaaccgugauagaguuccagcagaagaauaaccggcuccuggagauuacacgcgaauuuucagucaaugccggaguuaccacgccggugagcacuuacauguuaacaaacagugagcugcucucucuuaucaaugacaugcccauuaccaacgaucaaaagaaacugauguccaauaacguacagaucgugagacagcagagcuauucgaucaugucuauuauaaaggaagaggucuuggcuuacgugguucaacuaccucuguacggcgugaucgacacuccaugcuggaaacuccauacauccccacuguguaccacgaauaccaaggaaggcucaaacauuugccuuacaaggacugaucgggggugguauugugacaaugccggaagugucagcuucuuuccucaggcagagaccugcaaagugcaguccaaccgcguauucugugauacaaugaauagucugacuuugccaagcgagguuaaccucugcaauguggacaucuuuaaccccaaguacgauuguaagauaaugaccucaaaaacagacgucaguuccagcgugauuaccucucugggugcuaucgucucaugcuauggcaagacuaaaugcacggccaguaacaagaaucgagggaucauuaaaacauucagcaacggaugugauuacguguccaauaagggcguugacaccgugucuguagguaacacuuuauauuacgucaauaagcaagaagggaaaucgcuguaugugaagggagagccuaucauuaacuuuuacgacccccuaguuuucccgagcgaugaauuugacgcguccauaucacaggugaaugagaaaaucaaccagagucucgccuucauuagaaagucugaugaacugcuucacaaugucaacgcaggcaaaagcaccacaaauaucaugaucaccacuauuauaaucgugauuaucguaauuuugcugucccucaucgcugugggccugcuucuguacugcaaggccaggugaggacuaguaauaaggaaacuguaugaaugucugugggcaggaagugaagagauccuucuguaaagguuuuuggaauuaugucugcugaauaauaaacuuuuuugaaauaauaaaucugguagaaaaaugagaucuaaaaaaaaaaaaaaaaaaaaaaaaaaaaaaaaaaaaaaaaaaaaaaaaaaaaaaaaaaaaaaaaugcaucccccccccccccccccccccccccccccccaaaggcucuuuucagagccaccagaauu

SEQ ID NO: 849 - RNA, 2099 nt, Artificial Sequence
  mRNA product Design h-4 comprising derived and/or modified sequence from HRSV(A2)__F-del (opt4)
gggagagggcgcuuggcuugcaaggacccugagcugcggcauugaagcacacccaacccaacucgacugaagucagccucacugaaccggaucugagaaucuucucucucugggcuugccagggcucuccgaaccuagcuagcauccucuucaauuccaacuagaaagcuuaccauggagcugcugauccugaaggccaacgccaucaccaccauccugaccgccgugaccuucugcuucgccagcggccagaacaucaccgaggaguucuaccagagcaccugcagcgccgugagcaagggcuaccugagcgcccugagaaccggcugguacaccagcgugaucaccaucgagcugagcaacaucaaggagaacaagugcaacggcaccgacgccaaggugaagcugaucaagcaggagcuggacaaguacaagaacgccgugaccgagcugcagcugcugaugcagagcacccccgccaccaacaacagagccagaagagagcugcccagauucaugaacuacacccugaacaacgccaagaagaccaacgugacccugagcaagaagagaaagagaagauuccugggcuuccugcugggcgugggcagcgccaucgccagcggcguggccgugagcaaggugcugcaccuggagggcgaggugaacaagaucaagagcgcccugcugagcaccaacaaggccguggugagccugagcaacggcgugagcgugcugaccagcaaggugcuggaccugaagaacuacaucgacaagcagcugcugcccaucgugaacaagcagagcugcagcaucagcaacaucgagaccgugaucgaguuccagcagaagaacaacagacugcuggagaucaccagagaguucagcgugaacgccggcgugaccacccccgugagcaccuacaugcugaccaacagcgagcugcugagccugaucaacgacaugcccaucaccaacgaccagaagaagcugaugagcaacaacgugcagaucgugagacagcagagcuacagcaucaugagcaucaucaaggaggaggugcuggccuacguggugcagcugccccuguacggcgugaucgacacccccugcuggaagcugcacaccagcccccugugcaccaccaacaccaaggagggcagcaacaucugccugaccagaaccgacagaggcugguacugcgacaacgccggcagcgugagcuucuucccccaggccgagaccugcaaggugcagagcaacagaguguucugcgacaccaugaacagccugacccugcccagcgaggugaaccugugcaacguggacaucuucaaccccaaguacgacugcaagaucaugaccagcaagaccgacgugagcagcagcgugaucaccagccugggcgccaucgugagcugcuacggcaagaccaagugcaccgccagcaacaagaacagaggcaucaucaagaccuucagcaacggcugcgacuacgugagcaacaagggcguggacaccgugagcgugggcaacacccuguacuacgugaacaagcaggagggcaagagccuguacgugaagggcgagcccaucaucaacuucuacgacccccugguguuccccagcgacgaguucgacgccagcaucagccaggugaacgagaagaucaaccagagccuggccuucaucagaaagagcgacgagcugcugcacaacgugaacgccggcaagagcaccaccaacaucaugaucaccaccaucaucaucgugaucaucgugauccugcugagccugaucgccgugggccugcugcuguacugcaaggccagaugaggacuaguaauaaggaaacuguaugaaugucugugggcaggaagugaagagauccuucuguaaagguuuuuggaauuaugucugcugaauaauaaacuuuuuugaaauaauaaaucugguagaaaaaugagaucuaaaaaaaaaaaaaaaaaaaaaaaaaaaaaaaaaaaaaaaaaaaaaaaaaaaaaaaaaaaaaaaaugcaucccccccccccccccccccccccccccccccaaaggcucuuuucagagccaccagaauu

SEQ ID NO: 850 - RNA, 2099 nt, Artificial Sequence
  mRNA product Design h-4 comprising derived and/or modified sequence from HRSV(A2)__F-del (opt5)
gggagagggcgcuuggcuugcaaggacccugagcugcggcauugaagcacacccaacccaacucgacugaagucagccucacugaaccggaucugagaaucuucucucucugggcuugccagggcucuccgaaccuagcuagcauccucuucaauuccaacuagaaagcuuaccauggagcugcucauccugaaggccaacgcuauuaccacaauccuuacggccgugaccuucugcuuugcgagcggccagaauauuacagaagaguucuaccaauccaccuguucugcugucagcaaaggguaucuguccgcccucagaacaggaugguacaccucuguuaucacaauugaacugagcaacaucaaggagaauaaaugcaacggcaccgacgccaaggugaaacuuaucaagcaggaacuggauaaguauaaaaaugcugugacggagcuccagcugcugaugcaguccacccccgccacaaacaaucgggcucgcagagagcucccucgguuuaugaacuacacccugaauaacgccaagaaaacaaaugucacccuuucuaagaaacgcaagagacgguuccugggguuucuccugggagugggcagcgcgauugccuccgggguugcugugagcaagguccuucaccuggaaggagaggugaacaaaaucaagucugcccuccuguccacgaauaaagcuguugugagccugucuaacggcgucuccgugcucacaagcaaggugcuggaccuuaaaaauuauauugauaagcaacugcucccgaucgucaacaaacagucuuguuccauuagcaacaucgaaaccguuauugaguuccagcagaagaauaaccgccugcuugagaucacaagagaauuuuccgugaaugccggcgugaccacccccgucucuacauacaugcugacgaacagcgagcuccugucccugaucaaugacaugccuauuaccaacgaucaaaagaaacucaugagcaauaacgugcagaucguucggcagcagucuuauuccauuaugagcaucauuaaggaagaggugcuggcguacgucgugcaacuuccccuguacgggguuaucgacacaccuugcuggaaacuccauaccucuccccuguguacaaccaauacgaaggaaggaagcaacaucugccuuacacgcaccgauagaggcugguauugugacaaugccggguccgugucuuucuuuccucaggcugagaccugcaaaguccagagcaaccggguguucugugauacaaugaacucccugacccucccgagcgaggucaaucugugcaauguggacauuuuuaaccccaaguacgauuguaagaucaugacaucuaaaacggacguuuccagcucugugauuaccucccugggagccaucgucagcugcuauggcaagacaaaaugcaccgcuuccaacaagaaucgcgggauuaucaaaacauucucuaacggaugugauuacgugagcaauaagggcguugacaccguguccgucggcaacacgcucuauuacgugaauaagcaagaagggaaaucucuguaugugaagggagagccuaucauuaacuuuuacgacccccuuguuuucccuagcgaugaauuugacgccuccaucagccaggucaaugagaaaauuaaccagucucuggccuucaucagaaaguccgaugaacuccugcacaaugugaacgcuggcaaaagcaccacaaauauuaugaucaccacaauuaucaucgugauuaucgucauucugcuuucucucaucgcgguggggcugcugcucuacugcaaggcccggugaggacuaguaauaaggaaacuguaugaaugucugugggcaggaagugaagagauccuucuguaaagguuuuuggaauuaugucugcugaauaauaaacuuuuuugaaauaauaaaucugguagaaaaaugagaucuaaaaaaaaaaaaaaaaaaaaaaaaaaaaaaaaaaaaaaaaaaaaaaaaaaaaaaaaaaaaaaaaugcaucccccccccccccccccccccccccccccccaaaggcucuuuucagagccaccagaauu

SEQ ID NO: 851 - RNA, 2099 nt, Artificial Sequence
  mRNA product Design h-4 comprising derived and/or modified sequence from HRSV(A2)__F-del (opt6)
gggagagggcgcuuggcuugcaaggacccugagcugcggcauugaagcacacccaacccaacucgacugaagucagccucacugaaccggaucugagaaucuucucucucugggcuugccagggcucuccgaaccuagcuagcauccucuucaauuccaacuagaaagcuuaccauggaauuacuaauacucaaagccaacgcaauaacaacaauacuaacagcaguaacauucugcuucgcaucaggacaaaacaucacagaagaauuuuaccaaaguacaugcagugcagucucuaaaggauaccucagugccuuacgcacaggaugguacacaucaguaauaacaaucgaacuuucaaacauaaaagaaaacaaaugcaauggaaccgacgccaaaguaaaacuaaucaaacaagaacuagacaaauauaaaaaugcaguaacagaauuacaacuccuaaugcaauccacaccagcaacaaauaacagagcaagacgagaacucccucgauucaugaauuacacauuaaacaacgcaaaaaaaacuaacguaacuuuaucaaaaaaaagaaaacguagauuucuaggauuccuacuaggcguaggguccgccauugcaucaggaguagcaguuagcaaaguauuacauuuagaaggagaaguaaauaaaaucaaaagcgcacuacucucaaccaacaaagcaguaguaucacucucaaacggaguaucaguacuaacauccaaaguacucgaccucaaaaacuacauagacaaacaauuacuacccauaguaaacaaacaaucaugcucuauaucaaauaucgaaacaguaaucgaauuucaacaaaaaaacaaucgacuacuugaaauaacaagagaguucuccgucaaugccggagucaccacaccagucucaacauacaugcuaaccaacucugaacuccuaucacuaauaaaugacaugccaauaacaaacgaccaaaaaaaacuaaugucaaauaacguacaaauaguacgacaacaaaguuauuccauaaugaguauaaucaaagaagaaguguuagcauacguaguccaacuaccauuauauggaguaauagacacaccauguuggaaauuacacaccucaccacucugcacuaccaauacaaaagaaggcucaaauauaugccuaacucgcacagacagaggcugguacugcgauaacgcaggauccguaucuuucuuuccccaagcagaaacuugcaaaguacaaucaaacagagucuucugcgacaccaugaauagucucacauuaccaucugaaguaaaccuauguaacguagauauauucaauccaaaauacgacugcaaaauaaugacaucaaaaaccgacgucucuagcaguguaaucacaucacuaggagcaauaguaagcugcuauggaaaaacaaaauguacagcaucaaacaaaaacaggggaauaauaaaaaccuucucaaacggaugugacuacguaucaaauaaaggcguagacacaguaagcguaggaaacacccuauacuacguuaacaaacaagaagggaaaucauuauacguaaaaggagaaccaauaauaaacuucuacgauccacucguauucccauccgacgaauuugacgccagcauaucccaaguuaacgaaaaaauaaaccaaucacuugcauuuauacgaaaaucugaugaacuucuccacaacguaaaugcaggaaaauccaccaccaauauaaugaucacaacuaucaucauaguaauaaucgucauuuuacuaucauuaauagcaguuggccuacuucuauacugcaaagcaagauaaggacuaguaauaaggaaacuguaugaaugucugugggcaggaagugaagagauccuucuguaaagguuuuuggaauuaugucugcugaauaauaaacuuuuuugaaauaauaaaucugguagaaaaaugagaucuaaaaaaaaaaaaaaaaaaaaaaaaaaaaaaaaaaaaaaaaaaaaaaaaaaaaaaaaaaaaaaaaugcaucccccccccccccccccccccccccccccccaaaggcucuuuucagagccaccagaauu

SEQ ID NO: 852 - RNA, 2099 nt, Artificial Sequence
  mRNA product Design h-4 comprising derived and/or modified sequence from HRSV(A2)__F-del (opt11)
gggagagggcgcuuggcuugcaaggacccugagcugcggcauugaagcacacccaacccaacucgacugaagucagccucacugaaccggaucugagaaucuucucucucugggcuugccagggcucuccgaaccuagcuagcauccucuucaauuccaacuagaaagcuuaccauggaacuacuaauccuaaaagccaacgcgaucaccaccauccuaacggcagucaccuucugcuucgcaucaggccaaaacaucacagaagaguucuaccaaagcacaugcuccgccguauccaaaggcuaccucagcgcccuacgcacaggcugguacacaucugucaucaccauagaacucuccaacaucaaagaaaacaaaugcaacggcacugacgccaaaguaaagcugaucaaacaagaacucgacaaauacaaaaacgcagucaccgaacuccaacuacucaugcaauccaccccugcaaccaacaacagggcccgccgcgaacucccccgcuucaugaacuacacuuuaaacaacgccaaaaagaccaacgucacacucagcaagaaacggaaacgacgauuccuaggguuucuccuaggcgucggcucggcaaucgccuccggcgucgccguaagcaaaguacuacaccuagaaggcgaagugaacaaaaucaaaagugcccuucucuccaccaacaaggccguagucucucuauccaacggagucucaguccucaccucaaagguccucgaccucaaaaacuacaucgacaaacaacuacuccccauugucaacaagcagucaugcuccauaucaaacaucgaaaccgucaucgaguuccaacagaaaaacaaccgacuccucgaaauaaccagagaguucucggucaacgccggcgucaccaccccagucagcaccuacaugcucacuaacuccgaacuccuaucccucaucaacgacaugccaauuaccaacgaccaaaagaaacuaaugucgaacaacguucaaaucguccgacaacaaaguuacuccaucaugagcauaaucaaagaagaaguucuagcguacgucguccaacucccacuauacggcgucaucgacacuccgugcuggaaacuccacacaucaccccuauguacaaccaacacaaaagaaggcagcaacaucugccucacccgcaccgaccgagggugguauugcgauaacgcuggcagcgucuccuucuucccccaagccgaaaccugcaaaguccaaucaaacagaguauucugcgacaccaugaacucccuuacucucccuagcgaagucaaccucugcaacguugacauauucaaccccaaauacgacugcaaaaucaugaccuccaagaccgacgucuccuccuccgucaucacaucucuaggugccauugucuccugcuacggaaaaaccaaaugcacagccuccaacaaaaaccgcggcaucauaaaaaccuucuccaacggcugcgacuacgucaguaauaaaggcgucgacacgguauccguugggaauacgcuuuacuacguaaauaaacaagaaggcaaaucccucuacgucaaaggugaacccaucauaaacuucuacgacccgcuuguguucccauccgacgaguucgacgccagcaucagccaggucaacgaaaagaucaaccaaucccuagccuucauccgcaaaagcgacgaacuacuacacaacgucaacgccggaaaauccacaaccaacaucaugaucaccaccaucaucaucgucaucaucguaauccuacucucucucaucgccgucggccuccuacuguacuguaaagcccgauagggacuaguaauaaggaaacuguaugaaugucugugggcaggaagugaagagauccuucuguaaagguuuuuggaauuaugucugcugaauaauaaacuuuuuugaaauaauaaaucugguagaaaaaugagaucuaaaaaaaaaaaaaaaaaaaaaaaaaaaaaaaaaaaaaaaaaaaaaaaaaaaaaaaaaaaaaaaaugcaucccccccccccccccccccccccccccccccaaaggcucuuuucagagccaccagaauu

SEQ ID NO: 853 - RNA, 2115 nt, Artificial Sequence
  mRNA product Design h-5 comprising derived and/or modified sequence from HRSV(A2)__F-del (artificial)
gggagagggcgcuuggcuugcaaggacccugagcugcggcauugaagcacacccaacccaacucgacugaagucagccucacugaaccggaucugagaaucuucucucucugggcuugccagggcucuccgaaccuagcuagcauccucuucaauuccaacuagaaagcuuaccauggaguugcuaauccucaaagcaaaugcaauuaccacaauccucacugcagucacauuuuguuuugcuucuggucaaaacaucacugaagaauuuuaucaaucaacaugcagugcaguuagcaaaggcuaucuuagugcucugagaacugguugguauaccaguguuauaacuauagaauuaaguaauaucaaggaaaauaaguguaauggaacagaugcuaagguaaaauugauaaaacaagaauuagauaaauauaaaaaugcuguaacagaauugcaguugcucaugcaaagcacaccagcaacaaacaaucgagccagaagagaacuaccaagguuuaugaauuauacacucaacaaugccaaaaaaaccaauguaacauuaagcaagaaaaggaaaagaagauuucuugguuuuuuguuagguguuggaucugcaaucgccaguggcguugcuguaucuaagguccugcaccuagaaggggaagugaacaagaucaaaagugcucuacuauccacaaacaaggcuguagucagcuuaucaaauggaguuagugucuuaaccagcaaaguguuagaccucaaaaacuauauagauaaacaauuguuaccuauugugaacaagcaaagcugcagcauaucaaauauagaaacugugauagaguuccaacaaaagaacaacagacuacuagagauuaccagggaauuuaguguuaaugcagguguaacuacaccuguaagcacuuacauguuaacuaauagugaauuauugucauuaaucaaugauaugccuauaacaaaugaucagaaaaaguuaauguccaacaauguucaaauaguuagacagcaaaguuacucuaucauguccauaauaaaagaggaagucuuagcauauguaguacaauuaccacuauaugguguuauagauacacccuguuggaaacuacacacauccccucuauguacaaccaacacaaaagaaggguccaacaucuguuuaacaagaacugacagaggaugguacugugacaaugcaggaucaguaucuuucuucccacaagcugaaacauguaaaguucaaucaaaucgaguauuuugugacacaaugaacaguuuaacauuaccaagugaaguaaaucucugcaauguugacauauucaaccccaaauaugauuguaaaauuaugacuucaaaaacagauguaagcagcuccguuaucacaucucuaggagccauugugucaugcuauggcaaaacuaaauguacagcauccaauaaaaaucguggaaucauaaagacauuuucuaacgggugcgauuauguaucaaauaaagggguggacacugugucuguagguaacacauuauauuauguaaauaagcaagaagguaaaagucucuauguaaaaggugaaccaauaauaaauuucuaugacccauuaguauuccccucugaugaauuugaugcaucaauaucucaagucaacgagaagauuaaccagagccuagcauuuauucguaaauccgaugaauuauuacauaauguaaaugcugguaaauccaccacaaauaucaugauaacuacuauaauuauagugauuauaguaauauuguuaucauuaauugcuguuggacugcucuuauacuguaaggccagauaaggacuaguacuggcugcaucucccuuuccucuguccuccauccuucucccaggauggugaagggggaccugguacccagugauccccaccccaggauccuaaaucaugacuuaccugcuaauaaaaacucauuggaaaagugagaagaucuaaaaaaaaaaaaaaaaaaaaaaaaaaaaaaaaaaaaaaaaaaaaaaaaaaaaaaaaaaaaaaaaugcaucccccccccccccccccccccccccccccccaaaggcucuuuucagagccaccagaauu

SEQ ID NO: 854 - RNA, 2115 nt, Artificial Sequence
  mRNA product Design h-5 comprising derived and/or modified sequence from HRSV(A2)__F-del (opt1)
gggagagggcgcuuggcuugcaaggacccugagcugcggcauugaagcacacccaacccaacucgacugaagucagccucacugaaccggaucugagaaucuucucucucugggcuugccagggcucuccgaaccuagcuagcauccucuucaauuccaacuagaaagcuuaccauggagcugcucauccugaaggccaacgccaucaccaccauccugacggcggugaccuucugcuucgccagcggccagaacaucaccgaggaguucuaccaguccaccugcagcgccgucuccaagggguaccucagcgcccugcggacgggcugguacaccuccgugaucaccaucgagcugagcaacaucaaggagaacaagugcaacgggaccgacgccaaggugaagcucaucaagcaggagcuggacaaguacaagaacgcggucacggagcugcagcuccugaugcaguccaccccggcaaccaacaaccgcgcccggcgcgagcugccccgguucaugaacuacacccucaacaacgccaagaagacgaacgugacccugagcaagaagcgcaagcggcgcuuccugggcuuccuccugggggugggcuccgccaucgcgagcggcgucgccguguccaaggugcugcaccucgagggggaggucaacaagaucaagagcgcccugcuguccaccaacaaggccguggugagccucuccaacggcgucagcgugcugaccuccaaggugcuggaccucaagaacuacaucgacaagcagcugcugcccaucgucaacaagcagagcugcuccaucagcaacaucgagacggugaucgaguuccagcagaagaacaaccggcuccuggagaucacccgcgaguucagcgugaacgccggggucaccacccccguguccacguacaugcugaccaacagcgagcuccugucccugaucaacgacaugccgaucaccaacgaccagaagaagcucaugagcaacaacgugcagaucguccggcagcaguccuacagcaucauguccaucaucaaggaggaggugcuggcguacgugguccagcugccccucuacggcgugaucgacacccccugcuggaagcugcacacgagcccccugugcaccaccaacaccaaggagggguccaacaucugccucacgcgcaccgaccggggcugguacugcgacaacgccggcagcgucuccuucuucccgcaggccgagaccugcaaggugcagagcaaccgcguguucugcgacaccaugaacucccugacgcugcccagcgagguaaaccucugcaacgucgacaucuucaaccccaaguacgacugcaagaucaugaccuccaagaccgacgugagcuccagcgugaucaccucccugggggccaucgucagcugcuacggcaagacgaagugcaccgccagcaacaagaaccgggggaucaucaagaccuucuccaacggcugcgacuacgugagcaacaagggcguggacaccguguccgucgggaacacccuguacuacgugaacaagcaggagggcaagagccucuacgugaagggggagcccaucaucaacuucuacgacccgcuggucuuccccuccgacgaguucgacgcgagcaucucccaggugaacgagaagaucaaccagagccuggccuucauccgcaaguccgacgagcugcuccacaacgugaacgccggcaagagcacgaccaacaucaugaucaccaccaucaucaucgucaucaucgugauccugcugucccucaucgccguggggcugcugcucuacugcaaggcccggugaggacuaguacuggcugcaucucccuuuccucuguccuccauccuucucccaggauggugaagggggaccugguacccagugauccccaccccaggauccuaaaucaugacuuaccugcuaauaaaaacucauuggaaaagugagaagaucuaaaaaaaaaaaaaaaaaaaaaaaaaaaaaaaaaaaaaaaaaaaaaaaaaaaaaaaaaaaaaaaaugcaucccccccccccccccccccccccccccccccaaaggcucuuuucagagccaccagaauu

SEQ ID NO: 855 - RNA, 2115 nt, Artificial Sequence
  mRNA product Design h-5 comprising derived and/or modified sequence from HRSV(A2)__F-del (opt1)
gggagagggcgcuuggcuugcaaggacccugagcugcggcauugaagcacacccaacccaacucgacugaagucagccucacugaaccggaucugagaaucuucucucucugggcuugccagggcucuccgaaccuagcuagcauccucuucaauuccaacuagaaagcuuaccauggagcugcucauccugaaggccaacgccaucaccaccauccugacggcggugaccuucugcuucgccagcggccagaacaucaccgaggaguucuaccaguccacgugcagcgccgucuccaagggguaccucagcgcccugcgcaccggcugguacaccuccgugaucaccaucgagcugagcaacaucaaggagaacaagugcaacgggaccgacgccaaggugaagcucaucaagcaggagcuggacaaguacaagaacgcggucacggagcugcagcuccugaugcaguccacccccgccaccaacaaccgggcccgccgggagcugccgcgcuucaugaacuacacccucaacaacgccaagaagacgaacgugacccugagcaagaagcggaagcgccgguuccugggcuuccuccugggggugggcuccgcgaucgccagcggcgucgccguguccaaggugcugcaccucgagggggaggucaacaagaucaagagcgcccugcuguccaccaacaaggccguggugagccucuccaacggcgucagcgugcugaccuccaaggugcuggaccucaagaacuacaucgacaagcagcugcugcccaucgucaacaagcagagcugcuccaucagcaacaucgagacggugaucgaguuccagcagaagaacaaccgccuccuggagaucacccgggaguucagcgugaacgcgggggucaccacccccguguccacguacaugcugaccaacagcgagcuccugucccugaucaacgacaugcccaucaccaacgaccagaagaagcucaugagcaacaacgugcagaucguccgccagcaguccuacagcaucauguccaucaucaaggaggaggugcuggccuacgugguccagcugccgcucuacggcgugaucgacacccccugcuggaagcugcacacgagcccccugugcaccaccaacaccaaggagggguccaacaucugccucacgcggaccgaccgcggcugguacugcgacaacgccggcagcgucuccuucuucccccaggccgagaccugcaaggugcagagcaaccggguguucugcgacaccaugaacucccugacgcugccgagcgaggucaaccucugcaacguggacaucuucaaccccaaguacgacugcaagaucaugaccuccaagaccgacgugagcuccagcgucaucaccucccugggggccaucgugagcugcuacggcaagacgaagugcaccgcgagcaacaagaaccgcgggaucaucaagaccuucuccaacggcugcgacuacgugagcaacaagggcgucgacaccguguccguggggaacacccuguacuacgucaacaagcaggagggcaagagccucuacgugaagggggagcccaucaucaacuucuacgacccccugguguucccguccgacgaguucgacgccagcaucucccaggucaacgagaagaucaaccagagccuggccuucauccggaaguccgacgagcuccugcacaacgugaacgccggcaagagcacgaccaacaucaugaucaccaccaucaucaucgugaucaucgucauccugcugucccucaucgccguggggcugcugcucuacugcaaggcgcgcugaggacuaguacuggcugcaucucccuuuccucuguccuccauccuucucccaggauggugaagggggaccugguacccagugauccccaccccaggauccuaaaucaugacuuaccugcuaauaaaaacucauuggaaaagugagaagaucuaaaaaaaaaaaaaaaaaaaaaaaaaaaaaaaaaaaaaaaaaaaaaaaaaaaaaaaaaaaaaaaaugcaucccccccccccccccccccccccccccccccaaaggcucuuuucagagccaccagaauu

SEQ ID NO: 856 - RNA, 2115 nt, Artificial Sequence
  mRNA product Design h-5 comprising derived and/or modified sequence from HRSV(A2)__F-del (opt2)
gggagagggcgcuuggcuugcaaggacccugagcugcggcauugaagcacacccaacccaacucgacugaagucagccucacugaaccggaucugagaaucuucucucucugggcuugccagggcucuccgaaccuagcuagcauccucuucaauuccaacuagaaagcuuaccauggagcuccucauccucaaggccaacgccaucaccaccauccucaccgccgucaccuucugcuucgccuccggccagaacaucaccgaggaguucuaccaguccaccugcuccgccgucuccaagggcuaccucuccgcccuccgcaccggcugguacaccuccgucaucaccaucgagcucuccaacaucaaggagaacaagugcaacggcaccgacgccaaggucaagcucaucaagcaggagcucgacaaguacaagaacgccgucaccgagcuccagcuccucaugcaguccacccccgccaccaacaaccgcgcccgccgcgagcucccccgcuucaugaacuacacccucaacaacgccaagaagaccaacgucacccucuccaagaagcgcaagcgccgcuuccucggcuuccuccucggcgucggcuccgccaucgccuccggcgucgccgucuccaagguccuccaccucgagggcgaggucaacaagaucaaguccgcccuccucuccaccaacaaggccgucgucucccucuccaacggcgucuccguccucaccuccaagguccucgaccucaagaacuacaucgacaagcagcuccuccccaucgucaacaagcaguccugcuccaucuccaacaucgagaccgucaucgaguuccagcagaagaacaaccgccuccucgagaucacccgcgaguucuccgucaacgccggcgucaccacccccgucuccaccuacaugcucaccaacuccgagcuccucucccucaucaacgacaugcccaucaccaacgaccagaagaagcucauguccaacaacguccagaucguccgccagcaguccuacuccaucauguccaucaucaaggaggagguccucgccuacgucguccagcucccccucuacggcgucaucgacacccccugcuggaagcuccacaccuccccccucugcaccaccaacaccaaggagggcuccaacaucugccucacccgcaccgaccgcggcugguacugcgacaacgccggcuccgucuccuucuucccccaggccgagaccugcaagguccaguccaaccgcgucuucugcgacaccaugaacucccucacccuccccuccgaggucaaccucugcaacgucgacaucuucaaccccaaguacgacugcaagaucaugaccuccaagaccgacgucuccuccuccgucaucaccucccucggcgccaucgucuccugcuacggcaagaccaagugcaccgccuccaacaagaaccgcggcaucaucaagaccuucuccaacggcugcgacuacgucuccaacaagggcgucgacaccgucuccgucggcaacacccucuacuacgucaacaagcaggagggcaagucccucuacgucaagggcgagcccaucaucaacuucuacgacccccucgucuuccccuccgacgaguucgacgccuccaucucccaggucaacgagaagaucaaccagucccucgccuucauccgcaaguccgacgagcuccuccacaacgucaacgccggcaaguccaccaccaacaucaugaucaccaccaucaucaucgucaucaucgucauccuccucucccucaucgccgucggccuccuccucuacugcaaggcccgcugaggacuaguacuggcugcaucucccuuuccucuguccuccauccuucucccaggauggugaagggggaccugguacccagugauccccaccccaggauccuaaaucaugacuuaccugcuaauaaaaacucauuggaaaagugagaagaucuaaaaaaaaaaaaaaaaaaaaaaaaaaaaaaaaaaaaaaaaaaaaaaaaaaaaaaaaaaaaaaaaugcaucccccccccccccccccccccccccccccccaaaggcucuuuucagagccaccagaauu

SEQ ID NO: 857 - RNA, 2115 nt, Artificial Sequence
  mRNA product Design h-5 comprising derived and/or modified sequence from HRSV(A2)__F-del (opt3)
gggagagggcgcuuggcuugcaaggacccugagcugcggcauugaagcacacccaacccaacucgacugaagucagccucacugaaccggaucugagaaucuucucucucugggcuugccagggcucuccgaaccuagcuagcauccucuucaauuccaacuagaaagcuuaccauggagcugcucauccuuaaggccaacgcuauuaccacaauacugacugcagugacguucugcuuugccagcggccagaauaucaccgaagaguucuaccaauccacauguucugcggucucaaaaggguauuugagugcuuuaagaacuggaugguacaccagcguuauuacaaucgaacuguccaacauuaaggagaauaaaugcaacgguaccgacgccaaggugaaacuaaucaagcaggaacucgauaaguauaaaaaugcaguaacugagcugcagcuucugaugcagucuacacccgccaccaacaauagggcucggcgcgaguugccucgauuuaugaacuacacgcucaauaacgcaaagaaaacuaaugugacccugucgaagaaacguaagagaagguuccugggcuuucucuuaggggucggaucagccauagcuagcggcguggccguuaguaaggugcugcaccuugaaggugaggucaacaaaaucaaguccgcguugcugucuacaaauaaagcagugguaagccuauccaacgggguuucagugcucacuucuaagguccuggaccuuaaaaauuauauugauaagcaacuguugccaaucgugaacaaacagagcuguucuauuuccaacaucgaaaccgugauagaguuccagcagaagaauaaccggcuccuggagauuacacgcgaauuuucagucaaugccggaguuaccacgccggugagcacuuacauguuaacaaacagugagcugcucucucuuaucaaugacaugcccauuaccaacgaucaaaagaaacugauguccaauaacguacagaucgugagacagcagagcuauucgaucaugucuauuauaaaggaagaggucuuggcuuacgugguucaacuaccucuguacggcgugaucgacacuccaugcuggaaacuccauacauccccacuguguaccacgaauaccaaggaaggcucaaacauuugccuuacaaggacugaucgggggugguauugugacaaugccggaagugucagcuucuuuccucaggcagagaccugcaaagugcaguccaaccgcguauucugugauacaaugaauagucugacuuugccaagcgagguuaaccucugcaauguggacaucuuuaaccccaaguacgauuguaagauaaugaccucaaaaacagacgucaguuccagcgugauuaccucucugggugcuaucgucucaugcuauggcaagacuaaaugcacggccaguaacaagaaucgagggaucauuaaaacauucagcaacggaugugauuacguguccaauaagggcguugacaccgugucuguagguaacacuuuauauuacgucaauaagcaagaagggaaaucgcuguaugugaagggagagccuaucauuaacuuuuacgacccccuaguuuucccgagcgaugaauuugacgcguccauaucacaggugaaugagaaaaucaaccagagucucgccuucauuagaaagucugaugaacugcuucacaaugucaacgcaggcaaaagcaccacaaauaucaugaucaccacuauuauaaucgugauuaucguaauuuugcugucccucaucgcugugggccugcuucuguacugcaaggccaggugaggacuaguacuggcugcaucucccuuuccucuguccuccauccuucucccaggauggugaagggggaccugguacccagugauccccaccccaggauccuaaaucaugacuuaccugcuaauaaaaacucauuggaaaagugagaagaucuaaaaaaaaaaaaaaaaaaaaaaaaaaaaaaaaaaaaaaaaaaaaaaaaaaaaaaaaaaaaaaaaugcaucccccccccccccccccccccccccccccccaaaggcucuuuucagagccaccagaauu

SEQ ID NO: 858 - RNA, 2115 nt, Artificial Sequence
  mRNA product Design h-5 comprising derived and/or modified sequence from HRSV(A2)__F-del (opt4)
gggagagggcgcuuggcuugcaaggacccugagcugcggcauugaagcacacccaacccaacucgacugaagucagccucacugaaccggaucugagaaucuucucucucugggcuugccagggcucuccgaaccuagcuagcauccucuucaauuccaacuagaaagcuuaccauggagcugcugauccugaaggccaacgccaucaccaccauccugaccgccgugaccuucugcuucgccagcggccagaacaucaccgaggaguucuaccagagcaccugcagcgccgugagcaagggcuaccugagcgcccugagaaccggcugguacaccagcgugaucaccaucgagcugagcaacaucaaggagaacaagugcaacggcaccgacgccaaggugaagcugaucaagcaggagcuggacaaguacaagaacgccgugaccgagcugcagcugcugaugcagagcacccccgccaccaacaacagagccagaagagagcugcccagauucaugaacuacacccugaacaacgccaagaagaccaacgugacccugagcaagaagagaaagagaagauuccugggcuuccugcugggcgugggcagcgccaucgccagcggcguggccgugagcaaggugcugcaccuggagggcgaggugaacaagaucaagagcgcccugcugagcaccaacaaggccguggugagccugagcaacggcgugagcgugcugaccagcaaggugcuggaccugaagaacuacaucgacaagcagcugcugcccaucgugaacaagcagagcugcagcaucagcaacaucgagaccgugaucgaguuccagcagaagaacaacagacugcuggagaucaccagagaguucagcgugaacgccggcgugaccacccccgugagcaccuacaugcugaccaacagcgagcugcugagccugaucaacgacaugcccaucaccaacgaccagaagaagcugaugagcaacaacgugcagaucgugagacagcagagcuacagcaucaugagcaucaucaaggaggaggugcuggccuacguggugcagcugccccuguacggcgugaucgacacccccugcuggaagcugcacaccagcccccugugcaccaccaacaccaaggagggcagcaacaucugccugaccagaaccgacagaggcugguacugcgacaacgccggcagcgugagcuucuucccccaggccgagaccugcaaggugcagagcaacagaguguucugcgacaccaugaacagccugacccugcccagcgaggugaaccugugcaacguggacaucuucaaccccaaguacgacugcaagaucaugaccagcaagaccgacgugagcagcagcgugaucaccagccugggcgccaucgugagcugcuacggcaagaccaagugcaccgccagcaacaagaacagaggcaucaucaagaccuucagcaacggcugcgacuacgugagcaacaagggcguggacaccgugagcgugggcaacacccuguacuacgugaacaagcaggagggcaagagccuguacgugaagggcgagcccaucaucaacuucuacgacccccugguguuccccagcgacgaguucgacgccagcaucagccaggugaacgagaagaucaaccagagccuggccuucaucagaaagagcgacgagcugcugcacaacgugaacgccggcaagagcaccaccaacaucaugaucaccaccaucaucaucgugaucaucgugauccugcugagccugaucgccgugggccugcugcuguacugcaaggccagaugaggacuaguacuggcugcaucucccuuuccucuguccuccauccuucucccaggauggugaagggggaccugguacccagugauccccaccccaggauccuaaaucaugacuuaccugcuaauaaaaacucauuggaaaagugagaagaucuaaaaaaaaaaaaaaaaaaaaaaaaaaaaaaaaaaaaaaaaaaaaaaaaaaaaaaaaaaaaaaaaugcaucccccccccccccccccccccccccccccccaaaggcucuuuucagagccaccagaauu

SEQ ID NO: 859 - RNA, 2115 nt, Artificial Sequence
  mRNA product Design h-5 comprising derived and/or modified sequence from HRSV(A2)__F-del (opt5)
gggagagggcgcuuggcuugcaaggacccugagcugcggcauugaagcacacccaacccaacucgacugaagucagccucacugaaccggaucugagaaucuucucucucugggcuugccagggcucuccgaaccuagcuagcauccucuucaauuccaacuagaaagcuuaccauggagcugcucauccugaaggccaacgcuauuaccacaauccuuacggccgugaccuucugcuuugcgagcggccagaauauuacagaagaguucuaccaauccaccuguucugcugucagcaaaggguaucuguccgcccucagaacaggaugguacaccucuguuaucacaauugaacugagcaacaucaaggagaauaaaugcaacggcaccgacgccaaggugaaacuuaucaagcaggaacuggauaaguauaaaaaugcugugacggagcuccagcugcugaugcaguccacccccgccacaaacaaucgggcucgcagagagcucccucgguuuaugaacuacacccugaauaacgccaagaaaacaaaugucacccuuucuaagaaacgcaagagacgguuccugggguuucuccugggagugggcagcgcgauugccuccgggguugcugugagcaagguccuucaccuggaaggagaggugaacaaaaucaagucugcccuccuguccacgaauaaagcuguugugagccugucuaacggcgucuccgugcucacaagcaaggugcuggaccuuaaaaauuauauugauaagcaacugcucccgaucgucaacaaacagucuuguuccauuagcaacaucgaaaccguuauugaguuccagcagaagaauaaccgccugcuugagaucacaagagaauuuuccgugaaugccggcgugaccacccccgucucuacauacaugcugacgaacagcgagcuccugucccugaucaaugacaugccuauuaccaacgaucaaaagaaacucaugagcaauaacgugcagaucguucggcagcagucuuauuccauuaugagcaucauuaaggaagaggugcuggcguacgucgugcaacuuccccuguacgggguuaucgacacaccuugcuggaaacuccauaccucuccccuguguacaaccaauacgaaggaaggaagcaacaucugccuuacacgcaccgauagaggcugguauugugacaaugccggguccgugucuuucuuuccucaggcugagaccugcaaaguccagagcaaccggguguucugugauacaaugaacucccugacccucccgagcgaggucaaucugugcaauguggacauuuuuaaccccaaguacgauuguaagaucaugacaucuaaaacggacguuuccagcucugugauuaccucccugggagccaucgucagcugcuauggcaagacaaaaugcaccgcuuccaacaagaaucgcgggauuaucaaaacauucucuaacggaugugauuacgugagcaauaagggcguugacaccguguccgucggcaacacgcucuauuacgugaauaagcaagaagggaaaucucuguaugugaagggagagccuaucauuaacuuuuacgacccccuuguuuucccuagcgaugaauuugacgccuccaucagccaggucaaugagaaaauuaaccagucucuggccuucaucagaaaguccgaugaacuccugcacaaugugaacgcuggcaaaagcaccacaaauauuaugaucaccacaauuaucaucgugauuaucgucauucugcuuucucucaucgcgguggggcugcugcucuacugcaaggcccggugaggacuaguacuggcugcaucucccuuuccucuguccuccauccuucucccaggauggugaagggggaccugguacccagugauccccaccccaggauccuaaaucaugacuuaccugcuaauaaaaacucauuggaaaagugagaagaucuaaaaaaaaaaaaaaaaaaaaaaaaaaaaaaaaaaaaaaaaaaaaaaaaaaaaaaaaaaaaaaaaugcaucccccccccccccccccccccccccccccccaaaggcucuuuucagagccaccagaauu

SEQ ID NO: 860 - RNA, 2115 nt, Artificial Sequence
  mRNA product Design h-5 comprising derived and/or modified sequence from HRSV(A2)__F-del (opt6)
gggagagggcgcuuggcuugcaaggacccugagcugcggcauugaagcacacccaacccaacucgacugaagucagccucacugaaccggaucugagaaucuucucucucugggcuugccagggcucuccgaaccuagcuagcauccucuucaauuccaacuagaaagcuuaccauggaauuacuaauacucaaagccaacgcaauaacaacaauacuaacagcaguaacauucugcuucgcaucaggacaaaacaucacagaagaauuuuaccaaaguacaugcagugcagucucuaaaggauaccucagugccuuacgcacaggaugguacacaucaguaauaacaaucgaacuuucaaacauaaaagaaaacaaaugcaauggaaccgacgccaaaguaaaacuaaucaaacaagaacuagacaaauauaaaaaugcaguaacagaauuacaacuccuaaugcaauccacaccagcaacaaauaacagagcaagacgagaacucccucgauucaugaauuacacauuaaacaacgcaaaaaaaacuaacguaacuuuaucaaaaaaaagaaaacguagauuucuaggauuccuacuaggcguaggguccgccauugcaucaggaguagcaguuagcaaaguauuacauuuagaaggagaaguaaauaaaaucaaaagcgcacuacucucaaccaacaaagcaguaguaucacucucaaacggaguaucaguacuaacauccaaaguacucgaccucaaaaacuacauagacaaacaauuacuacccauaguaaacaaacaaucaugcucuauaucaaauaucgaaacaguaaucgaauuucaacaaaaaaacaaucgacuacuugaaauaacaagagaguucuccgucaaugccggagucaccacaccagucucaacauacaugcuaaccaacucugaacuccuaucacuaauaaaugacaugccaauaacaaacgaccaaaaaaaacuaaugucaaauaacguacaaauaguacgacaacaaaguuauuccauaaugaguauaaucaaagaagaaguguuagcauacguaguccaacuaccauuauauggaguaauagacacaccauguuggaaauuacacaccucaccacucugcacuaccaauacaaaagaaggcucaaauauaugccuaacucgcacagacagaggcugguacugcgauaacgcaggauccguaucuuucuuuccccaagcagaaacuugcaaaguacaaucaaacagagucuucugcgacaccaugaauagucucacauuaccaucugaaguaaaccuauguaacguagauauauucaauccaaaauacgacugcaaaauaaugacaucaaaaaccgacgucucuagcaguguaaucacaucacuaggagcaauaguaagcugcuauggaaaaacaaaauguacagcaucaaacaaaaacaggggaauaauaaaaaccuucucaaacggaugugacuacguaucaaauaaaggcguagacacaguaagcguaggaaacacccuauacuacguuaacaaacaagaagggaaaucauuauacguaaaaggagaaccaauaauaaacuucuacgauccacucguauucccauccgacgaauuugacgccagcauaucccaaguuaacgaaaaaauaaaccaaucacuugcauuuauacgaaaaucugaugaacuucuccacaacguaaaugcaggaaaauccaccaccaauauaaugaucacaacuaucaucauaguaauaaucgucauuuuacuaucauuaauagcaguuggccuacuucuauacugcaaagcaagauaaggacuaguacuggcugcaucucccuuuccucuguccuccauccuucucccaggauggugaagggggaccugguacccagugauccccaccccaggauccuaaaucaugacuuaccugcuaauaaaaacucauuggaaaagugagaagaucuaaaaaaaaaaaaaaaaaaaaaaaaaaaaaaaaaaaaaaaaaaaaaaaaaaaaaaaaaaaaaaaaugcaucccccccccccccccccccccccccccccccaaaggcucuuuucagagccaccagaauu

SEQ ID NO: 861 - RNA, 2115 nt, Artificial Sequence
  mRNA product Design h-5 comprising derived and/or modified sequence from HRSV(A2)__F-del (opt11)
gggagagggcgcuuggcuugcaaggacccugagcugcggcauugaagcacacccaacccaacucgacugaagucagccucacugaaccggaucugagaaucuucucucucugggcuugccagggcucuccgaaccuagcuagcauccucuucaauuccaacuagaaagcuuaccauggaacuacuaauccuaaaagccaacgcgaucaccaccauccuaacggcagucaccuucugcuucgcaucaggccaaaacaucacagaagaguucuaccaaagcacaugcuccgccguauccaaaggcuaccucagcgcccuacgcacaggcugguacacaucugucaucaccauagaacucuccaacaucaaagaaaacaaaugcaacggcacugacgccaaaguaaagcugaucaaacaagaacucgacaaauacaaaaacgcagucaccgaacuccaacuacucaugcaauccaccccugcaaccaacaacagggcccgccgcgaacucccccgcuucaugaacuacacuuuaaacaacgccaaaaagaccaacgucacacucagcaagaaacggaaacgacgauuccuaggguuucuccuaggcgucggcucggcaaucgccuccggcgucgccguaagcaaaguacuacaccuagaaggcgaagugaacaaaaucaaaagugcccuucucuccaccaacaaggccguagucucucuauccaacggagucucaguccucaccucaaagguccucgaccucaaaaacuacaucgacaaacaacuacuccccauugucaacaagcagucaugcuccauaucaaacaucgaaaccgucaucgaguuccaacagaaaaacaaccgacuccucgaaauaaccagagaguucucggucaacgccggcgucaccaccccagucagcaccuacaugcucacuaacuccgaacuccuaucccucaucaacgacaugccaauuaccaacgaccaaaagaaacuaaugucgaacaacguucaaaucguccgacaacaaaguuacuccaucaugagcauaaucaaagaagaaguucuagcguacgucguccaacucccacuauacggcgucaucgacacuccgugcuggaaacuccacacaucaccccuauguacaaccaacacaaaagaaggcagcaacaucugccucacccgcaccgaccgagggugguauugcgauaacgcuggcagcgucuccuucuucccccaagccgaaaccugcaaaguccaaucaaacagaguauucugcgacaccaugaacucccuuacucucccuagcgaagucaaccucugcaacguugacauauucaaccccaaauacgacugcaaaaucaugaccuccaagaccgacgucuccuccuccgucaucacaucucuaggugccauugucuccugcuacggaaaaaccaaaugcacagccuccaacaaaaaccgcggcaucauaaaaaccuucuccaacggcugcgacuacgucaguaauaaaggcgucgacacgguauccguugggaauacgcuuuacuacguaaauaaacaagaaggcaaaucccucuacgucaaaggugaacccaucauaaacuucuacgacccgcuuguguucccauccgacgaguucgacgccagcaucagccaggucaacgaaaagaucaaccaaucccuagccuucauccgcaaaagcgacgaacuacuacacaacgucaacgccggaaaauccacaaccaacaucaugaucaccaccaucaucaucgucaucaucguaauccuacucucucucaucgccgucggccuccuacuguacuguaaagcccgauagggacuaguacuggcugcaucucccuuuccucuguccuccauccuucucccaggauggugaagggggaccugguacccagugauccccaccccaggauccuaaaucaugacuuaccugcuaauaaaaacucauuggaaaagugagaagaucuaaaaaaaaaaaaaaaaaaaaaaaaaaaaaaaaaaaaaaaaaaaaaaaaaaaaaaaaaaaaaaaaugcaucccccccccccccccccccccccccccccccaaaggcucuuuucagagccaccagaauu

SEQ ID NO: 862 - RNA, 2048 nt, Artificial Sequence
  mRNA product Design i-1 comprising derived and/or modified sequence from HRSV(A2)__F-del (artificial)
gggagagggcgcuuggcuugcaaggacccugagcugcggcauugaagcacacccaacccaacucgacugaagucagccucacugaaccggaucugagaaucuucucucucugggcuugccagggcucuccgaaccuagcuagcauccucuucaauuccaacuagaaagcuuaccauggaguugcuaauccucaaagcaaaugcaauuaccacaauccucacugcagucacauuuuguuuugcuucuggucaaaacaucacugaagaauuuuaucaaucaacaugcagugcaguuagcaaaggcuaucuuagugcucugagaacugguugguauaccaguguuauaacuauagaauuaaguaauaucaaggaaaauaaguguaauggaacagaugcuaagguaaaauugauaaaacaagaauuagauaaauauaaaaaugcuguaacagaauugcaguugcucaugcaaagcacaccagcaacaaacaaucgagccagaagagaacuaccaagguuuaugaauuauacacucaacaaugccaaaaaaaccaauguaacauuaagcaagaaaaggaaaagaagauuucuugguuuuuuguuagguguuggaucugcaaucgccaguggcguugcuguaucuaagguccugcaccuagaaggggaagugaacaagaucaaaagugcucuacuauccacaaacaaggcuguagucagcuuaucaaauggaguuagugucuuaaccagcaaaguguuagaccucaaaaacuauauagauaaacaauuguuaccuauugugaacaagcaaagcugcagcauaucaaauauagaaacugugauagaguuccaacaaaagaacaacagacuacuagagauuaccagggaauuuaguguuaaugcagguguaacuacaccuguaagcacuuacauguuaacuaauagugaauuauugucauuaaucaaugauaugccuauaacaaaugaucagaaaaaguuaauguccaacaauguucaaauaguuagacagcaaaguuacucuaucauguccauaauaaaagaggaagucuuagcauauguaguacaauuaccacuauaugguguuauagauacacccuguuggaaacuacacacauccccucuauguacaaccaacacaaaagaaggguccaacaucuguuuaacaagaacugacagaggaugguacugugacaaugcaggaucaguaucuuucuucccacaagcugaaacauguaaaguucaaucaaaucgaguauuuugugacacaaugaacaguuuaacauuaccaagugaaguaaaucucugcaauguugacauauucaaccccaaauaugauuguaaaauuaugacuucaaaaacagauguaagcagcuccguuaucacaucucuaggagccauugugucaugcuauggcaaaacuaaauguacagcauccaauaaaaaucguggaaucauaaagacauuuucuaacgggugcgauuauguaucaaauaaagggguggacacugugucuguagguaacacauuauauuauguaaauaagcaagaagguaaaagucucuauguaaaaggugaaccaauaauaaauuucuaugacccauuaguauuccccucugaugaauuugaugcaucaauaucucaagucaacgagaagauuaaccagagccuagcauuuauucguaaauccgaugaauuauuacauaauguaaaugcugguaaauccaccacaaauaucaugauaacuacuauaauuauagugauuauaguaauauuguuaucauuaauugcuguuggacugcucuuauacuguaaggccagauaaggacuaguguccaccugucccuccugggcugcuggauugucucguuuuccugccaaauaaacaggaucagcgcuuuacagaucuaaaaaaaaaaaaaaaaaaaaaaaaaaaaaaaaaaaaaaaaaaaaaaaaaaaaaaaaaaaaaaaaugcaucccccccccccccccccccccccccccccccaaaggcucuuuucagagccaccagaauu

SEQ ID NO: 863 - RNA, 2048 nt, Artificial Sequence
  mRNA product Design i-1 comprising derived and/or modified sequence from HRSV(A2)__F-del (opt1)
gggagagggcgcuuggcuugcaaggacccugagcugcggcauugaagcacacccaacccaacucgacugaagucagccucacugaaccggaucugagaaucuucucucucugggcuugccagggcucuccgaaccuagcuagcauccucuucaauuccaacuagaaagcuuaccauggagcugcucauccugaaggccaacgccaucaccaccauccugacggcggugaccuucugcuucgccagcggccagaacaucaccgaggaguucuaccaguccaccugcagcgccgucuccaagggguaccucagcgcccugcggacgggcugguacaccuccgugaucaccaucgagcugagcaacaucaaggagaacaagugcaacgggaccgacgccaaggugaagcucaucaagcaggagcuggacaaguacaagaacgcggucacggagcugcagcuccugaugcaguccaccccggcaaccaacaaccgcgcccggcgcgagcugccccgguucaugaacuacacccucaacaacgccaagaagacgaacgugacccugagcaagaagcgcaagcggcgcuuccugggcuuccuccugggggugggcuccgccaucgcgagcggcgucgccguguccaaggugcugcaccucgagggggaggucaacaagaucaagagcgcccugcuguccaccaacaaggccguggugagccucuccaacggcgucagcgugcugaccuccaaggugcuggaccucaagaacuacaucgacaagcagcugcugcccaucgucaacaagcagagcugcuccaucagcaacaucgagacggugaucgaguuccagcagaagaacaaccggcuccuggagaucacccgcgaguucagcgugaacgccggggucaccacccccguguccacguacaugcugaccaacagcgagcuccugucccugaucaacgacaugccgaucaccaacgaccagaagaagcucaugagcaacaacgugcagaucguccggcagcaguccuacagcaucauguccaucaucaaggaggaggugcuggcguacgugguccagcugccccucuacggcgugaucgacacccccugcuggaagcugcacacgagcccccugugcaccaccaacaccaaggagggguccaacaucugccucacgcgcaccgaccggggcugguacugcgacaacgccggcagcgucuccuucuucccgcaggccgagaccugcaaggugcagagcaaccgcguguucugcgacaccaugaacucccugacgcugcccagcgagguaaaccucugcaacgucgacaucuucaaccccaaguacgacugcaagaucaugaccuccaagaccgacgugagcuccagcgugaucaccucccugggggccaucgucagcugcuacggcaagacgaagugcaccgccagcaacaagaaccgggggaucaucaagaccuucuccaacggcugcgacuacgugagcaacaagggcguggacaccguguccgucgggaacacccuguacuacgugaacaagcaggagggcaagagccucuacgugaagggggagcccaucaucaacuucuacgacccgcuggucuuccccuccgacgaguucgacgcgagcaucucccaggugaacgagaagaucaaccagagccuggccuucauccgcaaguccgacgagcugcuccacaacgugaacgccggcaagagcacgaccaacaucaugaucaccaccaucaucaucgucaucaucgugauccugcugucccucaucgccguggggcugcugcucuacugcaaggcccggugaggacuaguguccaccugucccuccugggcugcuggauugucucguuuuccugccaaauaaacaggaucagcgcuuuacagaucuaaaaaaaaaaaaaaaaaaaaaaaaaaaaaaaaaaaaaaaaaaaaaaaaaaaaaaaaaaaaaaaaugcaucccccccccccccccccccccccccccccccaaaggcucuuuucagagccaccagaauu

SEQ ID NO: 864 - RNA, 2048 nt, Artificial Sequence
  mRNA product Design i-1 comprising derived and/or modified sequence from HRSV(A2)__F-del (opt1)
gggagagggcgcuuggcuugcaaggacccugagcugcggcauugaagcacacccaacccaacucgacugaagucagccucacugaaccggaucugagaaucuucucucucugggcuugccagggcucuccgaaccuagcuagcauccucuucaauuccaacuagaaagcuuaccauggagcugcucauccugaaggccaacgccaucaccaccauccugacggcggugaccuucugcuucgccagcggccagaacaucaccgaggaguucuaccaguccacgugcagcgccgucuccaagggguaccucagcgcccugcgcaccggcugguacaccuccgugaucaccaucgagcugagcaacaucaaggagaacaagugcaacgggaccgacgccaaggugaagcucaucaagcaggagcuggacaaguacaagaacgcggucacggagcugcagcuccugaugcaguccacccccgccaccaacaaccgggcccgccgggagcugccgcgcuucaugaacuacacccucaacaacgccaagaagacgaacgugacccugagcaagaagcggaagcgccgguuccugggcuuccuccugggggugggcuccgcgaucgccagcggcgucgccguguccaaggugcugcaccucgagggggaggucaacaagaucaagagcgcccugcuguccaccaacaaggccguggugagccucuccaacggcgucagcgugcugaccuccaaggugcuggaccucaagaacuacaucgacaagcagcugcugcccaucgucaacaagcagagcugcuccaucagcaacaucgagacggugaucgaguuccagcagaagaacaaccgccuccuggagaucacccgggaguucagcgugaacgcgggggucaccacccccguguccacguacaugcugaccaacagcgagcuccugucccugaucaacgacaugcccaucaccaacgaccagaagaagcucaugagcaacaacgugcagaucguccgccagcaguccuacagcaucauguccaucaucaaggaggaggugcuggccuacgugguccagcugccgcucuacggcgugaucgacacccccugcuggaagcugcacacgagcccccugugcaccaccaacaccaaggagggguccaacaucugccucacgcggaccgaccgcggcugguacugcgacaacgccggcagcgucuccuucuucccccaggccgagaccugcaaggugcagagcaaccggguguucugcgacaccaugaacucccugacgcugccgagcgaggucaaccucugcaacguggacaucuucaaccccaaguacgacugcaagaucaugaccuccaagaccgacgugagcuccagcgucaucaccucccugggggccaucgugagcugcuacggcaagacgaagugcaccgcgagcaacaagaaccgcgggaucaucaagaccuucuccaacggcugcgacuacgugagcaacaagggcgucgacaccguguccguggggaacacccuguacuacgucaacaagcaggagggcaagagccucuacgugaagggggagcccaucaucaacuucuacgacccccugguguucccguccgacgaguucgacgccagcaucucccaggucaacgagaagaucaaccagagccuggccuucauccggaaguccgacgagcuccugcacaacgugaacgccggcaagagcacgaccaacaucaugaucaccaccaucaucaucgugaucaucgucauccugcugucccucaucgccguggggcugcugcucuacugcaaggcgcgcugaggacuaguguccaccugucccuccugggcugcuggauugucucguuuuccugccaaauaaacaggaucagcgcuuuacagaucuaaaaaaaaaaaaaaaaaaaaaaaaaaaaaaaaaaaaaaaaaaaaaaaaaaaaaaaaaaaaaaaaugcaucccccccccccccccccccccccccccccccaaaggcucuuuucagagccaccagaauu

SEQ ID NO: 865 - RNA, 2048 nt, Artificial Sequence
  mRNA product Design i-1 comprising derived and/or modified sequence from HRSV(A2)__F-del (opt2)
gggagagggcgcuuggcuugcaaggacccugagcugcggcauugaagcacacccaacccaacucgacugaagucagccucacugaaccggaucugagaaucuucucucucugggcuugccagggcucuccgaaccuagcuagcauccucuucaauuccaacuagaaagcuuaccauggagcuccucauccucaaggccaacgccaucaccaccauccucaccgccgucaccuucugcuucgccuccggccagaacaucaccgaggaguucuaccaguccaccugcuccgccgucuccaagggcuaccucuccgcccuccgcaccggcugguacaccuccgucaucaccaucgagcucuccaacaucaaggagaacaagugcaacggcaccgacgccaaggucaagcucaucaagcaggagcucgacaaguacaagaacgccgucaccgagcuccagcuccucaugcaguccacccccgccaccaacaaccgcgcccgccgcgagcucccccgcuucaugaacuacacccucaacaacgccaagaagaccaacgucacccucuccaagaagcgcaagcgccgcuuccucggcuuccuccucggcgucggcuccgccaucgccuccggcgucgccgucuccaagguccuccaccucgagggcgaggucaacaagaucaaguccgcccuccucuccaccaacaaggccgucgucucccucuccaacggcgucuccguccucaccuccaagguccucgaccucaagaacuacaucgacaagcagcuccuccccaucgucaacaagcaguccugcuccaucuccaacaucgagaccgucaucgaguuccagcagaagaacaaccgccuccucgagaucacccgcgaguucuccgucaacgccggcgucaccacccccgucuccaccuacaugcucaccaacuccgagcuccucucccucaucaacgacaugcccaucaccaacgaccagaagaagcucauguccaacaacguccagaucguccgccagcaguccuacuccaucauguccaucaucaaggaggagguccucgccuacgucguccagcucccccucuacggcgucaucgacacccccugcuggaagcuccacaccuccccccucugcaccaccaacaccaaggagggcuccaacaucugccucacccgcaccgaccgcggcugguacugcgacaacgccggcuccgucuccuucuucccccaggccgagaccugcaagguccaguccaaccgcgucuucugcgacaccaugaacucccucacccuccccuccgaggucaaccucugcaacgucgacaucuucaaccccaaguacgacugcaagaucaugaccuccaagaccgacgucuccuccuccgucaucaccucccucggcgccaucgucuccugcuacggcaagaccaagugcaccgccuccaacaagaaccgcggcaucaucaagaccuucuccaacggcugcgacuacgucuccaacaagggcgucgacaccgucuccgucggcaacacccucuacuacgucaacaagcaggagggcaagucccucuacgucaagggcgagcccaucaucaacuucuacgacccccucgucuuccccuccgacgaguucgacgccuccaucucccaggucaacgagaagaucaaccagucccucgccuucauccgcaaguccgacgagcuccuccacaacgucaacgccggcaaguccaccaccaacaucaugaucaccaccaucaucaucgucaucaucgucauccuccucucccucaucgccgucggccuccuccucuacugcaaggcccgcugaggacuaguguccaccugucccuccugggcugcuggauugucucguuuuccugccaaauaaacaggaucagcgcuuuacagaucuaaaaaaaaaaaaaaaaaaaaaaaaaaaaaaaaaaaaaaaaaaaaaaaaaaaaaaaaaaaaaaaaugcaucccccccccccccccccccccccccccccccaaaggcucuuuucagagccaccagaauu

SEQ ID NO: 866 - RNA, 2048 nt, Artificial Sequence
  mRNA product Design i-1 comprising derived and/or modified sequence from HRSV(A2)__F-del (opt3)
gggagagggcgcuuggcuugcaaggacccugagcugcggcauugaagcacacccaacccaacucgacugaagucagccucacugaaccggaucugagaaucuucucucucugggcuugccagggcucuccgaaccuagcuagcauccucuucaauuccaacuagaaagcuuaccauggagcugcucauccuuaaggccaacgcuauuaccacaauacugacugcagugacguucugcuuugccagcggccagaauaucaccgaagaguucuaccaauccacauguucugcggucucaaaaggguauuugagugcuuuaagaacuggaugguacaccagcguuauuacaaucgaacuguccaacauuaaggagaauaaaugcaacgguaccgacgccaaggugaaacuaaucaagcaggaacucgauaaguauaaaaaugcaguaacugagcugcagcuucugaugcagucuacacccgccaccaacaauagggcucggcgcgaguugccucgauuuaugaacuacacgcucaauaacgcaaagaaaacuaaugugacccugucgaagaaacguaagagaagguuccugggcuuucucuuaggggucggaucagccauagcuagcggcguggccguuaguaaggugcugcaccuugaaggugaggucaacaaaaucaaguccgcguugcugucuacaaauaaagcagugguaagccuauccaacgggguuucagugcucacuucuaagguccuggaccuuaaaaauuauauugauaagcaacuguugccaaucgugaacaaacagagcuguucuauuuccaacaucgaaaccgugauagaguuccagcagaagaauaaccggcuccuggagauuacacgcgaauuuucagucaaugccggaguuaccacgccggugagcacuuacauguuaacaaacagugagcugcucucucuuaucaaugacaugcccauuaccaacgaucaaaagaaacugauguccaauaacguacagaucgugagacagcagagcuauucgaucaugucuauuauaaaggaagaggucuuggcuuacgugguucaacuaccucuguacggcgugaucgacacuccaugcuggaaacuccauacauccccacuguguaccacgaauaccaaggaaggcucaaacauuugccuuacaaggacugaucgggggugguauugugacaaugccggaagugucagcuucuuuccucaggcagagaccugcaaagugcaguccaaccgcguauucugugauacaaugaauagucugacuuugccaagcgagguuaaccucugcaauguggacaucuuuaaccccaaguacgauuguaagauaaugaccucaaaaacagacgucaguuccagcgugauuaccucucugggugcuaucgucucaugcuauggcaagacuaaaugcacggccaguaacaagaaucgagggaucauuaaaacauucagcaacggaugugauuacguguccaauaagggcguugacaccgugucuguagguaacacuuuauauuacgucaauaagcaagaagggaaaucgcuguaugugaagggagagccuaucauuaacuuuuacgacccccuaguuuucccgagcgaugaauuugacgcguccauaucacaggugaaugagaaaaucaaccagagucucgccuucauuagaaagucugaugaacugcuucacaaugucaacgcaggcaaaagcaccacaaauaucaugaucaccacuauuauaaucgugauuaucguaauuuugcugucccucaucgcugugggccugcuucuguacugcaaggccaggugaggacuaguguccaccugucccuccugggcugcuggauugucucguuuuccugccaaauaaacaggaucagcgcuuuacagaucuaaaaaaaaaaaaaaaaaaaaaaaaaaaaaaaaaaaaaaaaaaaaaaaaaaaaaaaaaaaaaaaaugcaucccccccccccccccccccccccccccccccaaaggcucuuuucagagccaccagaauu

SEQ ID NO: 867 - RNA, 2048 nt, Artificial Sequence
  mRNA product Design i-1 comprising derived and/or modified sequence from HRSV(A2)__F-del (opt4)
gggagagggcgcuuggcuugcaaggacccugagcugcggcauugaagcacacccaacccaacucgacugaagucagccucacugaaccggaucugagaaucuucucucucugggcuugccagggcucuccgaaccuagcuagcauccucuucaauuccaacuagaaagcuuaccauggagcugcugauccugaaggccaacgccaucaccaccauccugaccgccgugaccuucugcuucgccagcggccagaacaucaccgaggaguucuaccagagcaccugcagcgccgugagcaagggcuaccugagcgcccugagaaccggcugguacaccagcgugaucaccaucgagcugagcaacaucaaggagaacaagugcaacggcaccgacgccaaggugaagcugaucaagcaggagcuggacaaguacaagaacgccgugaccgagcugcagcugcugaugcagagcacccccgccaccaacaacagagccagaagagagcugcccagauucaugaacuacacccugaacaacgccaagaagaccaacgugacccugagcaagaagagaaagagaagauuccugggcuuccugcugggcgugggcagcgccaucgccagcggcguggccgugagcaaggugcugcaccuggagggcgaggugaacaagaucaagagcgcccugcugagcaccaacaaggccguggugagccugagcaacggcgugagcgugcugaccagcaaggugcuggaccugaagaacuacaucgacaagcagcugcugcccaucgugaacaagcagagcugcagcaucagcaacaucgagaccgugaucgaguuccagcagaagaacaacagacugcuggagaucaccagagaguucagcgugaacgccggcgugaccacccccgugagcaccuacaugcugaccaacagcgagcugcugagccugaucaacgacaugcccaucaccaacgaccagaagaagcugaugagcaacaacgugcagaucgugagacagcagagcuacagcaucaugagcaucaucaaggaggaggugcuggccuacguggugcagcugccccuguacggcgugaucgacacccccugcuggaagcugcacaccagcccccugugcaccaccaacaccaaggagggcagcaacaucugccugaccagaaccgacagaggcugguacugcgacaacgccggcagcgugagcuucuucccccaggccgagaccugcaaggugcagagcaacagaguguucugcgacaccaugaacagccugacccugcccagcgaggugaaccugugcaacguggacaucuucaaccccaaguacgacugcaagaucaugaccagcaagaccgacgugagcagcagcgugaucaccagccugggcgccaucgugagcugcuacggcaagaccaagugcaccgccagcaacaagaacagaggcaucaucaagaccuucagcaacggcugcgacuacgugagcaacaagggcguggacaccgugagcgugggcaacacccuguacuacgugaacaagcaggagggcaagagccuguacgugaagggcgagcccaucaucaacuucuacgacccccugguguuccccagcgacgaguucgacgccagcaucagccaggugaacgagaagaucaaccagagccuggccuucaucagaaagagcgacgagcugcugcacaacgugaacgccggcaagagcaccaccaacaucaugaucaccaccaucaucaucgugaucaucgugauccugcugagccugaucgccgugggccugcugcuguacugcaaggccagaugaggacuaguguccaccugucccuccugggcugcuggauugucucguuuuccugccaaauaaacaggaucagcgcuuuacagaucuaaaaaaaaaaaaaaaaaaaaaaaaaaaaaaaaaaaaaaaaaaaaaaaaaaaaaaaaaaaaaaaaugcaucccccccccccccccccccccccccccccccaaaggcucuuuucagagccaccagaauu

SEQ ID NO: 868 - RNA, 2048 nt, Artificial Sequence
  mRNA product Design i-1 comprising derived and/or modified sequence from HRSV(A2)__F-del (opt5)
gggagagggcgcuuggcuugcaaggacccugagcugcggcauugaagcacacccaacccaacucgacugaagucagccucacugaaccggaucugagaaucuucucucucugggcuugccagggcucuccgaaccuagcuagcauccucuucaauuccaacuagaaagcuuaccauggagcugcucauccugaaggccaacgcuauuaccacaauccuuacggccgugaccuucugcuuugcgagcggccagaauauuacagaagaguucuaccaauccaccuguucugcugucagcaaaggguaucuguccgcccucagaacaggaugguacaccucuguuaucacaauugaacugagcaacaucaaggagaauaaaugcaacggcaccgacgccaaggugaaacuuaucaagcaggaacuggauaaguauaaaaaugcugugacggagcuccagcugcugaugcaguccacccccgccacaaacaaucgggcucgcagagagcucccucgguuuaugaacuacacccugaauaacgccaagaaaacaaaugucacccuuucuaagaaacgcaagagacgguuccugggguuucuccugggagugggcagcgcgauugccuccgggguugcugugagcaagguccuucaccuggaaggagaggugaacaaaaucaagucugcccuccuguccacgaauaaagcuguugugagccugucuaacggcgucuccgugcucacaagcaaggugcuggaccuuaaaaauuauauugauaagcaacugcucccgaucgucaacaaacagucuuguuccauuagcaacaucgaaaccguuauugaguuccagcagaagaauaaccgccugcuugagaucacaagagaauuuuccgugaaugccggcgugaccacccccgucucuacauacaugcugacgaacagcgagcuccugucccugaucaaugacaugccuauuaccaacgaucaaaagaaacucaugagcaauaacgugcagaucguucggcagcagucuuauuccauuaugagcaucauuaaggaagaggugcuggcguacgucgugcaacuuccccuguacgggguuaucgacacaccuugcuggaaacuccauaccucuccccuguguacaaccaauacgaaggaaggaagcaacaucugccuuacacgcaccgauagaggcugguauugugacaaugccggguccgugucuuucuuuccucaggcugagaccugcaaaguccagagcaaccggguguucugugauacaaugaacucccugacccucccgagcgaggucaaucugugcaauguggacauuuuuaaccccaaguacgauuguaagaucaugacaucuaaaacggacguuuccagcucugugauuaccucccugggagccaucgucagcugcuauggcaagacaaaaugcaccgcuuccaacaagaaucgcgggauuaucaaaacauucucuaacggaugugauuacgugagcaauaagggcguugacaccguguccgucggcaacacgcucuauuacgugaauaagcaagaagggaaaucucuguaugugaagggagagccuaucauuaacuuuuacgacccccuuguuuucccuagcgaugaauuugacgccuccaucagccaggucaaugagaaaauuaaccagucucuggccuucaucagaaaguccgaugaacuccugcacaaugugaacgcuggcaaaagcaccacaaauauuaugaucaccacaauuaucaucgugauuaucgucauucugcuuucucucaucgcgguggggcugcugcucuacugcaaggcccggugaggacuaguguccaccugucccuccugggcugcuggauugucucguuuuccugccaaauaaacaggaucagcgcuuuacagaucuaaaaaaaaaaaaaaaaaaaaaaaaaaaaaaaaaaaaaaaaaaaaaaaaaaaaaaaaaaaaaaaaugcaucccccccccccccccccccccccccccccccaaaggcucuuuucagagccaccagaauu

SEQ ID NO: 869 - RNA, 2048 nt, Artificial Sequence
  mRNA product Design i-1 comprising derived and/or modified sequence from HRSV(A2)__F-del (opt6)
gggagagggcgcuuggcuugcaaggacccugagcugcggcauugaagcacacccaacccaacucgacugaagucagccucacugaaccggaucugagaaucuucucucucugggcuugccagggcucuccgaaccuagcuagcauccucuucaauuccaacuagaaagcuuaccauggaauuacuaauacucaaagccaacgcaauaacaacaauacuaacagcaguaacauucugcuucgcaucaggacaaaacaucacagaagaauuuuaccaaaguacaugcagugcagucucuaaaggauaccucagugccuuacgcacaggaugguacacaucaguaauaacaaucgaacuuucaaacauaaaagaaaacaaaugcaauggaaccgacgccaaaguaaaacuaaucaaacaagaacuagacaaauauaaaaaugcaguaacagaauuacaacuccuaaugcaauccacaccagcaacaaauaacagagcaagacgagaacucccucgauucaugaauuacacauuaaacaacgcaaaaaaaacuaacguaacuuuaucaaaaaaaagaaaacguagauuucuaggauuccuacuaggcguaggguccgccauugcaucaggaguagcaguuagcaaaguauuacauuuagaaggagaaguaaauaaaaucaaaagcgcacuacucucaaccaacaaagcaguaguaucacucucaaacggaguaucaguacuaacauccaaaguacucgaccucaaaaacuacauagacaaacaauuacuacccauaguaaacaaacaaucaugcucuauaucaaauaucgaaacaguaaucgaauuucaacaaaaaaacaaucgacuacuugaaauaacaagagaguucuccgucaaugccggagucaccacaccagucucaacauacaugcuaaccaacucugaacuccuaucacuaauaaaugacaugccaauaacaaacgaccaaaaaaaacuaaugucaaauaacguacaaauaguacgacaacaaaguuauuccauaaugaguauaaucaaagaagaaguguuagcauacguaguccaacuaccauuauauggaguaauagacacaccauguuggaaauuacacaccucaccacucugcacuaccaauacaaaagaaggcucaaauauaugccuaacucgcacagacagaggcugguacugcgauaacgcaggauccguaucuuucuuuccccaagcagaaacuugcaaaguacaaucaaacagagucuucugcgacaccaugaauagucucacauuaccaucugaaguaaaccuauguaacguagauauauucaauccaaaauacgacugcaaaauaaugacaucaaaaaccgacgucucuagcaguguaaucacaucacuaggagcaauaguaagcugcuauggaaaaacaaaauguacagcaucaaacaaaaacaggggaauaauaaaaaccuucucaaacggaugugacuacguaucaaauaaaggcguagacacaguaagcguaggaaacacccuauacuacguuaacaaacaagaagggaaaucauuauacguaaaaggagaaccaauaauaaacuucuacgauccacucguauucccauccgacgaauuugacgccagcauaucccaaguuaacgaaaaaauaaaccaaucacuugcauuuauacgaaaaucugaugaacuucuccacaacguaaaugcaggaaaauccaccaccaauauaaugaucacaacuaucaucauaguaauaaucgucauuuuacuaucauuaauagcaguuggccuacuucuauacugcaaagcaagauaaggacuaguguccaccugucccuccugggcugcuggauugucucguuuuccugccaaauaaacaggaucagcgcuuuacagaucuaaaaaaaaaaaaaaaaaaaaaaaaaaaaaaaaaaaaaaaaaaaaaaaaaaaaaaaaaaaaaaaaugcaucccccccccccccccccccccccccccccccaaaggcucuuuucagagccaccagaauu

SEQ ID NO: 870 - RNA, 2048 nt, Artificial Sequence
  mRNA product Design i-1 comprising derived and/or modified sequence from HRSV(A2)__F-del (opt11)
gggagagggcgcuuggcuugcaaggacccugagcugcggcauugaagcacacccaacccaacucgacugaagucagccucacugaaccggaucugagaaucuucucucucugggcuugccagggcucuccgaaccuagcuagcauccucuucaauuccaacuagaaagcuuaccauggaacuacuaauccuaaaagccaacgcgaucaccaccauccuaacggcagucaccuucugcuucgcaucaggccaaaacaucacagaagaguucuaccaaagcacaugcuccgccguauccaaaggcuaccucagcgcccuacgcacaggcugguacacaucugucaucaccauagaacucuccaacaucaaagaaaacaaaugcaacggcacugacgccaaaguaaagcugaucaaacaagaacucgacaaauacaaaaacgcagucaccgaacuccaacuacucaugcaauccaccccugcaaccaacaacagggcccgccgcgaacucccccgcuucaugaacuacacuuuaaacaacgccaaaaagaccaacgucacacucagcaagaaacggaaacgacgauuccuaggguuucuccuaggcgucggcucggcaaucgccuccggcgucgccguaagcaaaguacuacaccuagaaggcgaagugaacaaaaucaaaagugcccuucucuccaccaacaaggccguagucucucuauccaacggagucucaguccucaccucaaagguccucgaccucaaaaacuacaucgacaaacaacuacuccccauugucaacaagcagucaugcuccauaucaaacaucgaaaccgucaucgaguuccaacagaaaaacaaccgacuccucgaaauaaccagagaguucucggucaacgccggcgucaccaccccagucagcaccuacaugcucacuaacuccgaacuccuaucccucaucaacgacaugccaauuaccaacgaccaaaagaaacuaaugucgaacaacguucaaaucguccgacaacaaaguuacuccaucaugagcauaaucaaagaagaaguucuagcguacgucguccaacucccacuauacggcgucaucgacacuccgugcuggaaacuccacacaucaccccuauguacaaccaacacaaaagaaggcagcaacaucugccucacccgcaccgaccgagggugguauugcgauaacgcuggcagcgucuccuucuucccccaagccgaaaccugcaaaguccaaucaaacagaguauucugcgacaccaugaacucccuuacucucccuagcgaagucaaccucugcaacguugacauauucaaccccaaauacgacugcaaaaucaugaccuccaagaccgacgucuccuccuccgucaucacaucucuaggugccauugucuccugcuacggaaaaaccaaaugcacagccuccaacaaaaaccgcggcaucauaaaaaccuucuccaacggcugcgacuacgucaguaauaaaggcgucgacacgguauccguugggaauacgcuuuacuacguaaauaaacaagaaggcaaaucccucuacgucaaaggugaacccaucauaaacuucuacgacccgcuuguguucccauccgacgaguucgacgccagcaucagccaggucaacgaaaagaucaaccaaucccuagccuucauccgcaaaagcgacgaacuacuacacaacgucaacgccggaaaauccacaaccaacaucaugaucaccaccaucaucaucgucaucaucguaauccuacucucucucaucgccgucggccuccuacuguacuguaaagcccgauagggacuaguguccaccugucccuccugggcugcuggauugucucguuuuccugccaaauaaacaggaucagcgcuuuacagaucuaaaaaaaaaaaaaaaaaaaaaaaaaaaaaaaaaaaaaaaaaaaaaaaaaaaaaaaaaaaaaaaaugcaucccccccccccccccccccccccccccccccaaaggcucuuuucagagccaccagaauu

SEQ ID NO: 871 - RNA, 2048 nt, Artificial Sequence
  mRNA product Design i-2 comprising derived and/or modified sequence from HRSV(A2)__F-del (artificial)
gggagaggcgcugccuacggagguggcagccaucuccuucucggcaucaagcuuaccauggaguugcuaauccucaaagcaaaugcaauuaccacaauccucacugcagucacauuuuguuuugcuucuggucaaaacaucacugaagaauuuuaucaaucaacaugcagugcaguuagcaaaggcuaucuuagugcucugagaacugguugguauaccaguguuauaacuauagaauuaaguaauaucaaggaaaauaaguguaauggaacagaugcuaagguaaaauugauaaaacaagaauuagauaaauauaaaaaugcuguaacagaauugcaguugcucaugcaaagcacaccagcaacaaacaaucgagccagaagagaacuaccaagguuuaugaauuauacacucaacaaugccaaaaaaaccaauguaacauuaagcaagaaaaggaaaagaagauuucuugguuuuuuguuagguguuggaucugcaaucgccaguggcguugcuguaucuaagguccugcaccuagaaggggaagugaacaagaucaaaagugcucuacuauccacaaacaaggcuguagucagcuuaucaaauggaguuagugucuuaaccagcaaaguguuagaccucaaaaacuauauagauaaacaauuguuaccuauugugaacaagcaaagcugcagcauaucaaauauagaaacugugauagaguuccaacaaaagaacaacagacuacuagagauuaccagggaauuuaguguuaaugcagguguaacuacaccuguaagcacuuacauguuaacuaauagugaauuauugucauuaaucaaugauaugccuauaacaaaugaucagaaaaaguuaauguccaacaauguucaaauaguuagacagcaaaguuacucuaucauguccauaauaaaagaggaagucuuagcauauguaguacaauuaccacuauaugguguuauagauacacccuguuggaaacuacacacauccccucuauguacaaccaacacaaaagaaggguccaacaucuguuuaacaagaacugacagaggaugguacugugacaaugcaggaucaguaucuuucuucccacaagcugaaacauguaaaguucaaucaaaucgaguauuuugugacacaaugaacaguuuaacauuaccaagugaaguaaaucucugcaauguugacauauucaaccccaaauaugauuguaaaauuaugacuucaaaaacagauguaagcagcuccguuaucacaucucuaggagccauugugucaugcuauggcaaaacuaaauguacagcauccaauaaaaaucguggaaucauaaagacauuuucuaacgggugcgauuauguaucaaauaaagggguggacacugugucuguagguaacacauuauauuauguaaauaagcaagaagguaaaagucucuauguaaaaggugaaccaauaauaaauuucuaugacccauuaguauuccccucugaugaauuugaugcaucaauaucucaagucaacgagaagauuaaccagagccuagcauuuauucguaaauccgaugaauuauuacauaauguaaaugcugguaaauccaccacaaauaucaugauaacuacuauaauuauagugauuauaguaauauuguuaucauuaauugcuguuggacugcucuuauacuguaaggccagauaaggacuagugcaucacauuuaaaagcaucucagccuaccaugagaauaagagaaagaaaaugaagaucaauagcuuauucaucucuuuuucuuuuucguugguguaaagccaacacccugucuaaaaaacauaaauuucuuuaaucauuuugccucuuuucucugugcuucaauuaauaaaaaauggaaagaaccuagaucuaaaaaaaaaaaaaaaaaaaaaaaaaaaaaaaaaaaaaaaaaaaaaaaaaaaaaaaaaaaaaaaaugcaucccccccccccccccccccccccccccccccaaaggcucuuuucagagccaccagaauu

SEQ ID NO: 872 - RNA, 2048 nt, Artificial Sequence
  mRNA product Design i-2 comprising derived and/or modified sequence from HRSV(A2)__F-del (opt1)
gggagaggcgcugccuacggagguggcagccaucuccuucucggcaucaagcuuaccauggagcugcucauccugaaggccaacgccaucaccaccauccugacggcggugaccuucugcuucgccagcggccagaacaucaccgaggaguucuaccaguccaccugcagcgccgucuccaagggguaccucagcgcccugcggacgggcugguacaccuccgugaucaccaucgagcugagcaacaucaaggagaacaagugcaacgggaccgacgccaaggugaagcucaucaagcaggagcuggacaaguacaagaacgcggucacggagcugcagcuccugaugcaguccaccccggcaaccaacaaccgcgcccggcgcgagcugccccgguucaugaacuacacccucaacaacgccaagaagacgaacgugacccugagcaagaagcgcaagcggcgcuuccugggcuuccuccugggggugggcuccgccaucgcgagcggcgucgccguguccaaggugcugcaccucgagggggaggucaacaagaucaagagcgcccugcuguccaccaacaaggccguggugagccucuccaacggcgucagcgugcugaccuccaaggugcuggaccucaagaacuacaucgacaagcagcugcugcccaucgucaacaagcagagcugcuccaucagcaacaucgagacggugaucgaguuccagcagaagaacaaccggcuccuggagaucacccgcgaguucagcgugaacgccggggucaccacccccguguccacguacaugcugaccaacagcgagcuccugucccugaucaacgacaugccgaucaccaacgaccagaagaagcucaugagcaacaacgugcagaucguccggcagcaguccuacagcaucauguccaucaucaaggaggaggugcuggcguacgugguccagcugccccucuacggcgugaucgacacccccugcuggaagcugcacacgagcccccugugcaccaccaacaccaaggagggguccaacaucugccucacgcgcaccgaccggggcugguacugcgacaacgccggcagcgucuccuucuucccgcaggccgagaccugcaaggugcagagcaaccgcguguucugcgacaccaugaacucccugacgcugcccagcgagguaaaccucugcaacgucgacaucuucaaccccaaguacgacugcaagaucaugaccuccaagaccgacgugagcuccagcgugaucaccucccugggggccaucgucagcugcuacggcaagacgaagugcaccgccagcaacaagaaccgggggaucaucaagaccuucuccaacggcugcgacuacgugagcaacaagggcguggacaccguguccgucgggaacacccuguacuacgugaacaagcaggagggcaagagccucuacgugaagggggagcccaucaucaacuucuacgacccgcuggucuuccccuccgacgaguucgacgcgagcaucucccaggugaacgagaagaucaaccagagccuggccuucauccgcaaguccgacgagcugcuccacaacgugaacgccggcaagagcacgaccaacaucaugaucaccaccaucaucaucgucaucaucgugauccugcugucccucaucgccguggggcugcugcucuacugcaaggcccggugaggacuagugcaucacauuuaaaagcaucucagccuaccaugagaauaagagaaagaaaaugaagaucaauagcuuauucaucucuuuuucuuuuucguugguguaaagccaacacccugucuaaaaaacauaaauuucuuuaaucauuuugccucuuuucucugugcuucaauuaauaaaaaauggaaagaaccuagaucuaaaaaaaaaaaaaaaaaaaaaaaaaaaaaaaaaaaaaaaaaaaaaaaaaaaaaaaaaaaaaaaaugcaucccccccccccccccccccccccccccccccaaaggcucuuuucagagccaccagaauu

SEQ ID NO: 873 - RNA, 2048 nt, Artificial Sequence
  mRNA product Design i-2 comprising derived and/or modified sequence from HRSV(A2)__F-del (opt1)
gggagaggcgcugccuacggagguggcagccaucuccuucucggcaucaagcuuaccauggagcugcucauccugaaggccaacgccaucaccaccauccugacggcggugaccuucugcuucgccagcggccagaacaucaccgaggaguucuaccaguccacgugcagcgccgucuccaagggguaccucagcgcccugcgcaccggcugguacaccuccgugaucaccaucgagcugagcaacaucaaggagaacaagugcaacgggaccgacgccaaggugaagcucaucaagcaggagcuggacaaguacaagaacgcggucacggagcugcagcuccugaugcaguccacccccgccaccaacaaccgggcccgccgggagcugccgcgcuucaugaacuacacccucaacaacgccaagaagacgaacgugacccugagcaagaagcggaagcgccgguuccugggcuuccuccugggggugggcuccgcgaucgccagcggcgucgccguguccaaggugcugcaccucgagggggaggucaacaagaucaagagcgcccugcuguccaccaacaaggccguggugagccucuccaacggcgucagcgugcugaccuccaaggugcuggaccucaagaacuacaucgacaagcagcugcugcccaucgucaacaagcagagcugcuccaucagcaacaucgagacggugaucgaguuccagcagaagaacaaccgccuccuggagaucacccgggaguucagcgugaacgcgggggucaccacccccguguccacguacaugcugaccaacagcgagcuccugucccugaucaacgacaugcccaucaccaacgaccagaagaagcucaugagcaacaacgugcagaucguccgccagcaguccuacagcaucauguccaucaucaaggaggaggugcuggccuacgugguccagcugccgcucuacggcgugaucgacacccccugcuggaagcugcacacgagcccccugugcaccaccaacaccaaggagggguccaacaucugccucacgcggaccgaccgcggcugguacugcgacaacgccggcagcgucuccuucuucccccaggccgagaccugcaaggugcagagcaaccggguguucugcgacaccaugaacucccugacgcugccgagcgaggucaaccucugcaacguggacaucuucaaccccaaguacgacugcaagaucaugaccuccaagaccgacgugagcuccagcgucaucaccucccugggggccaucgugagcugcuacggcaagacgaagugcaccgcgagcaacaagaaccgcgggaucaucaagaccuucuccaacggcugcgacuacgugagcaacaagggcgucgacaccguguccguggggaacacccuguacuacgucaacaagcaggagggcaagagccucuacgugaagggggagcccaucaucaacuucuacgacccccugguguucccguccgacgaguucgacgccagcaucucccaggucaacgagaagaucaaccagagccuggccuucauccggaaguccgacgagcuccugcacaacgugaacgccggcaagagcacgaccaacaucaugaucaccaccaucaucaucgugaucaucgucauccugcugucccucaucgccguggggcugcugcucuacugcaaggcgcgcugaggacuagugcaucacauuuaaaagcaucucagccuaccaugagaauaagagaaagaaaaugaagaucaauagcuuauucaucucuuuuucuuuuucguugguguaaagccaacacccugucuaaaaaacauaaauuucuuuaaucauuuugccucuuuucucugugcuucaauuaauaaaaaauggaaagaaccuagaucuaaaaaaaaaaaaaaaaaaaaaaaaaaaaaaaaaaaaaaaaaaaaaaaaaaaaaaaaaaaaaaaaugcaucccccccccccccccccccccccccccccccaaaggcucuuuucagagccaccagaauu

SEQ ID NO: 874 - RNA, 2048 nt, Artificial Sequence
  mRNA product Design i-2 comprising derived and/or modified sequence from HRSV(A2)__F-del (opt2)
gggagaggcgcugccuacggagguggcagccaucuccuucucggcaucaagcuuaccauggagcuccucauccucaaggccaacgccaucaccaccauccucaccgccgucaccuucugcuucgccuccggccagaacaucaccgaggaguucuaccaguccaccugcuccgccgucuccaagggcuaccucuccgcccuccgcaccggcugguacaccuccgucaucaccaucgagcucuccaacaucaaggagaacaagugcaacggcaccgacgccaaggucaagcucaucaagcaggagcucgacaaguacaagaacgccgucaccgagcuccagcuccucaugcaguccacccccgccaccaacaaccgcgcccgccgcgagcucccccgcuucaugaacuacacccucaacaacgccaagaagaccaacgucacccucuccaagaagcgcaagcgccgcuuccucggcuuccuccucggcgucggcuccgccaucgccuccggcgucgccgucuccaagguccuccaccucgagggcgaggucaacaagaucaaguccgcccuccucuccaccaacaaggccgucgucucccucuccaacggcgucuccguccucaccuccaagguccucgaccucaagaacuacaucgacaagcagcuccuccccaucgucaacaagcaguccugcuccaucuccaacaucgagaccgucaucgaguuccagcagaagaacaaccgccuccucgagaucacccgcgaguucuccgucaacgccggcgucaccacccccgucuccaccuacaugcucaccaacuccgagcuccucucccucaucaacgacaugcccaucaccaacgaccagaagaagcucauguccaacaacguccagaucguccgccagcaguccuacuccaucauguccaucaucaaggaggagguccucgccuacgucguccagcucccccucuacggcgucaucgacacccccugcuggaagcuccacaccuccccccucugcaccaccaacaccaaggagggcuccaacaucugccucacccgcaccgaccgcggcugguacugcgacaacgccggcuccgucuccuucuucccccaggccgagaccugcaagguccaguccaaccgcgucuucugcgacaccaugaacucccucacccuccccuccgaggucaaccucugcaacgucgacaucuucaaccccaaguacgacugcaagaucaugaccuccaagaccgacgucuccuccuccgucaucaccucccucggcgccaucgucuccugcuacggcaagaccaagugcaccgccuccaacaagaaccgcggcaucaucaagaccuucuccaacggcugcgacuacgucuccaacaagggcgucgacaccgucuccgucggcaacacccucuacuacgucaacaagcaggagggcaagucccucuacgucaagggcgagcccaucaucaacuucuacgacccccucgucuuccccuccgacgaguucgacgccuccaucucccaggucaacgagaagaucaaccagucccucgccuucauccgcaaguccgacgagcuccuccacaacgucaacgccggcaaguccaccaccaacaucaugaucaccaccaucaucaucgucaucaucgucauccuccucucccucaucgccgucggccuccuccucuacugcaaggcccgcugaggacuagugcaucacauuuaaaagcaucucagccuaccaugagaauaagagaaagaaaaugaagaucaauagcuuauucaucucuuuuucuuuuucguugguguaaagccaacacccugucuaaaaaacauaaauuucuuuaaucauuuugccucuuuucucugugcuucaauuaauaaaaaauggaaagaaccuagaucuaaaaaaaaaaaaaaaaaaaaaaaaaaaaaaaaaaaaaaaaaaaaaaaaaaaaaaaaaaaaaaaaugcaucccccccccccccccccccccccccccccccaaaggcucuuuucagagccaccagaauu

SEQ ID NO: 875 - RNA, 2048 nt, Artificial Sequence
  mRNA product Design i-2 comprising derived and/or modified sequence from HRSV(A2)__F-del (opt3)
gggagaggcgcugccuacggagguggcagccaucuccuucucggcaucaagcuuaccauggagcugcucauccuuaaggccaacgcuauuaccacaauacugacugcagugacguucugcuuugccagcggccagaauaucaccgaagaguucuaccaauccacauguucugcggucucaaaaggguauuugagugcuuuaagaacuggaugguacaccagcguuauuacaaucgaacuguccaacauuaaggagaauaaaugcaacgguaccgacgccaaggugaaacuaaucaagcaggaacucgauaaguauaaaaaugcaguaacugagcugcagcuucugaugcagucuacacccgccaccaacaauagggcucggcgcgaguugccucgauuuaugaacuacacgcucaauaacgcaaagaaaacuaaugugacccugucgaagaaacguaagagaagguuccugggcuuucucuuaggggucggaucagccauagcuagcggcguggccguuaguaaggugcugcaccuugaaggugaggucaacaaaaucaaguccgcguugcugucuacaaauaaagcagugguaagccuauccaacgggguuucagugcucacuucuaagguccuggaccuuaaaaauuauauugauaagcaacuguugccaaucgugaacaaacagagcuguucuauuuccaacaucgaaaccgugauagaguuccagcagaagaauaaccggcuccuggagauuacacgcgaauuuucagucaaugccggaguuaccacgccggugagcacuuacauguuaacaaacagugagcugcucucucuuaucaaugacaugcccauuaccaacgaucaaaagaaacugauguccaauaacguacagaucgugagacagcagagcuauucgaucaugucuauuauaaaggaagaggucuuggcuuacgugguucaacuaccucuguacggcgugaucgacacuccaugcuggaaacuccauacauccccacuguguaccacgaauaccaaggaaggcucaaacauuugccuuacaaggacugaucgggggugguauugugacaaugccggaagugucagcuucuuuccucaggcagagaccugcaaagugcaguccaaccgcguauucugugauacaaugaauagucugacuuugccaagcgagguuaaccucugcaauguggacaucuuuaaccccaaguacgauuguaagauaaugaccucaaaaacagacgucaguuccagcgugauuaccucucugggugcuaucgucucaugcuauggcaagacuaaaugcacggccaguaacaagaaucgagggaucauuaaaacauucagcaacggaugugauuacguguccaauaagggcguugacaccgugucuguagguaacacuuuauauuacgucaauaagcaagaagggaaaucgcuguaugugaagggagagccuaucauuaacuuuuacgacccccuaguuuucccgagcgaugaauuugacgcguccauaucacaggugaaugagaaaaucaaccagagucucgccuucauuagaaagucugaugaacugcuucacaaugucaacgcaggcaaaagcaccacaaauaucaugaucaccacuauuauaaucgugauuaucguaauuuugcugucccucaucgcugugggccugcuucuguacugcaaggccaggugaggacuagugcaucacauuuaaaagcaucucagccuaccaugagaauaagagaaagaaaaugaagaucaauagcuuauucaucucuuuuucuuuuucguugguguaaagccaacacccugucuaaaaaacauaaauuucuuuaaucauuuugccucuuuucucugugcuucaauuaauaaaaaauggaaagaaccuagaucuaaaaaaaaaaaaaaaaaaaaaaaaaaaaaaaaaaaaaaaaaaaaaaaaaaaaaaaaaaaaaaaaugcaucccccccccccccccccccccccccccccccaaaggcucuuuucagagccaccagaauu

SEQ ID NO: 876 - RNA, 2048 nt, Artificial Sequence
  mRNA product Design i-2 comprising derived and/or modified sequence from HRSV(A2)__F-del (opt4)
gggagaggcgcugccuacggagguggcagccaucuccuucucggcaucaagcuuaccauggagcugcugauccugaaggccaacgccaucaccaccauccugaccgccgugaccuucugcuucgccagcggccagaacaucaccgaggaguucuaccagagcaccugcagcgccgugagcaagggcuaccugagcgcccugagaaccggcugguacaccagcgugaucaccaucgagcugagcaacaucaaggagaacaagugcaacggcaccgacgccaaggugaagcugaucaagcaggagcuggacaaguacaagaacgccgugaccgagcugcagcugcugaugcagagcacccccgccaccaacaacagagccagaagagagcugcccagauucaugaacuacacccugaacaacgccaagaagaccaacgugacccugagcaagaagagaaagagaagauuccugggcuuccugcugggcgugggcagcgccaucgccagcggcguggccgugagcaaggugcugcaccuggagggcgaggugaacaagaucaagagcgcccugcugagcaccaacaaggccguggugagccugagcaacggcgugagcgugcugaccagcaaggugcuggaccugaagaacuacaucgacaagcagcugcugcccaucgugaacaagcagagcugcagcaucagcaacaucgagaccgugaucgaguuccagcagaagaacaacagacugcuggagaucaccagagaguucagcgugaacgccggcgugaccacccccgugagcaccuacaugcugaccaacagcgagcugcugagccugaucaacgacaugcccaucaccaacgaccagaagaagcugaugagcaacaacgugcagaucgugagacagcagagcuacagcaucaugagcaucaucaaggaggaggugcuggccuacguggugcagcugccccuguacggcgugaucgacacccccugcuggaagcugcacaccagcccccugugcaccaccaacaccaaggagggcagcaacaucugccugaccagaaccgacagaggcugguacugcgacaacgccggcagcgugagcuucuucccccaggccgagaccugcaaggugcagagcaacagaguguucugcgacaccaugaacagccugacccugcccagcgaggugaaccugugcaacguggacaucuucaaccccaaguacgacugcaagaucaugaccagcaagaccgacgugagcagcagcgugaucaccagccugggcgccaucgugagcugcuacggcaagaccaagugcaccgccagcaacaagaacagaggcaucaucaagaccuucagcaacggcugcgacuacgugagcaacaagggcguggacaccgugagcgugggcaacacccuguacuacgugaacaagcaggagggcaagagccuguacgugaagggcgagcccaucaucaacuucuacgacccccugguguuccccagcgacgaguucgacgccagcaucagccaggugaacgagaagaucaaccagagccuggccuucaucagaaagagcgacgagcugcugcacaacgugaacgccggcaagagcaccaccaacaucaugaucaccaccaucaucaucgugaucaucgugauccugcugagccugaucgccgugggccugcugcuguacugcaaggccagaugaggacuagugcaucacauuuaaaagcaucucagccuaccaugagaauaagagaaagaaaaugaagaucaauagcuuauucaucucuuuuucuuuuucguugguguaaagccaacacccugucuaaaaaacauaaauuucuuuaaucauuuugccucuuuucucugugcuucaauuaauaaaaaauggaaagaaccuagaucuaaaaaaaaaaaaaaaaaaaaaaaaaaaaaaaaaaaaaaaaaaaaaaaaaaaaaaaaaaaaaaaaugcaucccccccccccccccccccccccccccccccaaaggcucuuuucagagccaccagaauu

SEQ ID NO: 877 - RNA, 2048 nt, Artificial Sequence
  mRNA product Design i-2 comprising derived and/or modified sequence from HRSV(A2)__F-del (opt5)
gggagaggcgcugccuacggagguggcagccaucuccuucucggcaucaagcuuaccauggagcugcucauccugaaggccaacgcuauuaccacaauccuuacggccgugaccuucugcuuugcgagcggccagaauauuacagaagaguucuaccaauccaccuguucugcugucagcaaaggguaucuguccgcccucagaacaggaugguacaccucuguuaucacaauugaacugagcaacaucaaggagaauaaaugcaacggcaccgacgccaaggugaaacuuaucaagcaggaacuggauaaguauaaaaaugcugugacggagcuccagcugcugaugcaguccacccccgccacaaacaaucgggcucgcagagagcucccucgguuuaugaacuacacccugaauaacgccaagaaaacaaaugucacccuuucuaagaaacgcaagagacgguuccugggguuucuccugggagugggcagcgcgauugccuccgggguugcugugagcaagguccuucaccuggaaggagaggugaacaaaaucaagucugcccuccuguccacgaauaaagcuguugugagccugucuaacggcgucuccgugcucacaagcaaggugcuggaccuuaaaaauuauauugauaagcaacugcucccgaucgucaacaaacagucuuguuccauuagcaacaucgaaaccguuauugaguuccagcagaagaauaaccgccugcuugagaucacaagagaauuuuccgugaaugccggcgugaccacccccgucucuacauacaugcugacgaacagcgagcuccugucccugaucaaugacaugccuauuaccaacgaucaaaagaaacucaugagcaauaacgugcagaucguucggcagcagucuuauuccauuaugagcaucauuaaggaagaggugcuggcguacgucgugcaacuuccccuguacgggguuaucgacacaccuugcuggaaacuccauaccucuccccuguguacaaccaauacgaaggaaggaagcaacaucugccuuacacgcaccgauagaggcugguauugugacaaugccggguccgugucuuucuuuccucaggcugagaccugcaaaguccagagcaaccggguguucugugauacaaugaacucccugacccucccgagcgaggucaaucugugcaauguggacauuuuuaaccccaaguacgauuguaagaucaugacaucuaaaacggacguuuccagcucugugauuaccucccugggagccaucgucagcugcuauggcaagacaaaaugcaccgcuuccaacaagaaucgcgggauuaucaaaacauucucuaacggaugugauuacgugagcaauaagggcguugacaccguguccgucggcaacacgcucuauuacgugaauaagcaagaagggaaaucucuguaugugaagggagagccuaucauuaacuuuuacgacccccuuguuuucccuagcgaugaauuugacgccuccaucagccaggucaaugagaaaauuaaccagucucuggccuucaucagaaaguccgaugaacuccugcacaaugugaacgcuggcaaaagcaccacaaauauuaugaucaccacaauuaucaucgugauuaucgucauucugcuuucucucaucgcgguggggcugcugcucuacugcaaggcccggugaggacuagugcaucacauuuaaaagcaucucagccuaccaugagaauaagagaaagaaaaugaagaucaauagcuuauucaucucuuuuucuuuuucguugguguaaagccaacacccugucuaaaaaacauaaauuucuuuaaucauuuugccucuuuucucugugcuucaauuaauaaaaaauggaaagaaccuagaucuaaaaaaaaaaaaaaaaaaaaaaaaaaaaaaaaaaaaaaaaaaaaaaaaaaaaaaaaaaaaaaaaugcaucccccccccccccccccccccccccccccccaaaggcucuuuucagagccaccagaauu

SEQ ID NO: 878 - RNA, 2048 nt, Artificial Sequence
  mRNA product Design i-2 comprising derived and/or modified sequence from HRSV(A2)__F-del (opt6)
gggagaggcgcugccuacggagguggcagccaucuccuucucggcaucaagcuuaccauggaauuacuaauacucaaagccaacgcaauaacaacaauacuaacagcaguaacauucugcuucgcaucaggacaaaacaucacagaagaauuuuaccaaaguacaugcagugcagucucuaaaggauaccucagugccuuacgcacaggaugguacacaucaguaauaacaaucgaacuuucaaacauaaaagaaaacaaaugcaauggaaccgacgccaaaguaaaacuaaucaaacaagaacuagacaaauauaaaaaugcaguaacagaauuacaacuccuaaugcaauccacaccagcaacaaauaacagagcaagacgagaacucccucgauucaugaauuacacauuaaacaacgcaaaaaaaacuaacguaacuuuaucaaaaaaaagaaaacguagauuucuaggauuccuacuaggcguaggguccgccauugcaucaggaguagcaguuagcaaaguauuacauuuagaaggagaaguaaauaaaaucaaaagcgcacuacucucaaccaacaaagcaguaguaucacucucaaacggaguaucaguacuaacauccaaaguacucgaccucaaaaacuacauagacaaacaauuacuacccauaguaaacaaacaaucaugcucuauaucaaauaucgaaacaguaaucgaauuucaacaaaaaaacaaucgacuacuugaaauaacaagagaguucuccgucaaugccggagucaccacaccagucucaacauacaugcuaaccaacucugaacuccuaucacuaauaaaugacaugccaauaacaaacgaccaaaaaaaacuaaugucaaauaacguacaaauaguacgacaacaaaguuauuccauaaugaguauaaucaaagaagaaguguuagcauacguaguccaacuaccauuauauggaguaauagacacaccauguuggaaauuacacaccucaccacucugcacuaccaauacaaaagaaggcucaaauauaugccuaacucgcacagacagaggcugguacugcgauaacgcaggauccguaucuuucuuuccccaagcagaaacuugcaaaguacaaucaaacagagucuucugcgacaccaugaauagucucacauuaccaucugaaguaaaccuauguaacguagauauauucaauccaaaauacgacugcaaaauaaugacaucaaaaaccgacgucucuagcaguguaaucacaucacuaggagcaauaguaagcugcuauggaaaaacaaaauguacagcaucaaacaaaaacaggggaauaauaaaaaccuucucaaacggaugugacuacguaucaaauaaaggcguagacacaguaagcguaggaaacacccuauacuacguuaacaaacaagaagggaaaucauuauacguaaaaggagaaccaauaauaaacuucuacgauccacucguauucccauccgacgaauuugacgccagcauaucccaaguuaacgaaaaaauaaaccaaucacuugcauuuauacgaaaaucugaugaacuucuccacaacguaaaugcaggaaaauccaccaccaauauaaugaucacaacuaucaucauaguaauaaucgucauuuuacuaucauuaauagcaguuggccuacuucuauacugcaaagcaagauaaggacuagugcaucacauuuaaaagcaucucagccuaccaugagaauaagagaaagaaaaugaagaucaauagcuuauucaucucuuuuucuuuuucguugguguaaagccaacacccugucuaaaaaacauaaauuucuuuaaucauuuugccucuuuucucugugcuucaauuaauaaaaaauggaaagaaccuagaucuaaaaaaaaaaaaaaaaaaaaaaaaaaaaaaaaaaaaaaaaaaaaaaaaaaaaaaaaaaaaaaaaugcaucccccccccccccccccccccccccccccccaaaggcucuuuucagagccaccagaauu

SEQ ID NO: 879 - RNA, 2048 nt, Artificial Sequence
  mRNA product Design i-2 comprising derived and/or modified sequence from HRSV(A2)__F-del (opt11)
gggagaggcgcugccuacggagguggcagccaucuccuucucggcaucaagcuuaccauggaacuacuaauccuaaaagccaacgcgaucaccaccauccuaacggcagucaccuucugcuucgcaucaggccaaaacaucacagaagaguucuaccaaagcacaugcuccgccguauccaaaggcuaccucagcgcccuacgcacaggcugguacacaucugucaucaccauagaacucuccaacaucaaagaaaacaaaugcaacggcacugacgccaaaguaaagcugaucaaacaagaacucgacaaauacaaaaacgcagucaccgaacuccaacuacucaugcaauccaccccugcaaccaacaacagggcccgccgcgaacucccccgcuucaugaacuacacuuuaaacaacgccaaaaagaccaacgucacacucagcaagaaacggaaacgacgauuccuaggguuucuccuaggcgucggcucggcaaucgccuccggcgucgccguaagcaaaguacuacaccuagaaggcgaagugaacaaaaucaaaagugcccuucucuccaccaacaaggccguagucucucuauccaacggagucucaguccucaccucaaagguccucgaccucaaaaacuacaucgacaaacaacuacuccccauugucaacaagcagucaugcuccauaucaaacaucgaaaccgucaucgaguuccaacagaaaaacaaccgacuccucgaaauaaccagagaguucucggucaacgccggcgucaccaccccagucagcaccuacaugcucacuaacuccgaacuccuaucccucaucaacgacaugccaauuaccaacgaccaaaagaaacuaaugucgaacaacguucaaaucguccgacaacaaaguuacuccaucaugagcauaaucaaagaagaaguucuagcguacgucguccaacucccacuauacggcgucaucgacacuccgugcuggaaacuccacacaucaccccuauguacaaccaacacaaaagaaggcagcaacaucugccucacccgcaccgaccgagggugguauugcgauaacgcuggcagcgucuccuucuucccccaagccgaaaccugcaaaguccaaucaaacagaguauucugcgacaccaugaacucccuuacucucccuagcgaagucaaccucugcaacguugacauauucaaccccaaauacgacugcaaaaucaugaccuccaagaccgacgucuccuccuccgucaucacaucucuaggugccauugucuccugcuacggaaaaaccaaaugcacagccuccaacaaaaaccgcggcaucauaaaaaccuucuccaacggcugcgacuacgucaguaauaaaggcgucgacacgguauccguugggaauacgcuuuacuacguaaauaaacaagaaggcaaaucccucuacgucaaaggugaacccaucauaaacuucuacgacccgcuuguguucccauccgacgaguucgacgccagcaucagccaggucaacgaaaagaucaaccaaucccuagccuucauccgcaaaagcgacgaacuacuacacaacgucaacgccggaaaauccacaaccaacaucaugaucaccaccaucaucaucgucaucaucguaauccuacucucucucaucgccgucggccuccuacuguacuguaaagcccgauagggacuagugcaucacauuuaaaagcaucucagccuaccaugagaauaagagaaagaaaaugaagaucaauagcuuauucaucucuuuuucuuuuucguugguguaaagccaacacccugucuaaaaaacauaaauuucuuuaaucauuuugccucuuuucucugugcuucaauuaauaaaaaauggaaagaaccuagaucuaaaaaaaaaaaaaaaaaaaaaaaaaaaaaaaaaaaaaaaaaaaaaaaaaaaaaaaaaaaaaaaaugcaucccccccccccccccccccccccccccccccaaaggcucuuuucagagccaccagaauu

SEQ ID NO: 880 - RNA, 2044 nt, Artificial Sequence
  mRNA product Design i-2 comprising derived and/or modified sequence from HRSV(A2)__F-del (artificial)
ggggcgcugccuacggagguggcagccaucuccuucucggcaucaagcuuaccauggaguugcuaauccucaaagcaaaugcaauuaccacaauccucacugcagucacauuuuguuuugcuucuggucaaaacaucacugaagaauuuuaucaaucaacaugcagugcaguuagcaaaggcuaucuuagugcucugagaacugguugguauaccaguguuauaacuauagaauuaaguaauaucaaggaaaauaaguguaauggaacagaugcuaagguaaaauugauaaaacaagaauuagauaaauauaaaaaugcuguaacagaauugcaguugcucaugcaaagcacaccagcaacaaacaaucgagccagaagagaacuaccaagguuuaugaauuauacacucaacaaugccaaaaaaaccaauguaacauuaagcaagaaaaggaaaagaagauuucuugguuuuuuguuagguguuggaucugcaaucgccaguggcguugcuguaucuaagguccugcaccuagaaggggaagugaacaagaucaaaagugcucuacuauccacaaacaaggcuguagucagcuuaucaaauggaguuagugucuuaaccagcaaaguguuagaccucaaaaacuauauagauaaacaauuguuaccuauugugaacaagcaaagcugcagcauaucaaauauagaaacugugauagaguuccaacaaaagaacaacagacuacuagagauuaccagggaauuuaguguuaaugcagguguaacuacaccuguaagcacuuacauguuaacuaauagugaauuauugucauuaaucaaugauaugccuauaacaaaugaucagaaaaaguuaauguccaacaauguucaaauaguuagacagcaaaguuacucuaucauguccauaauaaaagaggaagucuuagcauauguaguacaauuaccacuauaugguguuauagauacacccuguuggaaacuacacacauccccucuauguacaaccaacacaaaagaaggguccaacaucuguuuaacaagaacugacagaggaugguacugugacaaugcaggaucaguaucuuucuucccacaagcugaaacauguaaaguucaaucaaaucgaguauuuugugacacaaugaacaguuuaacauuaccaagugaaguaaaucucugcaauguugacauauucaaccccaaauaugauuguaaaauuaugacuucaaaaacagauguaagcagcuccguuaucacaucucuaggagccauugugucaugcuauggcaaaacuaaauguacagcauccaauaaaaaucguggaaucauaaagacauuuucuaacgggugcgauuauguaucaaauaaagggguggacacugugucuguagguaacacauuauauuauguaaauaagcaagaagguaaaagucucuauguaaaaggugaaccaauaauaaauuucuaugacccauuaguauuccccucugaugaauuugaugcaucaauaucucaagucaacgagaagauuaaccagagccuagcauuuauucguaaauccgaugaauuauuacauaauguaaaugcugguaaauccaccacaaauaucaugauaacuacuauaauuauagugauuauaguaauauuguuaucauuaauugcuguuggacugcucuuauacuguaaggccagauaaggacuagugcaucacauuuaaaagcaucucagccuaccaugagaauaagagaaagaaaaugaagaucaauagcuuauucaucucuuuuucuuuuucguugguguaaagccaacacccugucuaaaaaacauaaauuucuuuaaucauuuugccucuuuucucugugcuucaauuaauaaaaaauggaaagaaccuagaucuaaaaaaaaaaaaaaaaaaaaaaaaaaaaaaaaaaaaaaaaaaaaaaaaaaaaaaaaaaaaaaaaugcaucccccccccccccccccccccccccccccccaaaggcucuuuucagagccaccagaauu

SEQ ID NO: 881 - RNA, 2044 nt, Artificial Sequence
  mRNA product Design i-2 comprising derived and/or modified sequence from HRSV(A2)__F-del (opt1) R3738/R3939
ggggcgcugccuacggagguggcagccaucuccuucucggcaucaagcuuaccauggagcugcucauccugaaggccaacgccaucaccaccauccugacggcggugaccuucugcuucgccagcggccagaacaucaccgaggaguucuaccaguccaccugcagcgccgucuccaagggguaccucagcgcccugcggacgggcugguacaccuccgugaucaccaucgagcugagcaacaucaaggagaacaagugcaacgggaccgacgccaaggugaagcucaucaagcaggagcuggacaaguacaagaacgcggucacggagcugcagcuccugaugcaguccaccccggcaaccaacaaccgcgcccggcgcgagcugccccgguucaugaacuacacccucaacaacgccaagaagacgaacgugacccugagcaagaagcgcaagcggcgcuuccugggcuuccuccugggggugggcuccgccaucgcgagcggcgucgccguguccaaggugcugcaccucgagggggaggucaacaagaucaagagcgcccugcuguccaccaacaaggccguggugagccucuccaacggcgucagcgugcugaccuccaaggugcuggaccucaagaacuacaucgacaagcagcugcugcccaucgucaacaagcagagcugcuccaucagcaacaucgagacggugaucgaguuccagcagaagaacaaccggcuccuggagaucacccgcgaguucagcgugaacgccggggucaccacccccguguccacguacaugcugaccaacagcgagcuccugucccugaucaacgacaugccgaucaccaacgaccagaagaagcucaugagcaacaacgugcagaucguccggcagcaguccuacagcaucauguccaucaucaaggaggaggugcuggcguacgugguccagcugccccucuacggcgugaucgacacccccugcuggaagcugcacacgagcccccugugcaccaccaacaccaaggagggguccaacaucugccucacgcgcaccgaccggggcugguacugcgacaacgccggcagcgucuccuucuucccgcaggccgagaccugcaaggugcagagcaaccgcguguucugcgacaccaugaacucccugacgcugcccagcgagguaaaccucugcaacgucgacaucuucaaccccaaguacgacugcaagaucaugaccuccaagaccgacgugagcuccagcgugaucaccucccugggggccaucgucagcugcuacggcaagacgaagugcaccgccagcaacaagaaccgggggaucaucaagaccuucuccaacggcugcgacuacgugagcaacaagggcguggacaccguguccgucgggaacacccuguacuacgugaacaagcaggagggcaagagccucuacgugaagggggagcccaucaucaacuucuacgacccgcuggucuuccccuccgacgaguucgacgcgagcaucucccaggugaacgagaagaucaaccagagccuggccuucauccgcaaguccgacgagcugcuccacaacgugaacgccggcaagagcacgaccaacaucaugaucaccaccaucaucaucgucaucaucgugauccugcugucccucaucgccguggggcugcugcucuacugcaaggcccggugaggacuagugcaucacauuuaaaagcaucucagccuaccaugagaauaagagaaagaaaaugaagaucaauagcuuauucaucucuuuuucuuuuucguugguguaaagccaacacccugucuaaaaaacauaaauuucuuuaaucauuuugccucuuuucucugugcuucaauuaauaaaaaauggaaagaaccuagaucuaaaaaaaaaaaaaaaaaaaaaaaaaaaaaaaaaaaaaaaaaaaaaaaaaaaaaaaaaaaaaaaaugcaucccccccccccccccccccccccccccccccaaaggcucuuuucagagccaccagaauu

SEQ ID NO: 882 - RNA, 2044 nt, Artificial Sequence
  mRNA product Design i-2 comprising derived and/or modified sequence from HRSV(A2)__F-del (opt1)
ggggcgcugccuacggagguggcagccaucuccuucucggcaucaagcuuaccauggagcugcucauccugaaggccaacgccaucaccaccauccugacggcggugaccuucugcuucgccagcggccagaacaucaccgaggaguucuaccaguccacgugcagcgccgucuccaagggguaccucagcgcccugcgcaccggcugguacaccuccgugaucaccaucgagcugagcaacaucaaggagaacaagugcaacgggaccgacgccaaggugaagcucaucaagcaggagcuggacaaguacaagaacgcggucacggagcugcagcuccugaugcaguccacccccgccaccaacaaccgggcccgccgggagcugccgcgcuucaugaacuacacccucaacaacgccaagaagacgaacgugacccugagcaagaagcggaagcgccgguuccugggcuuccuccugggggugggcuccgcgaucgccagcggcgucgccguguccaaggugcugcaccucgagggggaggucaacaagaucaagagcgcccugcuguccaccaacaaggccguggugagccucuccaacggcgucagcgugcugaccuccaaggugcuggaccucaagaacuacaucgacaagcagcugcugcccaucgucaacaagcagagcugcuccaucagcaacaucgagacggugaucgaguuccagcagaagaacaaccgccuccuggagaucacccgggaguucagcgugaacgcgggggucaccacccccguguccacguacaugcugaccaacagcgagcuccugucccugaucaacgacaugcccaucaccaacgaccagaagaagcucaugagcaacaacgugcagaucguccgccagcaguccuacagcaucauguccaucaucaaggaggaggugcuggccuacgugguccagcugccgcucuacggcgugaucgacacccccugcuggaagcugcacacgagcccccugugcaccaccaacaccaaggagggguccaacaucugccucacgcggaccgaccgcggcugguacugcgacaacgccggcagcgucuccuucuucccccaggccgagaccugcaaggugcagagcaaccggguguucugcgacaccaugaacucccugacgcugccgagcgaggucaaccucugcaacguggacaucuucaaccccaaguacgacugcaagaucaugaccuccaagaccgacgugagcuccagcgucaucaccucccugggggccaucgugagcugcuacggcaagacgaagugcaccgcgagcaacaagaaccgcgggaucaucaagaccuucuccaacggcugcgacuacgugagcaacaagggcgucgacaccguguccguggggaacacccuguacuacgucaacaagcaggagggcaagagccucuacgugaagggggagcccaucaucaacuucuacgacccccugguguucccguccgacgaguucgacgccagcaucucccaggucaacgagaagaucaaccagagccuggccuucauccggaaguccgacgagcuccugcacaacgugaacgccggcaagagcacgaccaacaucaugaucaccaccaucaucaucgugaucaucgucauccugcugucccucaucgccguggggcugcugcucuacugcaaggcgcgcugaggacuagugcaucacauuuaaaagcaucucagccuaccaugagaauaagagaaagaaaaugaagaucaauagcuuauucaucucuuuuucuuuuucguugguguaaagccaacacccugucuaaaaaacauaaauuucuuuaaucauuuugccucuuuucucugugcuucaauuaauaaaaaauggaaagaaccuagaucuaaaaaaaaaaaaaaaaaaaaaaaaaaaaaaaaaaaaaaaaaaaaaaaaaaaaaaaaaaaaaaaaugcaucccccccccccccccccccccccccccccccaaaggcucuuuucagagccaccagaauu

SEQ ID NO: 883 - RNA, 2044 nt, Artificial Sequence
  mRNA product Design i-2 comprising derived and/or modified sequence from HRSV(A2)__F-del (opt2)
ggggcgcugccuacggagguggcagccaucuccuucucggcaucaagcuuaccauggagcuccucauccucaaggccaacgccaucaccaccauccucaccgccgucaccuucugcuucgccuccggccagaacaucaccgaggaguucuaccaguccaccugcuccgccgucuccaagggcuaccucuccgcccuccgcaccggcugguacaccuccgucaucaccaucgagcucuccaacaucaaggagaacaagugcaacggcaccgacgccaaggucaagcucaucaagcaggagcucgacaaguacaagaacgccgucaccgagcuccagcuccucaugcaguccacccccgccaccaacaaccgcgcccgccgcgagcucccccgcuucaugaacuacacccucaacaacgccaagaagaccaacgucacccucuccaagaagcgcaagcgccgcuuccucggcuuccuccucggcgucggcuccgccaucgccuccggcgucgccgucuccaagguccuccaccucgagggcgaggucaacaagaucaaguccgcccuccucuccaccaacaaggccgucgucucccucuccaacggcgucuccguccucaccuccaagguccucgaccucaagaacuacaucgacaagcagcuccuccccaucgucaacaagcaguccugcuccaucuccaacaucgagaccgucaucgaguuccagcagaagaacaaccgccuccucgagaucacccgcgaguucuccgucaacgccggcgucaccacccccgucuccaccuacaugcucaccaacuccgagcuccucucccucaucaacgacaugcccaucaccaacgaccagaagaagcucauguccaacaacguccagaucguccgccagcaguccuacuccaucauguccaucaucaaggaggagguccucgccuacgucguccagcucccccucuacggcgucaucgacacccccugcuggaagcuccacaccuccccccucugcaccaccaacaccaaggagggcuccaacaucugccucacccgcaccgaccgcggcugguacugcgacaacgccggcuccgucuccuucuucccccaggccgagaccugcaagguccaguccaaccgcgucuucugcgacaccaugaacucccucacccuccccuccgaggucaaccucugcaacgucgacaucuucaaccccaaguacgacugcaagaucaugaccuccaagaccgacgucuccuccuccgucaucaccucccucggcgccaucgucuccugcuacggcaagaccaagugcaccgccuccaacaagaaccgcggcaucaucaagaccuucuccaacggcugcgacuacgucuccaacaagggcgucgacaccgucuccgucggcaacacccucuacuacgucaacaagcaggagggcaagucccucuacgucaagggcgagcccaucaucaacuucuacgacccccucgucuuccccuccgacgaguucgacgccuccaucucccaggucaacgagaagaucaaccagucccucgccuucauccgcaaguccgacgagcuccuccacaacgucaacgccggcaaguccaccaccaacaucaugaucaccaccaucaucaucgucaucaucgucauccuccucucccucaucgccgucggccuccuccucuacugcaaggcccgcugaggacuagugcaucacauuuaaaagcaucucagccuaccaugagaauaagagaaagaaaaugaagaucaauagcuuauucaucucuuuuucuuuuucguugguguaaagccaacacccugucuaaaaaacauaaauuucuuuaaucauuuugccucuuuucucugugcuucaauuaauaaaaaauggaaagaaccuagaucuaaaaaaaaaaaaaaaaaaaaaaaaaaaaaaaaaaaaaaaaaaaaaaaaaaaaaaaaaaaaaaaaugcaucccccccccccccccccccccccccccccccaaaggcucuuuucagagccaccagaauu

SEQ ID NO: 884 - RNA, 2044 nt, Artificial Sequence
  mRNA product Design i-2 comprising derived and/or modified sequence from HRSV(A2)__F-del (opt3)
ggggcgcugccuacggagguggcagccaucuccuucucggcaucaagcuuaccauggagcugcucauccuuaaggccaacgcuauuaccacaauacugacugcagugacguucugcuuugccagcggccagaauaucaccgaagaguucuaccaauccacauguucugcggucucaaaaggguauuugagugcuuuaagaacuggaugguacaccagcguuauuacaaucgaacuguccaacauuaaggagaauaaaugcaacgguaccgacgccaaggugaaacuaaucaagcaggaacucgauaaguauaaaaaugcaguaacugagcugcagcuucugaugcagucuacacccgccaccaacaauagggcucggcgcgaguugccucgauuuaugaacuacacgcucaauaacgcaaagaaaacuaaugugacccugucgaagaaacguaagagaagguuccugggcuuucucuuaggggucggaucagccauagcuagcggcguggccguuaguaaggugcugcaccuugaaggugaggucaacaaaaucaaguccgcguugcugucuacaaauaaagcagugguaagccuauccaacgggguuucagugcucacuucuaagguccuggaccuuaaaaauuauauugauaagcaacuguugccaaucgugaacaaacagagcuguucuauuuccaacaucgaaaccgugauagaguuccagcagaagaauaaccggcuccuggagauuacacgcgaauuuucagucaaugccggaguuaccacgccggugagcacuuacauguuaacaaacagugagcugcucucucuuaucaaugacaugcccauuaccaacgaucaaaagaaacugauguccaauaacguacagaucgugagacagcagagcuauucgaucaugucuauuauaaaggaagaggucuuggcuuacgugguucaacuaccucuguacggcgugaucgacacuccaugcuggaaacuccauacauccccacuguguaccacgaauaccaaggaaggcucaaacauuugccuuacaaggacugaucgggggugguauugugacaaugccggaagugucagcuucuuuccucaggcagagaccugcaaagugcaguccaaccgcguauucugugauacaaugaauagucugacuuugccaagcgagguuaaccucugcaauguggacaucuuuaaccccaaguacgauuguaagauaaugaccucaaaaacagacgucaguuccagcgugauuaccucucugggugcuaucgucucaugcuauggcaagacuaaaugcacggccaguaacaagaaucgagggaucauuaaaacauucagcaacggaugugauuacguguccaauaagggcguugacaccgugucuguagguaacacuuuauauuacgucaauaagcaagaagggaaaucgcuguaugugaagggagagccuaucauuaacuuuuacgacccccuaguuuucccgagcgaugaauuugacgcguccauaucacaggugaaugagaaaaucaaccagagucucgccuucauuagaaagucugaugaacugcuucacaaugucaacgcaggcaaaagcaccacaaauaucaugaucaccacuauuauaaucgugauuaucguaauuuugcugucccucaucgcugugggccugcuucuguacugcaaggccaggugaggacuagugcaucacauuuaaaagcaucucagccuaccaugagaauaagagaaagaaaaugaagaucaauagcuuauucaucucuuuuucuuuuucguugguguaaagccaacacccugucuaaaaaacauaaauuucuuuaaucauuuugccucuuuucucugugcuucaauuaauaaaaaauggaaagaaccuagaucuaaaaaaaaaaaaaaaaaaaaaaaaaaaaaaaaaaaaaaaaaaaaaaaaaaaaaaaaaaaaaaaaugcaucccccccccccccccccccccccccccccccaaaggcucuuuucagagccaccagaauu

SEQ ID NO: 885 - RNA, 2044 nt, Artificial Sequence
  mRNA product Design i-2 comprising derived and/or modified sequence from HRSV(A2)__F-del (opt4)
ggggcgcugccuacggagguggcagccaucuccuucucggcaucaagcuuaccauggagcugcugauccugaaggccaacgccaucaccaccauccugaccgccgugaccuucugcuucgccagcggccagaacaucaccgaggaguucuaccagagcaccugcagcgccgugagcaagggcuaccugagcgcccugagaaccggcugguacaccagcgugaucaccaucgagcugagcaacaucaaggagaacaagugcaacggcaccgacgccaaggugaagcugaucaagcaggagcuggacaaguacaagaacgccgugaccgagcugcagcugcugaugcagagcacccccgccaccaacaacagagccagaagagagcugcccagauucaugaacuacacccugaacaacgccaagaagaccaacgugacccugagcaagaagagaaagagaagauuccugggcuuccugcugggcgugggcagcgccaucgccagcggcguggccgugagcaaggugcugcaccuggagggcgaggugaacaagaucaagagcgcccugcugagcaccaacaaggccguggugagccugagcaacggcgugagcgugcugaccagcaaggugcuggaccugaagaacuacaucgacaagcagcugcugcccaucgugaacaagcagagcugcagcaucagcaacaucgagaccgugaucgaguuccagcagaagaacaacagacugcuggagaucaccagagaguucagcgugaacgccggcgugaccacccccgugagcaccuacaugcugaccaacagcgagcugcugagccugaucaacgacaugcccaucaccaacgaccagaagaagcugaugagcaacaacgugcagaucgugagacagcagagcuacagcaucaugagcaucaucaaggaggaggugcuggccuacguggugcagcugccccuguacggcgugaucgacacccccugcuggaagcugcacaccagcccccugugcaccaccaacaccaaggagggcagcaacaucugccugaccagaaccgacagaggcugguacugcgacaacgccggcagcgugagcuucuucccccaggccgagaccugcaaggugcagagcaacagaguguucugcgacaccaugaacagccugacccugcccagcgaggugaaccugugcaacguggacaucuucaaccccaaguacgacugcaagaucaugaccagcaagaccgacgugagcagcagcgugaucaccagccugggcgccaucgugagcugcuacggcaagaccaagugcaccgccagcaacaagaacagaggcaucaucaagaccuucagcaacggcugcgacuacgugagcaacaagggcguggacaccgugagcgugggcaacacccuguacuacgugaacaagcaggagggcaagagccuguacgugaagggcgagcccaucaucaacuucuacgacccccugguguuccccagcgacgaguucgacgccagcaucagccaggugaacgagaagaucaaccagagccuggccuucaucagaaagagcgacgagcugcugcacaacgugaacgccggcaagagcaccaccaacaucaugaucaccaccaucaucaucgugaucaucgugauccugcugagccugaucgccgugggccugcugcuguacugcaaggccagaugaggacuagugcaucacauuuaaaagcaucucagccuaccaugagaauaagagaaagaaaaugaagaucaauagcuuauucaucucuuuuucuuuuucguugguguaaagccaacacccugucuaaaaaacauaaauuucuuuaaucauuuugccucuuuucucugugcuucaauuaauaaaaaauggaaagaaccuagaucuaaaaaaaaaaaaaaaaaaaaaaaaaaaaaaaaaaaaaaaaaaaaaaaaaaaaaaaaaaaaaaaaugcaucccccccccccccccccccccccccccccccaaaggcucuuuucagagccaccagaauu

SEQ ID NO: 886 - RNA, 2044 nt, Artificial Sequence
  mRNA product Design i-2 comprising derived and/or modified sequence from HRSV(A2)__F-del (opt5)
ggggcgcugccuacggagguggcagccaucuccuucucggcaucaagcuuaccauggagcugcucauccugaaggccaacgcuauuaccacaauccuuacggccgugaccuucugcuuugcgagcggccagaauauuacagaagaguucuaccaauccaccuguucugcugucagcaaaggguaucuguccgcccucagaacaggaugguacaccucuguuaucacaauugaacugagcaacaucaaggagaauaaaugcaacggcaccgacgccaaggugaaacuuaucaagcaggaacuggauaaguauaaaaaugcugugacggagcuccagcugcugaugcaguccacccccgccacaaacaaucgggcucgcagagagcucccucgguuuaugaacuacacccugaauaacgccaagaaaacaaaugucacccuuucuaagaaacgcaagagacgguuccugggguuucuccugggagugggcagcgcgauugccuccgggguugcugugagcaagguccuucaccuggaaggagaggugaacaaaaucaagucugcccuccuguccacgaauaaagcuguugugagccugucuaacggcgucuccgugcucacaagcaaggugcuggaccuuaaaaauuauauugauaagcaacugcucccgaucgucaacaaacagucuuguuccauuagcaacaucgaaaccguuauugaguuccagcagaagaauaaccgccugcuugagaucacaagagaauuuuccgugaaugccggcgugaccacccccgucucuacauacaugcugacgaacagcgagcuccugucccugaucaaugacaugccuauuaccaacgaucaaaagaaacucaugagcaauaacgugcagaucguucggcagcagucuuauuccauuaugagcaucauuaaggaagaggugcuggcguacgucgugcaacuuccccuguacgggguuaucgacacaccuugcuggaaacuccauaccucuccccuguguacaaccaauacgaaggaaggaagcaacaucugccuuacacgcaccgauagaggcugguauugugacaaugccggguccgugucuuucuuuccucaggcugagaccugcaaaguccagagcaaccggguguucugugauacaaugaacucccugacccucccgagcgaggucaaucugugcaauguggacauuuuuaaccccaaguacgauuguaagaucaugacaucuaaaacggacguuuccagcucugugauuaccucccugggagccaucgucagcugcuauggcaagacaaaaugcaccgcuuccaacaagaaucgcgggauuaucaaaacauucucuaacggaugugauuacgugagcaauaagggcguugacaccguguccgucggcaacacgcucuauuacgugaauaagcaagaagggaaaucucuguaugugaagggagagccuaucauuaacuuuuacgacccccuuguuuucccuagcgaugaauuugacgccuccaucagccaggucaaugagaaaauuaaccagucucuggccuucaucagaaaguccgaugaacuccugcacaaugugaacgcuggcaaaagcaccacaaauauuaugaucaccacaauuaucaucgugauuaucgucauucugcuuucucucaucgcgguggggcugcugcucuacugcaaggcccggugaggacuagugcaucacauuuaaaagcaucucagccuaccaugagaauaagagaaagaaaaugaagaucaauagcuuauucaucucuuuuucuuuuucguugguguaaagccaacacccugucuaaaaaacauaaauuucuuuaaucauuuugccucuuuucucugugcuucaauuaauaaaaaauggaaagaaccuagaucuaaaaaaaaaaaaaaaaaaaaaaaaaaaaaaaaaaaaaaaaaaaaaaaaaaaaaaaaaaaaaaaaugcaucccccccccccccccccccccccccccccccaaaggcucuuuucagagccaccagaauu

SEQ ID NO: 887 - RNA, 2044 nt, Artificial Sequence
  mRNA product Design i-2 comprising derived and/or modified sequence from HRSV(A2)__F-del (opt6)
ggggcgcugccuacggagguggcagccaucuccuucucggcaucaagcuuaccauggaauuacuaauacucaaagccaacgcaauaacaacaauacuaacagcaguaacauucugcuucgcaucaggacaaaacaucacagaagaauuuuaccaaaguacaugcagugcagucucuaaaggauaccucagugccuuacgcacaggaugguacacaucaguaauaacaaucgaacuuucaaacauaaaagaaaacaaaugcaauggaaccgacgccaaaguaaaacuaaucaaacaagaacuagacaaauauaaaaaugcaguaacagaauuacaacuccuaaugcaauccacaccagcaacaaauaacagagcaagacgagaacucccucgauucaugaauuacacauuaaacaacgcaaaaaaaacuaacguaacuuuaucaaaaaaaagaaaacguagauuucuaggauuccuacuaggcguaggguccgccauugcaucaggaguagcaguuagcaaaguauuacauuuagaaggagaaguaaauaaaaucaaaagcgcacuacucucaaccaacaaagcaguaguaucacucucaaacggaguaucaguacuaacauccaaaguacucgaccucaaaaacuacauagacaaacaauuacuacccauaguaaacaaacaaucaugcucuauaucaaauaucgaaacaguaaucgaauuucaacaaaaaaacaaucgacuacuugaaauaacaagagaguucuccgucaaugccggagucaccacaccagucucaacauacaugcuaaccaacucugaacuccuaucacuaauaaaugacaugccaauaacaaacgaccaaaaaaaacuaaugucaaauaacguacaaauaguacgacaacaaaguuauuccauaaugaguauaaucaaagaagaaguguuagcauacguaguccaacuaccauuauauggaguaauagacacaccauguuggaaauuacacaccucaccacucugcacuaccaauacaaaagaaggcucaaauauaugccuaacucgcacagacagaggcugguacugcgauaacgcaggauccguaucuuucuuuccccaagcagaaacuugcaaaguacaaucaaacagagucuucugcgacaccaugaauagucucacauuaccaucugaaguaaaccuauguaacguagauauauucaauccaaaauacgacugcaaaauaaugacaucaaaaaccgacgucucuagcaguguaaucacaucacuaggagcaauaguaagcugcuauggaaaaacaaaauguacagcaucaaacaaaaacaggggaauaauaaaaaccuucucaaacggaugugacuacguaucaaauaaaggcguagacacaguaagcguaggaaacacccuauacuacguuaacaaacaagaagggaaaucauuauacguaaaaggagaaccaauaauaaacuucuacgauccacucguauucccauccgacgaauuugacgccagcauaucccaaguuaacgaaaaaauaaaccaaucacuugcauuuauacgaaaaucugaugaacuucuccacaacguaaaugcaggaaaauccaccaccaauauaaugaucacaacuaucaucauaguaauaaucgucauuuuacuaucauuaauagcaguuggccuacuucuauacugcaaagcaagauaaggacuagugcaucacauuuaaaagcaucucagccuaccaugagaauaagagaaagaaaaugaagaucaauagcuuauucaucucuuuuucuuuuucguugguguaaagccaacacccugucuaaaaaacauaaauuucuuuaaucauuuugccucuuuucucugugcuucaauuaauaaaaaauggaaagaaccuagaucuaaaaaaaaaaaaaaaaaaaaaaaaaaaaaaaaaaaaaaaaaaaaaaaaaaaaaaaaaaaaaaaaugcaucccccccccccccccccccccccccccccccaaaggcucuuuucagagccaccagaauu

SEQ ID NO: 888 - RNA, 2044 nt, Artificial Sequence
  mRNA product Design i-2 comprising derived and/or modified sequence from HRSV(A2)__F-del (opt11)
ggggcgcugccuacggagguggcagccaucuccuucucggcaucaagcuuaccauggaacuacuaauccuaaaagccaacgcgaucaccaccauccuaacggcagucaccuucugcuucgcaucaggccaaaacaucacagaagaguucuaccaaagcacaugcuccgccguauccaaaggcuaccucagcgcccuacgcacaggcugguacacaucugucaucaccauagaacucuccaacaucaaagaaaacaaaugcaacggcacugacgccaaaguaaagcugaucaaacaagaacucgacaaauacaaaaacgcagucaccgaacuccaacuacucaugcaauccaccccugcaaccaacaacagggcccgccgcgaacucccccgcuucaugaacuacacuuuaaacaacgccaaaaagaccaacgucacacucagcaagaaacggaaacgacgauuccuaggguuucuccuaggcgucggcucggcaaucgccuccggcgucgccguaagcaaaguacuacaccuagaaggcgaagugaacaaaaucaaaagugcccuucucuccaccaacaaggccguagucucucuauccaacggagucucaguccucaccucaaagguccucgaccucaaaaacuacaucgacaaacaacuacuccccauugucaacaagcagucaugcuccauaucaaacaucgaaaccgucaucgaguuccaacagaaaaacaaccgacuccucgaaauaaccagagaguucucggucaacgccggcgucaccaccccagucagcaccuacaugcucacuaacuccgaacuccuaucccucaucaacgacaugccaauuaccaacgaccaaaagaaacuaaugucgaacaacguucaaaucguccgacaacaaaguuacuccaucaugagcauaaucaaagaagaaguucuagcguacgucguccaacucccacuauacggcgucaucgacacuccgugcuggaaacuccacacaucaccccuauguacaaccaacacaaaagaaggcagcaacaucugccucacccgcaccgaccgagggugguauugcgauaacgcuggcagcgucuccuucuucccccaagccgaaaccugcaaaguccaaucaaacagaguauucugcgacaccaugaacucccuuacucucccuagcgaagucaaccucugcaacguugacauauucaaccccaaauacgacugcaaaaucaugaccuccaagaccgacgucuccuccuccgucaucacaucucuaggugccauugucuccugcuacggaaaaaccaaaugcacagccuccaacaaaaaccgcggcaucauaaaaaccuucuccaacggcugcgacuacgucaguaauaaaggcgucgacacgguauccguugggaauacgcuuuacuacguaaauaaacaagaaggcaaaucccucuacgucaaaggugaacccaucauaaacuucuacgacccgcuuguguucccauccgacgaguucgacgccagcaucagccaggucaacgaaaagaucaaccaaucccuagccuucauccgcaaaagcgacgaacuacuacacaacgucaacgccggaaaauccacaaccaacaucaugaucaccaccaucaucaucgucaucaucguaauccuacucucucucaucgccgucggccuccuacuguacuguaaagcccgauagggacuagugcaucacauuuaaaagcaucucagccuaccaugagaauaagagaaagaaaaugaagaucaauagcuuauucaucucuuuuucuuuuucguugguguaaagccaacacccugucuaaaaaacauaaauuucuuuaaucauuuugccucuuuucucugugcuucaauuaauaaaaaauggaaagaaccuagaucuaaaaaaaaaaaaaaaaaaaaaaaaaaaaaaaaaaaaaaaaaaaaaaaaaaaaaaaaaaaaaaaaugcaucccccccccccccccccccccccccccccccaaaggcucuuuucagagccaccagaauu

SEQ ID NO: 889 - RNA, 1879 nt, Artificial Sequence
  mRNA product Design i-3 comprising derived and/or modified sequence from HRSV(A2)__F-del (artificial)
gggagaaagcuuaccauggaguugcuaauccucaaagcaaaugcaauuaccacaauccucacugcagucacauuuuguuuugcuucuggucaaaacaucacugaagaauuuuaucaaucaacaugcagugcaguuagcaaaggcuaucuuagugcucugagaacugguugguauaccaguguuauaacuauagaauuaaguaauaucaaggaaaauaaguguaauggaacagaugcuaagguaaaauugauaaaacaagaauuagauaaauauaaaaaugcuguaacagaauugcaguugcucaugcaaagcacaccagcaacaaacaaucgagccagaagagaacuaccaagguuuaugaauuauacacucaacaaugccaaaaaaaccaauguaacauuaagcaagaaaaggaaaagaagauuucuugguuuuuuguuagguguuggaucugcaaucgccaguggcguugcuguaucuaagguccugcaccuagaaggggaagugaacaagaucaaaagugcucuacuauccacaaacaaggcuguagucagcuuaucaaauggaguuagugucuuaaccagcaaaguguuagaccucaaaaacuauauagauaaacaauuguuaccuauugugaacaagcaaagcugcagcauaucaaauauagaaacugugauagaguuccaacaaaagaacaacagacuacuagagauuaccagggaauuuaguguuaaugcagguguaacuacaccuguaagcacuuacauguuaacuaauagugaauuauugucauuaaucaaugauaugccuauaacaaaugaucagaaaaaguuaauguccaacaauguucaaauaguuagacagcaaaguuacucuaucauguccauaauaaaagaggaagucuuagcauauguaguacaauuaccacuauaugguguuauagauacacccuguuggaaacuacacacauccccucuauguacaaccaacacaaaagaaggguccaacaucuguuuaacaagaacugacagaggaugguacugugacaaugcaggaucaguaucuuucuucccacaagcugaaacauguaaaguucaaucaaaucgaguauuuugugacacaaugaacaguuuaacauuaccaagugaaguaaaucucugcaauguugacauauucaaccccaaauaugauuguaaaauuaugacuucaaaaacagauguaagcagcuccguuaucacaucucuaggagccauugugucaugcuauggcaaaacuaaauguacagcauccaauaaaaaucguggaaucauaaagacauuuucuaacgggugcgauuauguaucaaauaaagggguggacacugugucuguagguaacacauuauauuauguaaauaagcaagaagguaaaagucucuauguaaaaggugaaccaauaauaaauuucuaugacccauuaguauuccccucugaugaauuugaugcaucaauaucucaagucaacgagaagauuaaccagagccuagcauuuauucguaaauccgaugaauuauuacauaauguaaaugcugguaaauccaccacaaauaucaugauaacuacuauaauuauagugauuauaguaauauuguuaucauuaauugcuguuggacugcucuuauacuguaaggccagauaaggacuaguuauaagacugacuagcccgaugggccucccaacgggcccuccuccccuccuugcaccgagauuaauaaaaaaaaaaaaaaaaaaaaaaaaaaaaaaaaaaaaaaaaaaaaaaaaaaaaaaaaaaaaaaaaugcaucccccccccccccccccccccccccccccccaaaggcucuuuucagagccaccagaauu

SEQ ID NO: 890 - RNA, 1879 nt, Artificial Sequence
  mRNA product Design i-3 comprising derived and/or modified sequence from HRSV(A2)__F-del (opt1) R6940
gggagaaagcuuaccauggagcugcucauccugaaggccaacgccaucaccaccauccugacggcggugaccuucugcuucgccagcggccagaacaucaccgaggaguucuaccaguccaccugcagcgccgucuccaagggguaccucagcgcccugcggacgggcugguacaccuccgugaucaccaucgagcugagcaacaucaaggagaacaagugcaacgggaccgacgccaaggugaagcucaucaagcaggagcuggacaaguacaagaacgcggucacggagcugcagcuccugaugcaguccaccccggcaaccaacaaccgcgcccggcgcgagcugccccgguucaugaacuacacccucaacaacgccaagaagacgaacgugacccugagcaagaagcgcaagcggcgcuuccugggcuuccuccugggggugggcuccgccaucgcgagcggcgucgccguguccaaggugcugcaccucgagggggaggucaacaagaucaagagcgcccugcuguccaccaacaaggccguggugagccucuccaacggcgucagcgugcugaccuccaaggugcuggaccucaagaacuacaucgacaagcagcugcugcccaucgucaacaagcagagcugcuccaucagcaacaucgagacggugaucgaguuccagcagaagaacaaccggcuccuggagaucacccgcgaguucagcgugaacgccggggucaccacccccguguccacguacaugcugaccaacagcgagcuccugucccugaucaacgacaugccgaucaccaacgaccagaagaagcucaugagcaacaacgugcagaucguccggcagcaguccuacagcaucauguccaucaucaaggaggaggugcuggcguacgugguccagcugccccucuacggcgugaucgacacccccugcuggaagcugcacacgagcccccugugcaccaccaacaccaaggagggguccaacaucugccucacgcgcaccgaccggggcugguacugcgacaacgccggcagcgucuccuucuucccgcaggccgagaccugcaaggugcagagcaaccgcguguucugcgacaccaugaacucccugacgcugcccagcgagguaaaccucugcaacgucgacaucuucaaccccaaguacgacugcaagaucaugaccuccaagaccgacgugagcuccagcgugaucaccucccugggggccaucgucagcugcuacggcaagacgaagugcaccgccagcaacaagaaccgggggaucaucaagaccuucuccaacggcugcgacuacgugagcaacaagggcguggacaccguguccgucgggaacacccuguacuacgugaacaagcaggagggcaagagccucuacgugaagggggagcccaucaucaacuucuacgacccgcuggucuuccccuccgacgaguucgacgcgagcaucucccaggugaacgagaagaucaaccagagccuggccuucauccgcaaguccgacgagcugcuccacaacgugaacgccggcaagagcacgaccaacaucaugaucaccaccaucaucaucgucaucaucgugauccugcugucccucaucgccguggggcugcugcucuacugcaaggcccggugaggacuaguuauaagacugacuagcccgaugggccucccaacgggcccuccuccccuccuugcaccgagauuaauaaaaaaaaaaaaaaaaaaaaaaaaaaaaaaaaaaaaaaaaaaaaaaaaaaaaaaaaaaaaaaaaugcaucccccccccccccccccccccccccccccccaaaggcucuuuucagagccaccagaauu

SEQ ID NO: 891 - RNA, 1879 nt, Artificial Sequence
  mRNA product Design i-3 comprising derived and/or modified sequence from HRSV(A2)__F-del (opt1)
gggagaaagcuuaccauggagcugcucauccugaaggccaacgccaucaccaccauccugacggcggugaccuucugcuucgccagcggccagaacaucaccgaggaguucuaccaguccacgugcagcgccgucuccaagggguaccucagcgcccugcgcaccggcugguacaccuccgugaucaccaucgagcugagcaacaucaaggagaacaagugcaacgggaccgacgccaaggugaagcucaucaagcaggagcuggacaaguacaagaacgcggucacggagcugcagcuccugaugcaguccacccccgccaccaacaaccgggcccgccgggagcugccgcgcuucaugaacuacacccucaacaacgccaagaagacgaacgugacccugagcaagaagcggaagcgccgguuccugggcuuccuccugggggugggcuccgcgaucgccagcggcgucgccguguccaaggugcugcaccucgagggggaggucaacaagaucaagagcgcccugcuguccaccaacaaggccguggugagccucuccaacggcgucagcgugcugaccuccaaggugcuggaccucaagaacuacaucgacaagcagcugcugcccaucgucaacaagcagagcugcuccaucagcaacaucgagacggugaucgaguuccagcagaagaacaaccgccuccuggagaucacccgggaguucagcgugaacgcgggggucaccacccccguguccacguacaugcugaccaacagcgagcuccugucccugaucaacgacaugcccaucaccaacgaccagaagaagcucaugagcaacaacgugcagaucguccgccagcaguccuacagcaucauguccaucaucaaggaggaggugcuggccuacgugguccagcugccgcucuacggcgugaucgacacccccugcuggaagcugcacacgagcccccugugcaccaccaacaccaaggagggguccaacaucugccucacgcggaccgaccgcggcugguacugcgacaacgccggcagcgucuccuucuucccccaggccgagaccugcaaggugcagagcaaccggguguucugcgacaccaugaacucccugacgcugccgagcgaggucaaccucugcaacguggacaucuucaaccccaaguacgacugcaagaucaugaccuccaagaccgacgugagcuccagcgucaucaccucccugggggccaucgugagcugcuacggcaagacgaagugcaccgcgagcaacaagaaccgcgggaucaucaagaccuucuccaacggcugcgacuacgugagcaacaagggcgucgacaccguguccguggggaacacccuguacuacgucaacaagcaggagggcaagagccucuacgugaagggggagcccaucaucaacuucuacgacccccugguguucccguccgacgaguucgacgccagcaucucccaggucaacgagaagaucaaccagagccuggccuucauccggaaguccgacgagcuccugcacaacgugaacgccggcaagagcacgaccaacaucaugaucaccaccaucaucaucgugaucaucgucauccugcugucccucaucgccguggggcugcugcucuacugcaaggcgcgcugaggacuaguuauaagacugacuagcccgaugggccucccaacgggcccuccuccccuccuugcaccgagauuaauaaaaaaaaaaaaaaaaaaaaaaaaaaaaaaaaaaaaaaaaaaaaaaaaaaaaaaaaaaaaaaaaugcaucccccccccccccccccccccccccccccccaaaggcucuuuucagagccaccagaauu

SEQ ID NO: 892 - RNA, 1879 nt, Artificial Sequence
  mRNA product Design i-3 comprising derived and/or modified sequence from HRSV(A2)__F-del (opt2)
gggagaaagcuuaccauggagcuccucauccucaaggccaacgccaucaccaccauccucaccgccgucaccuucugcuucgccuccggccagaacaucaccgaggaguucuaccaguccaccugcuccgccgucuccaagggcuaccucuccgcccuccgcaccggcugguacaccuccgucaucaccaucgagcucuccaacaucaaggagaacaagugcaacggcaccgacgccaaggucaagcucaucaagcaggagcucgacaaguacaagaacgccgucaccgagcuccagcuccucaugcaguccacccccgccaccaacaaccgcgcccgccgcgagcucccccgcuucaugaacuacacccucaacaacgccaagaagaccaacgucacccucuccaagaagcgcaagcgccgcuuccucggcuuccuccucggcgucggcuccgccaucgccuccggcgucgccgucuccaagguccuccaccucgagggcgaggucaacaagaucaaguccgcccuccucuccaccaacaaggccgucgucucccucuccaacggcgucuccguccucaccuccaagguccucgaccucaagaacuacaucgacaagcagcuccuccccaucgucaacaagcaguccugcuccaucuccaacaucgagaccgucaucgaguuccagcagaagaacaaccgccuccucgagaucacccgcgaguucuccgucaacgccggcgucaccacccccgucuccaccuacaugcucaccaacuccgagcuccucucccucaucaacgacaugcccaucaccaacgaccagaagaagcucauguccaacaacguccagaucguccgccagcaguccuacuccaucauguccaucaucaaggaggagguccucgccuacgucguccagcucccccucuacggcgucaucgacacccccugcuggaagcuccacaccuccccccucugcaccaccaacaccaaggagggcuccaacaucugccucacccgcaccgaccgcggcugguacugcgacaacgccggcuccgucuccuucuucccccaggccgagaccugcaagguccaguccaaccgcgucuucugcgacaccaugaacucccucacccuccccuccgaggucaaccucugcaacgucgacaucuucaaccccaaguacgacugcaagaucaugaccuccaagaccgacgucuccuccuccgucaucaccucccucggcgccaucgucuccugcuacggcaagaccaagugcaccgccuccaacaagaaccgcggcaucaucaagaccuucuccaacggcugcgacuacgucuccaacaagggcgucgacaccgucuccgucggcaacacccucuacuacgucaacaagcaggagggcaagucccucuacgucaagggcgagcccaucaucaacuucuacgacccccucgucuuccccuccgacgaguucgacgccuccaucucccaggucaacgagaagaucaaccagucccucgccuucauccgcaaguccgacgagcuccuccacaacgucaacgccggcaaguccaccaccaacaucaugaucaccaccaucaucaucgucaucaucgucauccuccucucccucaucgccgucggccuccuccucuacugcaaggcccgcugaggacuaguuauaagacugacuagcccgaugggccucccaacgggcccuccuccccuccuugcaccgagauuaauaaaaaaaaaaaaaaaaaaaaaaaaaaaaaaaaaaaaaaaaaaaaaaaaaaaaaaaaaaaaaaaaugcaucccccccccccccccccccccccccccccccaaaggcucuuuucagagccaccagaauu

SEQ ID NO: 893 - RNA, 1879 nt, Artificial Sequence
  mRNA product Design i-3 comprising derived and/or modified sequence from HRSV(A2)__F-del (opt3)
gggagaaagcuuaccauggagcugcucauccuuaaggccaacgcuauuaccacaauacugacugcagugacguucugcuuugccagcggccagaauaucaccgaagaguucuaccaauccacauguucugcggucucaaaaggguauuugagugcuuuaagaacuggaugguacaccagcguuauuacaaucgaacuguccaacauuaaggagaauaaaugcaacgguaccgacgccaaggugaaacuaaucaagcaggaacucgauaaguauaaaaaugcaguaacugagcugcagcuucugaugcagucuacacccgccaccaacaauagggcucggcgcgaguugccucgauuuaugaacuacacgcucaauaacgcaaagaaaacuaaugugacccugucgaagaaacguaagagaagguuccugggcuuucucuuaggggucggaucagccauagcuagcggcguggccguuaguaaggugcugcaccuugaaggugaggucaacaaaaucaaguccgcguugcugucuacaaauaaagcagugguaagccuauccaacgggguuucagugcucacuucuaagguccuggaccuuaaaaauuauauugauaagcaacuguugccaaucgugaacaaacagagcuguucuauuuccaacaucgaaaccgugauagaguuccagcagaagaauaaccggcuccuggagauuacacgcgaauuuucagucaaugccggaguuaccacgccggugagcacuuacauguuaacaaacagugagcugcucucucuuaucaaugacaugcccauuaccaacgaucaaaagaaacugauguccaauaacguacagaucgugagacagcagagcuauucgaucaugucuauuauaaaggaagaggucuuggcuuacgugguucaacuaccucuguacggcgugaucgacacuccaugcuggaaacuccauacauccccacuguguaccacgaauaccaaggaaggcucaaacauuugccuuacaaggacugaucgggggugguauugugacaaugccggaagugucagcuucuuuccucaggcagagaccugcaaagugcaguccaaccgcguauucugugauacaaugaauagucugacuuugccaagcgagguuaaccucugcaauguggacaucuuuaaccccaaguacgauuguaagauaaugaccucaaaaacagacgucaguuccagcgugauuaccucucugggugcuaucgucucaugcuauggcaagacuaaaugcacggccaguaacaagaaucgagggaucauuaaaacauucagcaacggaugugauuacguguccaauaagggcguugacaccgugucuguagguaacacuuuauauuacgucaauaagcaagaagggaaaucgcuguaugugaagggagagccuaucauuaacuuuuacgacccccuaguuuucccgagcgaugaauuugacgcguccauaucacaggugaaugagaaaaucaaccagagucucgccuucauuagaaagucugaugaacugcuucacaaugucaacgcaggcaaaagcaccacaaauaucaugaucaccacuauuauaaucgugauuaucguaauuuugcugucccucaucgcugugggccugcuucuguacugcaaggccaggugaggacuaguuauaagacugacuagcccgaugggccucccaacgggcccuccuccccuccuugcaccgagauuaauaaaaaaaaaaaaaaaaaaaaaaaaaaaaaaaaaaaaaaaaaaaaaaaaaaaaaaaaaaaaaaaaugcaucccccccccccccccccccccccccccccccaaaggcucuuuucagagccaccagaauu

SEQ ID NO: 894 - RNA, 1879 nt, Artificial Sequence
  mRNA product Design i-3 comprising derived and/or modified sequence from HRSV(A2)__F-del (opt4)
gggagaaagcuuaccauggagcugcugauccugaaggccaacgccaucaccaccauccugaccgccgugaccuucugcuucgccagcggccagaacaucaccgaggaguucuaccagagcaccugcagcgccgugagcaagggcuaccugagcgcccugagaaccggcugguacaccagcgugaucaccaucgagcugagcaacaucaaggagaacaagugcaacggcaccgacgccaaggugaagcugaucaagcaggagcuggacaaguacaagaacgccgugaccgagcugcagcugcugaugcagagcacccccgccaccaacaacagagccagaagagagcugcccagauucaugaacuacacccugaacaacgccaagaagaccaacgugacccugagcaagaagagaaagagaagauuccugggcuuccugcugggcgugggcagcgccaucgccagcggcguggccgugagcaaggugcugcaccuggagggcgaggugaacaagaucaagagcgcccugcugagcaccaacaaggccguggugagccugagcaacggcgugagcgugcugaccagcaaggugcuggaccugaagaacuacaucgacaagcagcugcugcccaucgugaacaagcagagcugcagcaucagcaacaucgagaccgugaucgaguuccagcagaagaacaacagacugcuggagaucaccagagaguucagcgugaacgccggcgugaccacccccgugagcaccuacaugcugaccaacagcgagcugcugagccugaucaacgacaugcccaucaccaacgaccagaagaagcugaugagcaacaacgugcagaucgugagacagcagagcuacagcaucaugagcaucaucaaggaggaggugcuggccuacguggugcagcugccccuguacggcgugaucgacacccccugcuggaagcugcacaccagcccccugugcaccaccaacaccaaggagggcagcaacaucugccugaccagaaccgacagaggcugguacugcgacaacgccggcagcgugagcuucuucccccaggccgagaccugcaaggugcagagcaacagaguguucugcgacaccaugaacagccugacccugcccagcgaggugaaccugugcaacguggacaucuucaaccccaaguacgacugcaagaucaugaccagcaagaccgacgugagcagcagcgugaucaccagccugggcgccaucgugagcugcuacggcaagaccaagugcaccgccagcaacaagaacagaggcaucaucaagaccuucagcaacggcugcgacuacgugagcaacaagggcguggacaccgugagcgugggcaacacccuguacuacgugaacaagcaggagggcaagagccuguacgugaagggcgagcccaucaucaacuucuacgacccccugguguuccccagcgacgaguucgacgccagcaucagccaggugaacgagaagaucaaccagagccuggccuucaucagaaagagcgacgagcugcugcacaacgugaacgccggcaagagcaccaccaacaucaugaucaccaccaucaucaucgugaucaucgugauccugcugagccugaucgccgugggccugcugcuguacugcaaggccagaugaggacuaguuauaagacugacuagcccgaugggccucccaacgggcccuccuccccuccuugcaccgagauuaauaaaaaaaaaaaaaaaaaaaaaaaaaaaaaaaaaaaaaaaaaaaaaaaaaaaaaaaaaaaaaaaaugcaucccccccccccccccccccccccccccccccaaaggcucuuuucagagccaccagaauu

SEQ ID NO: 895 - RNA, 1879 nt, Artificial Sequence
  mRNA product Design i-3 comprising derived and/or modified sequence from HRSV(A2)__F-del (opt5)
gggagaaagcuuaccauggagcugcucauccugaaggccaacgcuauuaccacaauccuuacggccgugaccuucugcuuugcgagcggccagaauauuacagaagaguucuaccaauccaccuguucugcugucagcaaaggguaucuguccgcccucagaacaggaugguacaccucuguuaucacaauugaacugagcaacaucaaggagaauaaaugcaacggcaccgacgccaaggugaaacuuaucaagcaggaacuggauaaguauaaaaaugcugugacggagcuccagcugcugaugcaguccacccccgccacaaacaaucgggcucgcagagagcucccucgguuuaugaacuacacccugaauaacgccaagaaaacaaaugucacccuuucuaagaaacgcaagagacgguuccugggguuucuccugggagugggcagcgcgauugccuccgggguugcugugagcaagguccuucaccuggaaggagaggugaacaaaaucaagucugcccuccuguccacgaauaaagcuguugugagccugucuaacggcgucuccgugcucacaagcaaggugcuggaccuuaaaaauuauauugauaagcaacugcucccgaucgucaacaaacagucuuguuccauuagcaacaucgaaaccguuauugaguuccagcagaagaauaaccgccugcuugagaucacaagagaauuuuccgugaaugccggcgugaccacccccgucucuacauacaugcugacgaacagcgagcuccugucccugaucaaugacaugccuauuaccaacgaucaaaagaaacucaugagcaauaacgugcagaucguucggcagcagucuuauuccauuaugagcaucauuaaggaagaggugcuggcguacgucgugcaacuuccccuguacgggguuaucgacacaccuugcuggaaacuccauaccucuccccuguguacaaccaauacgaaggaaggaagcaacaucugccuuacacgcaccgauagaggcugguauugugacaaugccggguccgugucuuucuuuccucaggcugagaccugcaaaguccagagcaaccggguguucugugauacaaugaacucccugacccucccgagcgaggucaaucugugcaauguggacauuuuuaaccccaaguacgauuguaagaucaugacaucuaaaacggacguuuccagcucugugauuaccucccugggagccaucgucagcugcuauggcaagacaaaaugcaccgcuuccaacaagaaucgcgggauuaucaaaacauucucuaacggaugugauuacgugagcaauaagggcguugacaccguguccgucggcaacacgcucuauuacgugaauaagcaagaagggaaaucucuguaugugaagggagagccuaucauuaacuuuuacgacccccuuguuuucccuagcgaugaauuugacgccuccaucagccaggucaaugagaaaauuaaccagucucuggccuucaucagaaaguccgaugaacuccugcacaaugugaacgcuggcaaaagcaccacaaauauuaugaucaccacaauuaucaucgugauuaucgucauucugcuuucucucaucgcgguggggcugcugcucuacugcaaggcccggugaggacuaguuauaagacugacuagcccgaugggccucccaacgggcccuccuccccuccuugcaccgagauuaauaaaaaaaaaaaaaaaaaaaaaaaaaaaaaaaaaaaaaaaaaaaaaaaaaaaaaaaaaaaaaaaaugcaucccccccccccccccccccccccccccccccaaaggcucuuuucagagccaccagaauu

SEQ ID NO: 896 - RNA, 1879 nt, Artificial Sequence
  mRNA product Design i-3 comprising derived and/or modified sequence from HRSV(A2)__F-del (opt6)
gggagaaagcuuaccauggaauuacuaauacucaaagccaacgcaauaacaacaauacuaacagcaguaacauucugcuucgcaucaggacaaaacaucacagaagaauuuuaccaaaguacaugcagugcagucucuaaaggauaccucagugccuuacgcacaggaugguacacaucaguaauaacaaucgaacuuucaaacauaaaagaaaacaaaugcaauggaaccgacgccaaaguaaaacuaaucaaacaagaacuagacaaauauaaaaaugcaguaacagaauuacaacuccuaaugcaauccacaccagcaacaaauaacagagcaagacgagaacucccucgauucaugaauuacacauuaaacaacgcaaaaaaaacuaacguaacuuuaucaaaaaaaagaaaacguagauuucuaggauuccuacuaggcguaggguccgccauugcaucaggaguagcaguuagcaaaguauuacauuuagaaggagaaguaaauaaaaucaaaagcgcacuacucucaaccaacaaagcaguaguaucacucucaaacggaguaucaguacuaacauccaaaguacucgaccucaaaaacuacauagacaaacaauuacuacccauaguaaacaaacaaucaugcucuauaucaaauaucgaaacaguaaucgaauuucaacaaaaaaacaaucgacuacuugaaauaacaagagaguucuccgucaaugccggagucaccacaccagucucaacauacaugcuaaccaacucugaacuccuaucacuaauaaaugacaugccaauaacaaacgaccaaaaaaaacuaaugucaaauaacguacaaauaguacgacaacaaaguuauuccauaaugaguauaaucaaagaagaaguguuagcauacguaguccaacuaccauuauauggaguaauagacacaccauguuggaaauuacacaccucaccacucugcacuaccaauacaaaagaaggcucaaauauaugccuaacucgcacagacagaggcugguacugcgauaacgcaggauccguaucuuucuuuccccaagcagaaacuugcaaaguacaaucaaacagagucuucugcgacaccaugaauagucucacauuaccaucugaaguaaaccuauguaacguagauauauucaauccaaaauacgacugcaaaauaaugacaucaaaaaccgacgucucuagcaguguaaucacaucacuaggagcaauaguaagcugcuauggaaaaacaaaauguacagcaucaaacaaaaacaggggaauaauaaaaaccuucucaaacggaugugacuacguaucaaauaaaggcguagacacaguaagcguaggaaacacccuauacuacguuaacaaacaagaagggaaaucauuauacguaaaaggagaaccaauaauaaacuucuacgauccacucguauucccauccgacgaauuugacgccagcauaucccaaguuaacgaaaaaauaaaccaaucacuugcauuuauacgaaaaucugaugaacuucuccacaacguaaaugcaggaaaauccaccaccaauauaaugaucacaacuaucaucauaguaauaaucgucauuuuacuaucauuaauagcaguuggccuacuucuauacugcaaagcaagauaaggacuaguuauaagacugacuagcccgaugggccucccaacgggcccuccuccccuccuugcaccgagauuaauaaaaaaaaaaaaaaaaaaaaaaaaaaaaaaaaaaaaaaaaaaaaaaaaaaaaaaaaaaaaaaaaugcaucccccccccccccccccccccccccccccccaaaggcucuuuucagagccaccagaauu

SEQ ID NO: 897 - RNA, 1879 nt, Artificial Sequence
  mRNA product Design i-3 comprising derived and/or modified sequence from HRSV(A2)__F-del (opt11)
gggagaaagcuuaccauggaacuacuaauccuaaaagccaacgcgaucaccaccauccuaacggcagucaccuucugcuucgcaucaggccaaaacaucacagaagaguucuaccaaagcacaugcuccgccguauccaaaggcuaccucagcgcccuacgcacaggcugguacacaucugucaucaccauagaacucuccaacaucaaagaaaacaaaugcaacggcacugacgccaaaguaaagcugaucaaacaagaacucgacaaauacaaaaacgcagucaccgaacuccaacuacucaugcaauccaccccugcaaccaacaacagggcccgccgcgaacucccccgcuucaugaacuacacuuuaaacaacgccaaaaagaccaacgucacacucagcaagaaacggaaacgacgauuccuaggguuucuccuaggcgucggcucggcaaucgccuccggcgucgccguaagcaaaguacuacaccuagaaggcgaagugaacaaaaucaaaagugcccuucucuccaccaacaaggccguagucucucuauccaacggagucucaguccucaccucaaagguccucgaccucaaaaacuacaucgacaaacaacuacuccccauugucaacaagcagucaugcuccauaucaaacaucgaaaccgucaucgaguuccaacagaaaaacaaccgacuccucgaaauaaccagagaguucucggucaacgccggcgucaccaccccagucagcaccuacaugcucacuaacuccgaacuccuaucccucaucaacgacaugccaauuaccaacgaccaaaagaaacuaaugucgaacaacguucaaaucguccgacaacaaaguuacuccaucaugagcauaaucaaagaagaaguucuagcguacgucguccaacucccacuauacggcgucaucgacacuccgugcuggaaacuccacacaucaccccuauguacaaccaacacaaaagaaggcagcaacaucugccucacccgcaccgaccgagggugguauugcgauaacgcuggcagcgucuccuucuucccccaagccgaaaccugcaaaguccaaucaaacagaguauucugcgacaccaugaacucccuuacucucccuagcgaagucaaccucugcaacguugacauauucaaccccaaauacgacugcaaaaucaugaccuccaagaccgacgucuccuccuccgucaucacaucucuaggugccauugucuccugcuacggaaaaaccaaaugcacagccuccaacaaaaaccgcggcaucauaaaaaccuucuccaacggcugcgacuacgucaguaauaaaggcgucgacacgguauccguugggaauacgcuuuacuacguaaauaaacaagaaggcaaaucccucuacgucaaaggugaacccaucauaaacuucuacgacccgcuuguguucccauccgacgaguucgacgccagcaucagccaggucaacgaaaagaucaaccaaucccuagccuucauccgcaaaagcgacgaacuacuacacaacgucaacgccggaaaauccacaaccaacaucaugaucaccaccaucaucaucgucaucaucguaauccuacucucucucaucgccgucggccuccuacuguacuguaaagcccgauagggacuaguuauaagacugacuagcccgaugggccucccaacgggcccuccuccccuccuugcaccgagauuaauaaaaaaaaaaaaaaaaaaaaaaaaaaaaaaaaaaaaaaaaaaaaaaaaaaaaaaaaaaaaaaaaugcaucccccccccccccccccccccccccccccccaaaggcucuuuucagagccaccagaauu

SEQ ID NO: 898 - protein, 574 aa, Artificial Sequence
  derived and/or modified protein sequence (artificial) from HRSV(A2)__F0_DSCav1
MELLILKANAITTILTAVTFCFASGQNITEEFYQSTCSAVSKGYLSALRTGWYTSVITIELSNIKENKCNGTDAKVKLIKQELDKYKNAVTELQLLMQSTPATNNRARRELPRFMNYTLNNAKKTNVTLSKKRKRRFLGFLLGVGSAIASGVAVCKVLHLEGEVNKIKSALLSTNKAVVSLSNGVSVLTFKVLDLKNYIDKQLLPILNKQSCSISNIETVIEFQQKNNRLLEITREFSVNAGVTTPVSTYMLTNSELLSLINDMPITNDQKKLMSNNVQIVRQQSYSIMCIIKEEVLAYVVQLPLYGVIDTPCWKLHTSPLCTTNTKEGSNICLTRTDRGWYCDNAGSVSFFPQAETCKVQSNRVFCDTMNSLTLPSEVNLCNVDIFNPKYDCKIMTSKTDVSSSVITSLGAIVSCYGKTKCTASNKNRGIIKTFSNGCDYVSNKGVDTVSVGNTLYYVNKQEGKSLYVKGEPIINFYDPLVFPSDEFDASISQVNEKINQSLAFIRKSDELLHNVNAGKSTTNIMITTIIIVIIVILLSLIAVGLLLYCKARSTPVTLSKDQLSGINNIAFSN

SEQ ID NO: 899 - RNA, 1725 nt, Artificial Sequence
  derived and/or modified CDS sequence (opt1) from HRSV(A2)__F0_DSCav1
auggagcugcucauccugaaggccaacgccaucaccaccauccugacggcggugaccuucugcuucgccagcggccagaacaucaccgaggaguucuaccaguccacgugcagcgccgucuccaagggguaccucagcgcccugcggaccggcugguacaccuccgugaucaccaucgagcugagcaacaucaaggagaacaagugcaacgggaccgacgccaaggugaagcucaucaagcaggagcuggacaaguacaagaacgcggucacggagcugcagcuccugaugcaguccaccccggcaaccaacaaccgcgcccggcgcgagcugccccgguucaugaacuacacccucaacaacgccaagaagacgaacgugacccugagcaagaagcgcaagcggcgcuuccugggcuuccuccugggggugggcuccgccaucgcgagcggcgucgccgugugcaaggugcugcaccucgagggggaggucaacaagaucaagagcgcccugcuguccaccaacaaggccguggugagccucuccaacggcgucagcgugcugaccuucaaggugcuggaccucaagaacuacaucgacaagcagcugcugcccauccugaacaagcagagcugcuccaucagcaacaucgagacggugaucgaguuccagcagaagaacaaccggcuccuggagaucacccgcgaguucagcgugaacgccggggucaccacccccguguccacguacaugcugaccaacagcgagcuccugucccugaucaacgacaugccgaucaccaacgaccagaagaagcucaugagcaacaacgugcagaucguccggcagcaguccuacagcaucaugugcaucaucaaggaggaggugcuggcguacgugguccagcugccccucuacggcgugaucgacacccccugcuggaagcugcacacgagcccccugugcaccaccaacaccaaggagggguccaacaucugccucacgcgcaccgaccggggcugguacugcgacaacgccggcagcgucuccuucuucccgcaggccgagaccugcaaggugcagagcaaccgcguguucugcgacaccaugaacucccugacgcugcccagcgagguaaaccucugcaacgucgacaucuucaaccccaaguacgacugcaagaucaugaccuccaagaccgacgugagcuccagcgugaucaccucccugggggccaucgucagcugcuacggcaagacgaagugcaccgccagcaacaagaaccgggggaucaucaagaccuucuccaacggcugcgacuacgugagcaacaagggcguggacaccguguccgucgggaacacccuguacuacgugaacaagcaggagggcaagagccucuacgugaagggggagcccaucaucaacuucuacgacccgcuggucuuccccuccgacgaguucgacgcgagcaucucccaggugaacgagaagaucaaccagagccuggccuucauccgcaaguccgacgagcugcuccacaacgugaacgccggcaagagcacgaccaacaucaugaucaccaccaucaucaucgucaucaucgugauccugcugucccucaucgccguggggcugcugcucuacugcaaggcccggagcacgcccgucacccuguccaaggaccagcugagcggcaucaacaacaucgcguucuccaacuga

SEQ ID NO: 900 - RNA, 1725 nt, Artificial Sequence
  derived and/or modified CDS sequence (opt1) from HRSV(A2)__F0_DSCav1
auggagcugcucauccugaaggccaacgccaucaccaccauccugacggcggugaccuucugcuucgccagcggccagaacaucaccgaggaguucuaccaguccacgugcagcgccgucuccaagggguaccucagcgcccugcgcaccggcugguacaccuccgugaucaccaucgagcugagcaacaucaaggagaacaagugcaacgggaccgacgccaaggugaagcucaucaagcaggagcuggacaaguacaagaacgcggucacggagcugcagcuccugaugcaguccacccccgccaccaacaaccgggcccgccgggagcugccgcgcuucaugaacuacacccucaacaacgccaagaagacgaacgugacccugagcaagaagcggaagcgccgguuccugggcuuccuccugggggugggcuccgcgaucgccagcggcgucgccgugugcaaggugcugcaccucgagggggaggucaacaagaucaaguccgcccugcugagcaccaacaaggccguggugucccucagcaacggcgucuccgugcugaccuucaaggugcuggaccucaagaacuacaucgacaagcagcugcugcccauccucaacaagcagagcugcuccaucagcaacaucgagacggucaucgaguuccagcagaagaacaaccgccugcuggagaucacccgggaguucuccgugaacgcgggggugaccacccccgucagcacguacaugcucaccaacagcgagcugcugucccucaucaacgacaugcccaucaccaacgaccagaagaagcugaugagcaacaacgugcagaucgugcgccagcaguccuacagcaucaugugcaucaucaaggaggagguccuggccuacguggugcagcucccgcuguacggcgucaucgacacccccugcuggaagcugcacacgagcccccucugcaccaccaacaccaaggaggggagcaacaucugccugacgcggaccgaccgcggcugguacugcgacaacgccggcuccgugagcuucuucccccaggccgagaccugcaagguccaguccaaccggguguucugcgacaccaugaacagccugacgcucccguccgaggugaaccugugcaacgucgacaucuucaaccccaaguacgacugcaagaucaugaccagcaagaccgacguguccagcuccgugaucaccagccugggggccaucgucuccugcuacggcaagacgaagugcaccgcgagcaacaagaaccgcgggaucaucaagaccuucuccaacggcugcgacuacgugagcaacaagggcguggacaccgucagcguggggaacacccucuacuacgugaacaagcaggagggcaagucccuguacgucaagggggagcccaucaucaacuucuacgacccccugguguucccgagcgacgaguucgacgccuccaucagccaggugaacgagaagaucaaccagucccucgccuucauccggaaguccgacgagcugcugcacaacgucaacgccggcaaguccacgaccaacaucaugaucaccaccaucaucaucgugaucaucgugauccugcucagccugaucgccgucgggcugcuccuguacugcaaggcgcgcuccacgcccgugacccugagcaaggaccagcucuccggcaucaacaacaucgccuucagcaacuga

SEQ ID NO: 901 - RNA, 1725 nt, Artificial Sequence
  derived and/or modified CDS sequence (opt2) from HRSV(A2)__F0_DSCav1
auggagcuccucauccucaaggccaacgccaucaccaccauccucaccgccgucaccuucugcuucgccuccggccagaacaucaccgaggaguucuaccaguccaccugcuccgccgucuccaagggcuaccucuccgcccuccgcaccggcugguacaccuccgucaucaccaucgagcucuccaacaucaaggagaacaagugcaacggcaccgacgccaaggucaagcucaucaagcaggagcucgacaaguacaagaacgccgucaccgagcuccagcuccucaugcaguccacccccgccaccaacaaccgcgcccgccgcgagcucccccgcuucaugaacuacacccucaacaacgccaagaagaccaacgucacccucuccaagaagcgcaagcgccgcuuccucggcuuccuccucggcgucggcuccgccaucgccuccggcgucgccgucugcaagguccuccaccucgagggcgaggucaacaagaucaaguccgcccuccucuccaccaacaaggccgucgucucccucuccaacggcgucuccguccucaccuucaagguccucgaccucaagaacuacaucgacaagcagcuccuccccauccucaacaagcaguccugcuccaucuccaacaucgagaccgucaucgaguuccagcagaagaacaaccgccuccucgagaucacccgcgaguucuccgucaacgccggcgucaccacccccgucuccaccuacaugcucaccaacuccgagcuccucucccucaucaacgacaugcccaucaccaacgaccagaagaagcucauguccaacaacguccagaucguccgccagcaguccuacuccaucaugugcaucaucaaggaggagguccucgccuacgucguccagcucccccucuacggcgucaucgacacccccugcuggaagcuccacaccuccccccucugcaccaccaacaccaaggagggcuccaacaucugccucacccgcaccgaccgcggcugguacugcgacaacgccggcuccgucuccuucuucccccaggccgagaccugcaagguccaguccaaccgcgucuucugcgacaccaugaacucccucacccuccccuccgaggucaaccucugcaacgucgacaucuucaaccccaaguacgacugcaagaucaugaccuccaagaccgacgucuccuccuccgucaucaccucccucggcgccaucgucuccugcuacggcaagaccaagugcaccgccuccaacaagaaccgcggcaucaucaagaccuucuccaacggcugcgacuacgucuccaacaagggcgucgacaccgucuccgucggcaacacccucuacuacgucaacaagcaggagggcaagucccucuacgucaagggcgagcccaucaucaacuucuacgacccccucgucuuccccuccgacgaguucgacgccuccaucucccaggucaacgagaagaucaaccagucccucgccuucauccgcaaguccgacgagcuccuccacaacgucaacgccggcaaguccaccaccaacaucaugaucaccaccaucaucaucgucaucaucgucauccuccucucccucaucgccgucggccuccuccucuacugcaaggcccgcuccacccccgucacccucuccaaggaccagcucuccggcaucaacaacaucgccuucuccaacuga

SEQ ID NO: 902 - RNA, 1725 nt, Artificial Sequence
  derived and/or modified CDS sequence (opt3) from HRSV(A2)__F0_DSCav1
auggagcugcucauccuuaaggccaacgcuauuaccacaauacugacugcagugacguucugcuuugccagcggccagaauaucaccgaagaguucuaccaauccacauguucugcggucucaaaaggguauuugagugcuuuaagaacuggaugguacaccagcguuauuacaaucgaacuguccaacauuaaggagaauaaaugcaacgguaccgacgccaaggugaaacuaaucaagcaggaacucgauaaguauaaaaaugcaguaacugagcugcagcuucugaugcagucuacacccgccaccaacaauagggcucggcgcgaguugccucgauuuaugaacuacacgcucaauaacgcaaagaaaacuaaugugacccugucgaagaaacguaagagaagguuccugggcuuucucuuaggggucggaucagccauagcuagcggcguggccguuuguaaggugcugcaccuugaaggugaggucaacaaaaucaagagugcguugcuguccacaaauaaagcagugguaucucuaagcaacgggguuuccgugcucacuuucaagguccuggaccuuaaaaauuauauugauaagcaacuguugccaauccucaacaaacagucaugcaguauuagcaacaucgaaaccgugauagaguuucagcagaagaauaaccggcuguuagagauuacacgcgaguucucugugaaugccggagucaccacgccgguuuccacuuacaugcugacaaacucagaacuccuuagccugaucaaugacaugcccauuaccaacgaucaaaagaaauugaugaguaauaacgugcagaucguaagacagcagucuuauuccaucauguguauuauaaaggaagaggugcuagcuuacgucgugcaacugccucucuacggcguuaucgacacuccaugcuggaaacugcauacaagcccccuuuguaccacgaauaccaaggaaggcucgaacauuugccugacaaggacugaucgggggugguauugugacaaugccggaucuguguccuuuuucccucaggcagagaccugcaaaguccagucaaaccgcguguuuugugauacaaugaauaguuugacucucccaagcgagguaaaccugugcaauguugacaucuucaaccccaaguacgauugcaagauaaugaccuccaaaacagacgugucuagcucagucauuaccaguuuaggugcuaucguguccuguuauggcaagacuaaaugcacggccagcaacaagaaucgagggaucauuaaaacauuuucuaacggaugugauuacgucucaaauaagggcguggacaccguuaguguggguaacacucuguauuacguaaauaagcaagaagggaaaagccuauaugucaagggagagccuaucauuaacuucuacgacccacucguguucccguccgaugaauuugacgcgucuauaucgcagguuaaugagaaaaucaaccagagccuggccuucauuagaaaguccgaugaacuuuugcacaaugugaacgcaggcaaaucaaccacaaauaucaugaucaccacuauuauaaucgucauuaucgugauucugcucagucugaucgcuguaggccuucuguuguacugcaaggccaggucuacacccgugacgcucagcaaggaccagcuguccgggauaaacaauaucgcuuuuucaaacuga

SEQ ID NO: 903 - RNA, 1725 nt, Artificial Sequence
  derived and/or modified CDS sequence (opt4) from HRSV(A2)__F0_DSCav1
auggagcugcugauccugaaggccaacgccaucaccaccauccugaccgccgugaccuucugcuucgccagcggccagaacaucaccgaggaguucuaccagagcaccugcagcgccgugagcaagggcuaccugagcgcccugagaaccggcugguacaccagcgugaucaccaucgagcugagcaacaucaaggagaacaagugcaacggcaccgacgccaaggugaagcugaucaagcaggagcuggacaaguacaagaacgccgugaccgagcugcagcugcugaugcagagcacccccgccaccaacaacagagccagaagagagcugcccagauucaugaacuacacccugaacaacgccaagaagaccaacgugacccugagcaagaagagaaagagaagauuccugggcuuccugcugggcgugggcagcgccaucgccagcggcguggccgugugcaaggugcugcaccuggagggcgaggugaacaagaucaagagcgcccugcugagcaccaacaaggccguggugagccugagcaacggcgugagcgugcugaccuucaaggugcuggaccugaagaacuacaucgacaagcagcugcugcccauccugaacaagcagagcugcagcaucagcaacaucgagaccgugaucgaguuccagcagaagaacaacagacugcuggagaucaccagagaguucagcgugaacgccggcgugaccacccccgugagcaccuacaugcugaccaacagcgagcugcugagccugaucaacgacaugcccaucaccaacgaccagaagaagcugaugagcaacaacgugcagaucgugagacagcagagcuacagcaucaugugcaucaucaaggaggaggugcuggccuacguggugcagcugccccuguacggcgugaucgacacccccugcuggaagcugcacaccagcccccugugcaccaccaacaccaaggagggcagcaacaucugccugaccagaaccgacagaggcugguacugcgacaacgccggcagcgugagcuucuucccccaggccgagaccugcaaggugcagagcaacagaguguucugcgacaccaugaacagccugacccugcccagcgaggugaaccugugcaacguggacaucuucaaccccaaguacgacugcaagaucaugaccagcaagaccgacgugagcagcagcgugaucaccagccugggcgccaucgugagcugcuacggcaagaccaagugcaccgccagcaacaagaacagaggcaucaucaagaccuucagcaacggcugcgacuacgugagcaacaagggcguggacaccgugagcgugggcaacacccuguacuacgugaacaagcaggagggcaagagccuguacgugaagggcgagcccaucaucaacuucuacgacccccugguguuccccagcgacgaguucgacgccagcaucagccaggugaacgagaagaucaaccagagccuggccuucaucagaaagagcgacgagcugcugcacaacgugaacgccggcaagagcaccaccaacaucaugaucaccaccaucaucaucgugaucaucgugauccugcugagccugaucgccgugggccugcugcuguacugcaaggccagaagcacccccgugacccugagcaaggaccagcugagcggcaucaacaacaucgccuucagcaacuga

SEQ ID NO: 904 - RNA, 1725 nt, Artificial Sequence
  derived and/or modified CDS sequence (opt5) from HRSV(A2)__F0_DSCav1
auggagcugcucauccugaaggccaacgcuauuaccacaauccuuacggccgugaccuucugcuuugcgagcggccagaauauuacagaagaguucuaccaauccaccuguucugcugucagcaaaggguaucuguccgcccucagaacaggaugguacaccucuguuaucacaauugaacugagcaacaucaaggagaauaaaugcaacggcaccgacgccaaggugaaacuuaucaagcaggaacuggauaaguauaaaaaugcugugacggagcuccagcugcugaugcaguccacccccgccacaaacaaucgggcucgcagagagcucccucgguuuaugaacuacacccugaauaacgccaagaaaacaaaugucacccuuucuaagaaacgcaagagacgguuccugggguuucuccugggagugggcagcgcgauugccuccgggguugcuguguguaagguccuucaccuggaaggagaggugaacaaaaucaagagcgcccuccugucuacgaauaaagcuguugugucccugagcaacggcgucucugugcucacauucaaggugcuggaccuuaaaaauuauauugauaagcaacugcucccgauccugaacaaacaguccugcagcauuucuaacaucgaaaccgucauugaguuucagcagaagaauaaccgccuucuggagaucacaagagaauuuuccguuaaugccggcgugaccacccccgugagcacauacaugcucacgaacuccgagcugcugucucucaucaaugacaugccuauuaccaacgaucaaaagaaacugaugagcaauaacguccagaucgugcggcagcaguccuauagcauuauguguaucauuaaggaagagguucuugcguacgugguccaacugccccucuacggggugaucgacacaccuugcuggaaacugcauaccucuccccuuuguacaaccaauacgaaggaaggauccaacaucugccugacacgcaccgauagaggcugguauugugacaaugccgggagcguuucuuucuucccucaggcugagaccugcaaagugcagagcaaccgggucuuuugugauacaaugaacucccucacccugccgucugaggugaaucugugcaaugucgacauuuucaaccccaaguacgauugcaagaucaugacaagcaaaacggacguguccagcucuguuauuaccucccucggagccaucgugagcuguuauggcaagacaaaaugcaccgcuucuaacaagaaucgcgggauuaucaaaacauuuuccaacggaugugauuacgucagcaauaagggcguggacaccguuuccgugggcaacacgcuguauuacgucaauaagcaagaagggaaaucucuuuaugugaagggagagccuaucauuaacuucuacgacccccugguguucccuagcgaugaauuugacgccuccaucucucagguuaaugagaaaauuaaccagagccucgccuucaucagaaaguccgaugaacugcugcacaaugucaacgcuggcaaaagcaccacaaauauuaugaucaccacaauuaucaucgugauuaucgugauucuucucucucugaucgcggucgggcugcuccuguacugcaaggcccgguccacccccgugacgcuuagcaaggaccagcugucuggaauuaacaauaucgcuuuuuccaacuga

SEQ ID NO: 905 - RNA, 1725 nt, Artificial Sequence
  derived and/or modified CDS sequence (opt6) from HRSV(A2)__F0_DSCav1
auggaauuauuaauccucaaagcgaacgcuauuacuaccauucuaacagcagucacauucugcuucgccucaggccaaaacauuacagaagaauuuuaccaaucaacaugcucugccguaucaaaaggcuaccuauccgcccuacgaacaggcugguacacaagcguaauaacaaucgaacuaucaaacauaaaagaaaacaaaugcaacgguacagacgccaaaguuaaacuaauaaaacaagaacucgauaaauacaaaaacgcaguaacagaauuacaacuacuaaugcaaucaacaccugcaacaaacaauagagccaggagagaauuaccucgauucaugaauuacacacucaauaacgcaaaaaaaaccaacguuacacuaucaaaaaaaagaaaacgacgauucuuaggauuccuacucggagucggaucagcaauagcaucuggcguugcaguaugcaaaguauuacacuuagaaggugaagucaauaaaauaaaaagcgcgcuacuaaguacaaacaaagcagucgucucccuaucaaacggagucucaguccuaacauucaaaguacucgaccuaaaaaauuacauagauaaacaacuacuuccaauauuaaacaaacaauccuguagcaucagcaauauagaaacaguaauagaauuucaacaaaaaaacaaccgauuauuagaaaucacucgagaauuuuccguaaacgccgggguaacaacuccagucucaaccuacaugcuaaccaauucagaacuauugagcuuaauaaacgacaugccaauaaccaacgaccaaaaaaaacuaaugucuaacaauguucaaaucgucagacaacaaaguuacaguauaauguguauaaucaaagaagaaguccuagcauacguaguccaacucccacuauauggaguuaucgacacaccauguuggaaauuacacaccucaccauuaugcacaaccaauacaaaagaaggaucaaacauaugccuuacacggacagaccgcggaugguauugugacaacgcuggcucagucuccuuuuucccacaagcagaaacaugcaaaguacaaucaaacagagucuuuugcgauaccaugaacucacuuacauuaccaagcgaaguaaaucuuuguaacgucgacaucuucaauccuaaauaugacugcaaaaucaugaccucaaaaacagacguuagcucuucaguaaucacuagcuuaggagcaaucguaucaugcuacggcaaaacaaaauguacagcaucaaauaaaaacagaggaaucauaaaaacauuuucaaacggaugcgauuauguaagcaacaaaggaguagauacuguaagcguaggaaacacauuguacuauguaaacaaacaagaaggaaaaucacucuauguaaaaggagaaccuauaaucaauuucuacgauccauuaguguucccaucagaugaauuugacgccucaauaucacaaguuaaugaaaaaauaaaucaaucgcuagcauucauacguaaaucagaugaauuacuacauaacguaaacgcaggcaaauccacaacaaauaucaugaucacaacaauuauaauaguaauaauaguaauacuacuaucacuaauagccguaggacuccuacuauacugcaaagcaagaucuacuccaguaacccucucaaaagaucaacuaagcggaauuaauaacaucgcauucagcaacuaa

SEQ ID NO: 906 - RNA, 1725 nt, Artificial Sequence
  derived and/or modified CDS sequence (opt11) from HRSV(A2)__F0_DSCav1
auggaacuacuuauccucaaagccaacgccaucaccaccauccucacagcaguaaccuuuugcuucgccucaggccaaaauaucacagaagaauuuuaccagaguaccugcuccgccguauccaaaggauaccucagcgcgcuccgcaccggcugguacacuucaguaaucacaaucgaacuauccaacaucaaagaaaacaaaugcaacggcaccgacgcgaaagucaaacucaucaaacaagaacuagacaaauacaaaaaugccguaacagaacuacaacuguuaaugcagagcacacccgccaccaacaaccgcgcccgccgggaacucccccgauucaugaacuacacacucaacaacgccaaaaagacgaacgucacccucagcaagaaacgaaaacgcagauuccucgguuuccuacuaggcguaggcucagcaauagccuccggaguagccgucugcaaaguccugcacuuagaaggcgaagucaacaaaaucaaauccgcccuacucuccacgaacaaagccgucgucucccuguccaacggugucuccguuuuaaccuucaaaguucuggaccucaaaaacuacauagacaaacagcuucuccccauccucaacaaacaauccuguagcaucuccaacaucgaaaccgucauagaauuucaacagaaaaacaacagacugcucgaaaucacccgcgaguucuccgucaacgccggcgucacgacucccgucuccaccuauaugcucacgaacucggaacuccuuucccuaaucaacgacaugccgaucaccaacgaccaaaagaaacucaugucaaacaacguacaaauuguccgccaacaaucauacuccaucaugugcauaauuaaagaagaaguccucgcauacguaguccaacucccccucuacggcgucaucgacacccccugcuggaaacuccacaccuccccacucugcacaaccaacaccaaagaaggcucaaacauaugccuaacgcgcaccgaucgcgguugguacugcgacaacgccgguuccgucagcuucuucccccaagcagagacaugcaaaguccaaucaaaccgcgucuucugcgacaccaugaacucacuaacccuuccaagcgaagucaaccucugcaacguugacaucuucaaccccaaauacgacuguaaaaucaugaccuccaagaccgacguauccucuuccgucaucacaucccuaggcgcuaucguauccugcuaugguaaaaccaaaugcaccgccuccaacaaaaaccgcggcaucaucaagacauuuuccaacggcugcgacuacgugagcaacaaaggcgucgacaccgucuccguaggcaacacccucuacuauguaaacaaacaagagggcaaaucacucuacgucaaaggggaacccaucaucaacuucuacgacccgcucguauuccccagcgaugaguucgacgccuccaucucccaggucaacgaaaagauaaaccaaucacucgcauucauucguaaauccgacgaacuccuacacaacgugaaugcaggcaaaucgaccacuaacaucaugaucaccaccaucaucaucgucaucauagucauccuccugucccuuaucgccgucggucuuuuauuauacugcaaagcccgcagcacccccgucacccucucuaaggaccaacucagcggcaucaauaacaucgcauucucuaacuaa

SEQ ID NO: 907 - RNA, 2001 nt, Artificial Sequence
  mRNA product Design a-1 comprising derived and/or modified sequence from HRSV(A2)__F0_DSCav1 (opt1)
gggagagucccgcagucggcguccagcggcucugcuuguucgugugugugucguugcaggccuuauucaagcuuaccauggagcugcucauccugaaggccaacgccaucaccaccauccugacggcggugaccuucugcuucgccagcggccagaacaucaccgaggaguucuaccaguccacgugcagcgccgucuccaagggguaccucagcgcccugcggaccggcugguacaccuccgugaucaccaucgagcugagcaacaucaaggagaacaagugcaacgggaccgacgccaaggugaagcucaucaagcaggagcuggacaaguacaagaacgcggucacggagcugcagcuccugaugcaguccaccccggcaaccaacaaccgcgcccggcgcgagcugccccgguucaugaacuacacccucaacaacgccaagaagacgaacgugacccugagcaagaagcgcaagcggcgcuuccugggcuuccuccugggggugggcuccgccaucgcgagcggcgucgccgugugcaaggugcugcaccucgagggggaggucaacaagaucaagagcgcccugcuguccaccaacaaggccguggugagccucuccaacggcgucagcgugcugaccuucaaggugcuggaccucaagaacuacaucgacaagcagcugcugcccauccugaacaagcagagcugcuccaucagcaacaucgagacggugaucgaguuccagcagaagaacaaccggcuccuggagaucacccgcgaguucagcgugaacgccggggucaccacccccguguccacguacaugcugaccaacagcgagcuccugucccugaucaacgacaugccgaucaccaacgaccagaagaagcucaugagcaacaacgugcagaucguccggcagcaguccuacagcaucaugugcaucaucaaggaggaggugcuggcguacgugguccagcugccccucuacggcgugaucgacacccccugcuggaagcugcacacgagcccccugugcaccaccaacaccaaggagggguccaacaucugccucacgcgcaccgaccggggcugguacugcgacaacgccggcagcgucuccuucuucccgcaggccgagaccugcaaggugcagagcaaccgcguguucugcgacaccaugaacucccugacgcugcccagcgagguaaaccucugcaacgucgacaucuucaaccccaaguacgacugcaagaucaugaccuccaagaccgacgugagcuccagcgugaucaccucccugggggccaucgucagcugcuacggcaagacgaagugcaccgccagcaacaagaaccgggggaucaucaagaccuucuccaacggcugcgacuacgugagcaacaagggcguggacaccguguccgucgggaacacccuguacuacgugaacaagcaggagggcaagagccucuacgugaagggggagcccaucaucaacuucuacgacccgcuggucuuccccuccgacgaguucgacgcgagcaucucccaggugaacgagaagaucaaccagagccuggccuucauccgcaaguccgacgagcugcuccacaacgugaacgccggcaagagcacgaccaacaucaugaucaccaccaucaucaucgucaucaucgugauccugcugucccucaucgccguggggcugcugcucuacugcaaggcccggagcacgcccgucacccuguccaaggaccagcugagcggcaucaacaacaucgcguucuccaacugaggacuagucccuguucccagagcccacuuuuuuuucuuuuuuugaaauaaaauagccugucuuucagaucuaaaaaaaaaaaaaaaaaaaaaaaaaaaaaaaaaaaaaaaaaaaaaaaaaaaaaaaaaaaaaaaaugcaucccccccccccccccccccccccccccccccaaaggcucuuuucagagccaccagaauu

SEQ ID NO: 908 - RNA, 2001 nt, Artificial Sequence
  mRNA product Design a-1 comprising derived and/or modified sequence from HRSV(A2)__F0_DSCav1 (opt1)
gggagagucccgcagucggcguccagcggcucugcuuguucgugugugugucguugcaggccuuauucaagcuuaccauggagcugcucauccugaaggccaacgccaucaccaccauccugacggcggugaccuucugcuucgccagcggccagaacaucaccgaggaguucuaccaguccacgugcagcgccgucuccaagggguaccucagcgcccugcgcaccggcugguacaccuccgugaucaccaucgagcugagcaacaucaaggagaacaagugcaacgggaccgacgccaaggugaagcucaucaagcaggagcuggacaaguacaagaacgcggucacggagcugcagcuccugaugcaguccacccccgccaccaacaaccgggcccgccgggagcugccgcgcuucaugaacuacacccucaacaacgccaagaagacgaacgugacccugagcaagaagcggaagcgccgguuccugggcuuccuccugggggugggcuccgcgaucgccagcggcgucgccgugugcaaggugcugcaccucgagggggaggucaacaagaucaaguccgcccugcugagcaccaacaaggccguggugucccucagcaacggcgucuccgugcugaccuucaaggugcuggaccucaagaacuacaucgacaagcagcugcugcccauccucaacaagcagagcugcuccaucagcaacaucgagacggucaucgaguuccagcagaagaacaaccgccugcuggagaucacccgggaguucuccgugaacgcgggggugaccacccccgucagcacguacaugcucaccaacagcgagcugcugucccucaucaacgacaugcccaucaccaacgaccagaagaagcugaugagcaacaacgugcagaucgugcgccagcaguccuacagcaucaugugcaucaucaaggaggagguccuggccuacguggugcagcucccgcuguacggcgucaucgacacccccugcuggaagcugcacacgagcccccucugcaccaccaacaccaaggaggggagcaacaucugccugacgcggaccgaccgcggcugguacugcgacaacgccggcuccgugagcuucuucccccaggccgagaccugcaagguccaguccaaccggguguucugcgacaccaugaacagccugacgcucccguccgaggugaaccugugcaacgucgacaucuucaaccccaaguacgacugcaagaucaugaccagcaagaccgacguguccagcuccgugaucaccagccugggggccaucgucuccugcuacggcaagacgaagugcaccgcgagcaacaagaaccgcgggaucaucaagaccuucuccaacggcugcgacuacgugagcaacaagggcguggacaccgucagcguggggaacacccucuacuacgugaacaagcaggagggcaagucccuguacgucaagggggagcccaucaucaacuucuacgacccccugguguucccgagcgacgaguucgacgccuccaucagccaggugaacgagaagaucaaccagucccucgccuucauccggaaguccgacgagcugcugcacaacgucaacgccggcaaguccacgaccaacaucaugaucaccaccaucaucaucgugaucaucgugauccugcucagccugaucgccgucgggcugcuccuguacugcaaggcgcgcuccacgcccgugacccugagcaaggaccagcucuccggcaucaacaacaucgccuucagcaacugaggacuagucccuguucccagagcccacuuuuuuuucuuuuuuugaaauaaaauagccugucuuucagaucuaaaaaaaaaaaaaaaaaaaaaaaaaaaaaaaaaaaaaaaaaaaaaaaaaaaaaaaaaaaaaaaaugcaucccccccccccccccccccccccccccccccaaaggcucuuuucagagccaccagaauu

SEQ ID NO: 909 - RNA, 2001 nt, Artificial Sequence
  mRNA product Design a-1 comprising derived and/or modified sequence from HRSV(A2)__F0_DSCav1 (opt2)
gggagagucccgcagucggcguccagcggcucugcuuguucgugugugugucguugcaggccuuauucaagcuuaccauggagcuccucauccucaaggccaacgccaucaccaccauccucaccgccgucaccuucugcuucgccuccggccagaacaucaccgaggaguucuaccaguccaccugcuccgccgucuccaagggcuaccucuccgcccuccgcaccggcugguacaccuccgucaucaccaucgagcucuccaacaucaaggagaacaagugcaacggcaccgacgccaaggucaagcucaucaagcaggagcucgacaaguacaagaacgccgucaccgagcuccagcuccucaugcaguccacccccgccaccaacaaccgcgcccgccgcgagcucccccgcuucaugaacuacacccucaacaacgccaagaagaccaacgucacccucuccaagaagcgcaagcgccgcuuccucggcuuccuccucggcgucggcuccgccaucgccuccggcgucgccgucugcaagguccuccaccucgagggcgaggucaacaagaucaaguccgcccuccucuccaccaacaaggccgucgucucccucuccaacggcgucuccguccucaccuucaagguccucgaccucaagaacuacaucgacaagcagcuccuccccauccucaacaagcaguccugcuccaucuccaacaucgagaccgucaucgaguuccagcagaagaacaaccgccuccucgagaucacccgcgaguucuccgucaacgccggcgucaccacccccgucuccaccuacaugcucaccaacuccgagcuccucucccucaucaacgacaugcccaucaccaacgaccagaagaagcucauguccaacaacguccagaucguccgccagcaguccuacuccaucaugugcaucaucaaggaggagguccucgccuacgucguccagcucccccucuacggcgucaucgacacccccugcuggaagcuccacaccuccccccucugcaccaccaacaccaaggagggcuccaacaucugccucacccgcaccgaccgcggcugguacugcgacaacgccggcuccgucuccuucuucccccaggccgagaccugcaagguccaguccaaccgcgucuucugcgacaccaugaacucccucacccuccccuccgaggucaaccucugcaacgucgacaucuucaaccccaaguacgacugcaagaucaugaccuccaagaccgacgucuccuccuccgucaucaccucccucggcgccaucgucuccugcuacggcaagaccaagugcaccgccuccaacaagaaccgcggcaucaucaagaccuucuccaacggcugcgacuacgucuccaacaagggcgucgacaccgucuccgucggcaacacccucuacuacgucaacaagcaggagggcaagucccucuacgucaagggcgagcccaucaucaacuucuacgacccccucgucuuccccuccgacgaguucgacgccuccaucucccaggucaacgagaagaucaaccagucccucgccuucauccgcaaguccgacgagcuccuccacaacgucaacgccggcaaguccaccaccaacaucaugaucaccaccaucaucaucgucaucaucgucauccuccucucccucaucgccgucggccuccuccucuacugcaaggcccgcuccacccccgucacccucuccaaggaccagcucuccggcaucaacaacaucgccuucuccaacugaggacuagucccuguucccagagcccacuuuuuuuucuuuuuuugaaauaaaauagccugucuuucagaucuaaaaaaaaaaaaaaaaaaaaaaaaaaaaaaaaaaaaaaaaaaaaaaaaaaaaaaaaaaaaaaaaugcaucccccccccccccccccccccccccccccccaaaggcucuuuucagagccaccagaauu

SEQ ID NO: 910 - RNA, 2001 nt, Artificial Sequence
  mRNA product Design a-1 comprising derived and/or modified sequence from HRSV(A2)__F0_DSCav1 (opt3)
gggagagucccgcagucggcguccagcggcucugcuuguucgugugugugucguugcaggccuuauucaagcuuaccauggagcugcucauccuuaaggccaacgcuauuaccacaauacugacugcagugacguucugcuuugccagcggccagaauaucaccgaagaguucuaccaauccacauguucugcggucucaaaaggguauuugagugcuuuaagaacuggaugguacaccagcguuauuacaaucgaacuguccaacauuaaggagaauaaaugcaacgguaccgacgccaaggugaaacuaaucaagcaggaacucgauaaguauaaaaaugcaguaacugagcugcagcuucugaugcagucuacacccgccaccaacaauagggcucggcgcgaguugccucgauuuaugaacuacacgcucaauaacgcaaagaaaacuaaugugacccugucgaagaaacguaagagaagguuccugggcuuucucuuaggggucggaucagccauagcuagcggcguggccguuuguaaggugcugcaccuugaaggugaggucaacaaaaucaagagugcguugcuguccacaaauaaagcagugguaucucuaagcaacgggguuuccgugcucacuuucaagguccuggaccuuaaaaauuauauugauaagcaacuguugccaauccucaacaaacagucaugcaguauuagcaacaucgaaaccgugauagaguuucagcagaagaauaaccggcuguuagagauuacacgcgaguucucugugaaugccggagucaccacgccgguuuccacuuacaugcugacaaacucagaacuccuuagccugaucaaugacaugcccauuaccaacgaucaaaagaaauugaugaguaauaacgugcagaucguaagacagcagucuuauuccaucauguguauuauaaaggaagaggugcuagcuuacgucgugcaacugccucucuacggcguuaucgacacuccaugcuggaaacugcauacaagcccccuuuguaccacgaauaccaaggaaggcucgaacauuugccugacaaggacugaucgggggugguauugugacaaugccggaucuguguccuuuuucccucaggcagagaccugcaaaguccagucaaaccgcguguuuugugauacaaugaauaguuugacucucccaagcgagguaaaccugugcaauguugacaucuucaaccccaaguacgauugcaagauaaugaccuccaaaacagacgugucuagcucagucauuaccaguuuaggugcuaucguguccuguuauggcaagacuaaaugcacggccagcaacaagaaucgagggaucauuaaaacauuuucuaacggaugugauuacgucucaaauaagggcguggacaccguuaguguggguaacacucuguauuacguaaauaagcaagaagggaaaagccuauaugucaagggagagccuaucauuaacuucuacgacccacucguguucccguccgaugaauuugacgcgucuauaucgcagguuaaugagaaaaucaaccagagccuggccuucauuagaaaguccgaugaacuuuugcacaaugugaacgcaggcaaaucaaccacaaauaucaugaucaccacuauuauaaucgucauuaucgugauucugcucagucugaucgcuguaggccuucuguuguacugcaaggccaggucuacacccgugacgcucagcaaggaccagcuguccgggauaaacaauaucgcuuuuucaaacugaggacuagucccuguucccagagcccacuuuuuuuucuuuuuuugaaauaaaauagccugucuuucagaucuaaaaaaaaaaaaaaaaaaaaaaaaaaaaaaaaaaaaaaaaaaaaaaaaaaaaaaaaaaaaaaaaugcaucccccccccccccccccccccccccccccccaaaggcucuuuucagagccaccagaauu

SEQ ID NO: 911 - RNA, 2001 nt, Artificial Sequence
  mRNA product Design a-1 comprising derived and/or modified sequence from HRSV(A2)__F0_DSCav1 (opt4)
gggagagucccgcagucggcguccagcggcucugcuuguucgugugugugucguugcaggccuuauucaagcuuaccauggagcugcugauccugaaggccaacgccaucaccaccauccugaccgccgugaccuucugcuucgccagcggccagaacaucaccgaggaguucuaccagagcaccugcagcgccgugagcaagggcuaccugagcgcccugagaaccggcugguacaccagcgugaucaccaucgagcugagcaacaucaaggagaacaagugcaacggcaccgacgccaaggugaagcugaucaagcaggagcuggacaaguacaagaacgccgugaccgagcugcagcugcugaugcagagcacccccgccaccaacaacagagccagaagagagcugcccagauucaugaacuacacccugaacaacgccaagaagaccaacgugacccugagcaagaagagaaagagaagauuccugggcuuccugcugggcgugggcagcgccaucgccagcggcguggccgugugcaaggugcugcaccuggagggcgaggugaacaagaucaagagcgcccugcugagcaccaacaaggccguggugagccugagcaacggcgugagcgugcugaccuucaaggugcuggaccugaagaacuacaucgacaagcagcugcugcccauccugaacaagcagagcugcagcaucagcaacaucgagaccgugaucgaguuccagcagaagaacaacagacugcuggagaucaccagagaguucagcgugaacgccggcgugaccacccccgugagcaccuacaugcugaccaacagcgagcugcugagccugaucaacgacaugcccaucaccaacgaccagaagaagcugaugagcaacaacgugcagaucgugagacagcagagcuacagcaucaugugcaucaucaaggaggaggugcuggccuacguggugcagcugccccuguacggcgugaucgacacccccugcuggaagcugcacaccagcccccugugcaccaccaacaccaaggagggcagcaacaucugccugaccagaaccgacagaggcugguacugcgacaacgccggcagcgugagcuucuucccccaggccgagaccugcaaggugcagagcaacagaguguucugcgacaccaugaacagccugacccugcccagcgaggugaaccugugcaacguggacaucuucaaccccaaguacgacugcaagaucaugaccagcaagaccgacgugagcagcagcgugaucaccagccugggcgccaucgugagcugcuacggcaagaccaagugcaccgccagcaacaagaacagaggcaucaucaagaccuucagcaacggcugcgacuacgugagcaacaagggcguggacaccgugagcgugggcaacacccuguacuacgugaacaagcaggagggcaagagccuguacgugaagggcgagcccaucaucaacuucuacgacccccugguguuccccagcgacgaguucgacgccagcaucagccaggugaacgagaagaucaaccagagccuggccuucaucagaaagagcgacgagcugcugcacaacgugaacgccggcaagagcaccaccaacaucaugaucaccaccaucaucaucgugaucaucgugauccugcugagccugaucgccgugggccugcugcuguacugcaaggccagaagcacccccgugacccugagcaaggaccagcugagcggcaucaacaacaucgccuucagcaacugaggacuagucccuguucccagagcccacuuuuuuuucuuuuuuugaaauaaaauagccugucuuucagaucuaaaaaaaaaaaaaaaaaaaaaaaaaaaaaaaaaaaaaaaaaaaaaaaaaaaaaaaaaaaaaaaaugcaucccccccccccccccccccccccccccccccaaaggcucuuuucagagccaccagaauu

SEQ ID NO: 912 - RNA, 2001 nt, Artificial Sequence
  mRNA product Design a-1 comprising derived and/or modified sequence from HRSV(A2)__F0_DSCav1 (opt5)
gggagagucccgcagucggcguccagcggcucugcuuguucgugugugugucguugcaggccuuauucaagcuuaccauggagcugcucauccugaaggccaacgcuauuaccacaauccuuacggccgugaccuucugcuuugcgagcggccagaauauuacagaagaguucuaccaauccaccuguucugcugucagcaaaggguaucuguccgcccucagaacaggaugguacaccucuguuaucacaauugaacugagcaacaucaaggagaauaaaugcaacggcaccgacgccaaggugaaacuuaucaagcaggaacuggauaaguauaaaaaugcugugacggagcuccagcugcugaugcaguccacccccgccacaaacaaucgggcucgcagagagcucccucgguuuaugaacuacacccugaauaacgccaagaaaacaaaugucacccuuucuaagaaacgcaagagacgguuccugggguuucuccugggagugggcagcgcgauugccuccgggguugcuguguguaagguccuucaccuggaaggagaggugaacaaaaucaagagcgcccuccugucuacgaauaaagcuguugugucccugagcaacggcgucucugugcucacauucaaggugcuggaccuuaaaaauuauauugauaagcaacugcucccgauccugaacaaacaguccugcagcauuucuaacaucgaaaccgucauugaguuucagcagaagaauaaccgccuucuggagaucacaagagaauuuuccguuaaugccggcgugaccacccccgugagcacauacaugcucacgaacuccgagcugcugucucucaucaaugacaugccuauuaccaacgaucaaaagaaacugaugagcaauaacguccagaucgugcggcagcaguccuauagcauuauguguaucauuaaggaagagguucuugcguacgugguccaacugccccucuacggggugaucgacacaccuugcuggaaacugcauaccucuccccuuuguacaaccaauacgaaggaaggauccaacaucugccugacacgcaccgauagaggcugguauugugacaaugccgggagcguuucuuucuucccucaggcugagaccugcaaagugcagagcaaccgggucuuuugugauacaaugaacucccucacccugccgucugaggugaaucugugcaaugucgacauuuucaaccccaaguacgauugcaagaucaugacaagcaaaacggacguguccagcucuguuauuaccucccucggagccaucgugagcuguuauggcaagacaaaaugcaccgcuucuaacaagaaucgcgggauuaucaaaacauuuuccaacggaugugauuacgucagcaauaagggcguggacaccguuuccgugggcaacacgcuguauuacgucaauaagcaagaagggaaaucucuuuaugugaagggagagccuaucauuaacuucuacgacccccugguguucccuagcgaugaauuugacgccuccaucucucagguuaaugagaaaauuaaccagagccucgccuucaucagaaaguccgaugaacugcugcacaaugucaacgcuggcaaaagcaccacaaauauuaugaucaccacaauuaucaucgugauuaucgugauucuucucucucugaucgcggucgggcugcuccuguacugcaaggcccgguccacccccgugacgcuuagcaaggaccagcugucuggaauuaacaauaucgcuuuuuccaacugaggacuagucccuguucccagagcccacuuuuuuuucuuuuuuugaaauaaaauagccugucuuucagaucuaaaaaaaaaaaaaaaaaaaaaaaaaaaaaaaaaaaaaaaaaaaaaaaaaaaaaaaaaaaaaaaaugcaucccccccccccccccccccccccccccccccaaaggcucuuuucagagccaccagaauu

SEQ ID NO: 913 - RNA, 2001 nt, Artificial Sequence
  mRNA product Design a-1 comprising derived and/or modified sequence from HRSV(A2)__F0_DSCav1 (opt6)
gggagagucccgcagucggcguccagcggcucugcuuguucgugugugugucguugcaggccuuauucaagcuuaccauggaauuauuaauccucaaagcgaacgcuauuacuaccauucuaacagcagucacauucugcuucgccucaggccaaaacauuacagaagaauuuuaccaaucaacaugcucugccguaucaaaaggcuaccuauccgcccuacgaacaggcugguacacaagcguaauaacaaucgaacuaucaaacauaaaagaaaacaaaugcaacgguacagacgccaaaguuaaacuaauaaaacaagaacucgauaaauacaaaaacgcaguaacagaauuacaacuacuaaugcaaucaacaccugcaacaaacaauagagccaggagagaauuaccucgauucaugaauuacacacucaauaacgcaaaaaaaaccaacguuacacuaucaaaaaaaagaaaacgacgauucuuaggauuccuacucggagucggaucagcaauagcaucuggcguugcaguaugcaaaguauuacacuuagaaggugaagucaauaaaauaaaaagcgcgcuacuaaguacaaacaaagcagucgucucccuaucaaacggagucucaguccuaacauucaaaguacucgaccuaaaaaauuacauagauaaacaacuacuuccaauauuaaacaaacaauccuguagcaucagcaauauagaaacaguaauagaauuucaacaaaaaaacaaccgauuauuagaaaucacucgagaauuuuccguaaacgccgggguaacaacuccagucucaaccuacaugcuaaccaauucagaacuauugagcuuaauaaacgacaugccaauaaccaacgaccaaaaaaaacuaaugucuaacaauguucaaaucgucagacaacaaaguuacaguauaauguguauaaucaaagaagaaguccuagcauacguaguccaacucccacuauauggaguuaucgacacaccauguuggaaauuacacaccucaccauuaugcacaaccaauacaaaagaaggaucaaacauaugccuuacacggacagaccgcggaugguauugugacaacgcuggcucagucuccuuuuucccacaagcagaaacaugcaaaguacaaucaaacagagucuuuugcgauaccaugaacucacuuacauuaccaagcgaaguaaaucuuuguaacgucgacaucuucaauccuaaauaugacugcaaaaucaugaccucaaaaacagacguuagcucuucaguaaucacuagcuuaggagcaaucguaucaugcuacggcaaaacaaaauguacagcaucaaauaaaaacagaggaaucauaaaaacauuuucaaacggaugcgauuauguaagcaacaaaggaguagauacuguaagcguaggaaacacauuguacuauguaaacaaacaagaaggaaaaucacucuauguaaaaggagaaccuauaaucaauuucuacgauccauuaguguucccaucagaugaauuugacgccucaauaucacaaguuaaugaaaaaauaaaucaaucgcuagcauucauacguaaaucagaugaauuacuacauaacguaaacgcaggcaaauccacaacaaauaucaugaucacaacaauuauaauaguaauaauaguaauacuacuaucacuaauagccguaggacuccuacuauacugcaaagcaagaucuacuccaguaacccucucaaaagaucaacuaagcggaauuaauaacaucgcauucagcaacuaaggacuagucccuguucccagagcccacuuuuuuuucuuuuuuugaaauaaaauagccugucuuucagaucuaaaaaaaaaaaaaaaaaaaaaaaaaaaaaaaaaaaaaaaaaaaaaaaaaaaaaaaaaaaaaaaaugcaucccccccccccccccccccccccccccccccaaaggcucuuuucagagccaccagaauu

SEQ ID NO: 914 - RNA, 2001 nt, Artificial Sequence
  mRNA product Design a-1 comprising derived and/or modified sequence from HRSV(A2)__F0_DSCav1 (opt11)
gggagagucccgcagucggcguccagcggcucugcuuguucgugugugugucguugcaggccuuauucaagcuuaccauggaacuacuuauccucaaagccaacgccaucaccaccauccucacagcaguaaccuuuugcuucgccucaggccaaaauaucacagaagaauuuuaccagaguaccugcuccgccguauccaaaggauaccucagcgcgcuccgcaccggcugguacacuucaguaaucacaaucgaacuauccaacaucaaagaaaacaaaugcaacggcaccgacgcgaaagucaaacucaucaaacaagaacuagacaaauacaaaaaugccguaacagaacuacaacuguuaaugcagagcacacccgccaccaacaaccgcgcccgccgggaacucccccgauucaugaacuacacacucaacaacgccaaaaagacgaacgucacccucagcaagaaacgaaaacgcagauuccucgguuuccuacuaggcguaggcucagcaauagccuccggaguagccgucugcaaaguccugcacuuagaaggcgaagucaacaaaaucaaauccgcccuacucuccacgaacaaagccgucgucucccuguccaacggugucuccguuuuaaccuucaaaguucuggaccucaaaaacuacauagacaaacagcuucuccccauccucaacaaacaauccuguagcaucuccaacaucgaaaccgucauagaauuucaacagaaaaacaacagacugcucgaaaucacccgcgaguucuccgucaacgccggcgucacgacucccgucuccaccuauaugcucacgaacucggaacuccuuucccuaaucaacgacaugccgaucaccaacgaccaaaagaaacucaugucaaacaacguacaaauuguccgccaacaaucauacuccaucaugugcauaauuaaagaagaaguccucgcauacguaguccaacucccccucuacggcgucaucgacacccccugcuggaaacuccacaccuccccacucugcacaaccaacaccaaagaaggcucaaacauaugccuaacgcgcaccgaucgcgguugguacugcgacaacgccgguuccgucagcuucuucccccaagcagagacaugcaaaguccaaucaaaccgcgucuucugcgacaccaugaacucacuaacccuuccaagcgaagucaaccucugcaacguugacaucuucaaccccaaauacgacuguaaaaucaugaccuccaagaccgacguauccucuuccgucaucacaucccuaggcgcuaucguauccugcuaugguaaaaccaaaugcaccgccuccaacaaaaaccgcggcaucaucaagacauuuuccaacggcugcgacuacgugagcaacaaaggcgucgacaccgucuccguaggcaacacccucuacuauguaaacaaacaagagggcaaaucacucuacgucaaaggggaacccaucaucaacuucuacgacccgcucguauuccccagcgaugaguucgacgccuccaucucccaggucaacgaaaagauaaaccaaucacucgcauucauucguaaauccgacgaacuccuacacaacgugaaugcaggcaaaucgaccacuaacaucaugaucaccaccaucaucaucgucaucauagucauccuccugucccuuaucgccgucggucuuuuauuauacugcaaagcccgcagcacccccgucacccucucuaaggaccaacucagcggcaucaauaacaucgcauucucuaacuaaggacuagucccuguucccagagcccacuuuuuuuucuuuuuuugaaauaaaauagccugucuuucagaucuaaaaaaaaaaaaaaaaaaaaaaaaaaaaaaaaaaaaaaaaaaaaaaaaaaaaaaaaaaaaaaaaugcaucccccccccccccccccccccccccccccccaaaggcucuuuucagagccaccagaauu

SEQ ID NO: 915 - RNA, 2020 nt, Artificial Sequence
  mRNA product Design a-2 comprising derived and/or modified sequence from HRSV(A2)__F0_DSCav1 (opt1)
gggagaguccgcucagccagguugcagaagcggcuuagcguguguccuaaucuucucucugcguguagguaggccugugccgcaaacaagcuuaccauggagcugcucauccugaaggccaacgccaucaccaccauccugacggcggugaccuucugcuucgccagcggccagaacaucaccgaggaguucuaccaguccacgugcagcgccgucuccaagggguaccucagcgcccugcggaccggcugguacaccuccgugaucaccaucgagcugagcaacaucaaggagaacaagugcaacgggaccgacgccaaggugaagcucaucaagcaggagcuggacaaguacaagaacgcggucacggagcugcagcuccugaugcaguccaccccggcaaccaacaaccgcgcccggcgcgagcugccccgguucaugaacuacacccucaacaacgccaagaagacgaacgugacccugagcaagaagcgcaagcggcgcuuccugggcuuccuccugggggugggcuccgccaucgcgagcggcgucgccgugugcaaggugcugcaccucgagggggaggucaacaagaucaagagcgcccugcuguccaccaacaaggccguggugagccucuccaacggcgucagcgugcugaccuucaaggugcuggaccucaagaacuacaucgacaagcagcugcugcccauccugaacaagcagagcugcuccaucagcaacaucgagacggugaucgaguuccagcagaagaacaaccggcuccuggagaucacccgcgaguucagcgugaacgccggggucaccacccccguguccacguacaugcugaccaacagcgagcuccugucccugaucaacgacaugccgaucaccaacgaccagaagaagcucaugagcaacaacgugcagaucguccggcagcaguccuacagcaucaugugcaucaucaaggaggaggugcuggcguacgugguccagcugccccucuacggcgugaucgacacccccugcuggaagcugcacacgagcccccugugcaccaccaacaccaaggagggguccaacaucugccucacgcgcaccgaccggggcugguacugcgacaacgccggcagcgucuccuucuucccgcaggccgagaccugcaaggugcagagcaaccgcguguucugcgacaccaugaacucccugacgcugcccagcgagguaaaccucugcaacgucgacaucuucaaccccaaguacgacugcaagaucaugaccuccaagaccgacgugagcuccagcgugaucaccucccugggggccaucgucagcugcuacggcaagacgaagugcaccgccagcaacaagaaccgggggaucaucaagaccuucuccaacggcugcgacuacgugagcaacaagggcguggacaccguguccgucgggaacacccuguacuacgugaacaagcaggagggcaagagccucuacgugaagggggagcccaucaucaacuucuacgacccgcuggucuuccccuccgacgaguucgacgcgagcaucucccaggugaacgagaagaucaaccagagccuggccuucauccgcaaguccgacgagcugcuccacaacgugaacgccggcaagagcacgaccaacaucaugaucaccaccaucaucaucgucaucaucgugauccugcugucccucaucgccguggggcugcugcucuacugcaaggcccggagcacgcccgucacccuguccaaggaccagcugagcggcaucaacaacaucgcguucuccaacugaggacuagucccuguucccagagcccacuuuuuuuucuuuuuuugaaauaaaauagccugucuuucagaucuaaaaaaaaaaaaaaaaaaaaaaaaaaaaaaaaaaaaaaaaaaaaaaaaaaaaaaaaaaaaaaaaugcaucccccccccccccccccccccccccccccccaaaggcucuuuucagagccaccagaauu

SEQ ID NO: 916 - RNA, 2020 nt, Artificial Sequence
  mRNA product Design a-2 comprising derived and/or modified sequence from HRSV(A2)__F0_DSCav1 (opt1)
gggagaguccgcucagccagguugcagaagcggcuuagcguguguccuaaucuucucucugcguguagguaggccugugccgcaaacaagcuuaccauggagcugcucauccugaaggccaacgccaucaccaccauccugacggcggugaccuucugcuucgccagcggccagaacaucaccgaggaguucuaccaguccacgugcagcgccgucuccaagggguaccucagcgcccugcgcaccggcugguacaccuccgugaucaccaucgagcugagcaacaucaaggagaacaagugcaacgggaccgacgccaaggugaagcucaucaagcaggagcuggacaaguacaagaacgcggucacggagcugcagcuccugaugcaguccacccccgccaccaacaaccgggcccgccgggagcugccgcgcuucaugaacuacacccucaacaacgccaagaagacgaacgugacccugagcaagaagcggaagcgccgguuccugggcuuccuccugggggugggcuccgcgaucgccagcggcgucgccgugugcaaggugcugcaccucgagggggaggucaacaagaucaaguccgcccugcugagcaccaacaaggccguggugucccucagcaacggcgucuccgugcugaccuucaaggugcuggaccucaagaacuacaucgacaagcagcugcugcccauccucaacaagcagagcugcuccaucagcaacaucgagacggucaucgaguuccagcagaagaacaaccgccugcuggagaucacccgggaguucuccgugaacgcgggggugaccacccccgucagcacguacaugcucaccaacagcgagcugcugucccucaucaacgacaugcccaucaccaacgaccagaagaagcugaugagcaacaacgugcagaucgugcgccagcaguccuacagcaucaugugcaucaucaaggaggagguccuggccuacguggugcagcucccgcuguacggcgucaucgacacccccugcuggaagcugcacacgagcccccucugcaccaccaacaccaaggaggggagcaacaucugccugacgcggaccgaccgcggcugguacugcgacaacgccggcuccgugagcuucuucccccaggccgagaccugcaagguccaguccaaccggguguucugcgacaccaugaacagccugacgcucccguccgaggugaaccugugcaacgucgacaucuucaaccccaaguacgacugcaagaucaugaccagcaagaccgacguguccagcuccgugaucaccagccugggggccaucgucuccugcuacggcaagacgaagugcaccgcgagcaacaagaaccgcgggaucaucaagaccuucuccaacggcugcgacuacgugagcaacaagggcguggacaccgucagcguggggaacacccucuacuacgugaacaagcaggagggcaagucccuguacgucaagggggagcccaucaucaacuucuacgacccccugguguucccgagcgacgaguucgacgccuccaucagccaggugaacgagaagaucaaccagucccucgccuucauccggaaguccgacgagcugcugcacaacgucaacgccggcaaguccacgaccaacaucaugaucaccaccaucaucaucgugaucaucgugauccugcucagccugaucgccgucgggcugcuccuguacugcaaggcgcgcuccacgcccgugacccugagcaaggaccagcucuccggcaucaacaacaucgccuucagcaacugaggacuagucccuguucccagagcccacuuuuuuuucuuuuuuugaaauaaaauagccugucuuucagaucuaaaaaaaaaaaaaaaaaaaaaaaaaaaaaaaaaaaaaaaaaaaaaaaaaaaaaaaaaaaaaaaaugcaucccccccccccccccccccccccccccccccaaaggcucuuuucagagccaccagaauu

SEQ ID NO: 917 - RNA, 2020 nt, Artificial Sequence
  mRNA product Design a-2 comprising derived and/or modified sequence from HRSV(A2)__F0_DSCav1 (opt2)
gggagaguccgcucagccagguugcagaagcggcuuagcguguguccuaaucuucucucugcguguagguaggccugugccgcaaacaagcuuaccauggagcuccucauccucaaggccaacgccaucaccaccauccucaccgccgucaccuucugcuucgccuccggccagaacaucaccgaggaguucuaccaguccaccugcuccgccgucuccaagggcuaccucuccgcccuccgcaccggcugguacaccuccgucaucaccaucgagcucuccaacaucaaggagaacaagugcaacggcaccgacgccaaggucaagcucaucaagcaggagcucgacaaguacaagaacgccgucaccgagcuccagcuccucaugcaguccacccccgccaccaacaaccgcgcccgccgcgagcucccccgcuucaugaacuacacccucaacaacgccaagaagaccaacgucacccucuccaagaagcgcaagcgccgcuuccucggcuuccuccucggcgucggcuccgccaucgccuccggcgucgccgucugcaagguccuccaccucgagggcgaggucaacaagaucaaguccgcccuccucuccaccaacaaggccgucgucucccucuccaacggcgucuccguccucaccuucaagguccucgaccucaagaacuacaucgacaagcagcuccuccccauccucaacaagcaguccugcuccaucuccaacaucgagaccgucaucgaguuccagcagaagaacaaccgccuccucgagaucacccgcgaguucuccgucaacgccggcgucaccacccccgucuccaccuacaugcucaccaacuccgagcuccucucccucaucaacgacaugcccaucaccaacgaccagaagaagcucauguccaacaacguccagaucguccgccagcaguccuacuccaucaugugcaucaucaaggaggagguccucgccuacgucguccagcucccccucuacggcgucaucgacacccccugcuggaagcuccacaccuccccccucugcaccaccaacaccaaggagggcuccaacaucugccucacccgcaccgaccgcggcugguacugcgacaacgccggcuccgucuccuucuucccccaggccgagaccugcaagguccaguccaaccgcgucuucugcgacaccaugaacucccucacccuccccuccgaggucaaccucugcaacgucgacaucuucaaccccaaguacgacugcaagaucaugaccuccaagaccgacgucuccuccuccgucaucaccucccucggcgccaucgucuccugcuacggcaagaccaagugcaccgccuccaacaagaaccgcggcaucaucaagaccuucuccaacggcugcgacuacgucuccaacaagggcgucgacaccgucuccgucggcaacacccucuacuacgucaacaagcaggagggcaagucccucuacgucaagggcgagcccaucaucaacuucuacgacccccucgucuuccccuccgacgaguucgacgccuccaucucccaggucaacgagaagaucaaccagucccucgccuucauccgcaaguccgacgagcuccuccacaacgucaacgccggcaaguccaccaccaacaucaugaucaccaccaucaucaucgucaucaucgucauccuccucucccucaucgccgucggccuccuccucuacugcaaggcccgcuccacccccgucacccucuccaaggaccagcucuccggcaucaacaacaucgccuucuccaacugaggacuagucccuguucccagagcccacuuuuuuuucuuuuuuugaaauaaaauagccugucuuucagaucuaaaaaaaaaaaaaaaaaaaaaaaaaaaaaaaaaaaaaaaaaaaaaaaaaaaaaaaaaaaaaaaaugcaucccccccccccccccccccccccccccccccaaaggcucuuuucagagccaccagaauu

SEQ ID NO: 918 - RNA, 2020 nt, Artificial Sequence
  mRNA product Design a-2 comprising derived and/or modified sequence from HRSV(A2)__F0_DSCav1 (opt3)
gggagaguccgcucagccagguugcagaagcggcuuagcguguguccuaaucuucucucugcguguagguaggccugugccgcaaacaagcuuaccauggagcugcucauccuuaaggccaacgcuauuaccacaauacugacugcagugacguucugcuuugccagcggccagaauaucaccgaagaguucuaccaauccacauguucugcggucucaaaaggguauuugagugcuuuaagaacuggaugguacaccagcguuauuacaaucgaacuguccaacauuaaggagaauaaaugcaacgguaccgacgccaaggugaaacuaaucaagcaggaacucgauaaguauaaaaaugcaguaacugagcugcagcuucugaugcagucuacacccgccaccaacaauagggcucggcgcgaguugccucgauuuaugaacuacacgcucaauaacgcaaagaaaacuaaugugacccugucgaagaaacguaagagaagguuccugggcuuucucuuaggggucggaucagccauagcuagcggcguggccguuuguaaggugcugcaccuugaaggugaggucaacaaaaucaagagugcguugcuguccacaaauaaagcagugguaucucuaagcaacgggguuuccgugcucacuuucaagguccuggaccuuaaaaauuauauugauaagcaacuguugccaauccucaacaaacagucaugcaguauuagcaacaucgaaaccgugauagaguuucagcagaagaauaaccggcuguuagagauuacacgcgaguucucugugaaugccggagucaccacgccgguuuccacuuacaugcugacaaacucagaacuccuuagccugaucaaugacaugcccauuaccaacgaucaaaagaaauugaugaguaauaacgugcagaucguaagacagcagucuuauuccaucauguguauuauaaaggaagaggugcuagcuuacgucgugcaacugccucucuacggcguuaucgacacuccaugcuggaaacugcauacaagcccccuuuguaccacgaauaccaaggaaggcucgaacauuugccugacaaggacugaucgggggugguauugugacaaugccggaucuguguccuuuuucccucaggcagagaccugcaaaguccagucaaaccgcguguuuugugauacaaugaauaguuugacucucccaagcgagguaaaccugugcaauguugacaucuucaaccccaaguacgauugcaagauaaugaccuccaaaacagacgugucuagcucagucauuaccaguuuaggugcuaucguguccuguuauggcaagacuaaaugcacggccagcaacaagaaucgagggaucauuaaaacauuuucuaacggaugugauuacgucucaaauaagggcguggacaccguuaguguggguaacacucuguauuacguaaauaagcaagaagggaaaagccuauaugucaagggagagccuaucauuaacuucuacgacccacucguguucccguccgaugaauuugacgcgucuauaucgcagguuaaugagaaaaucaaccagagccuggccuucauuagaaaguccgaugaacuuuugcacaaugugaacgcaggcaaaucaaccacaaauaucaugaucaccacuauuauaaucgucauuaucgugauucugcucagucugaucgcuguaggccuucuguuguacugcaaggccaggucuacacccgugacgcucagcaaggaccagcuguccgggauaaacaauaucgcuuuuucaaacugaggacuagucccuguucccagagcccacuuuuuuuucuuuuuuugaaauaaaauagccugucuuucagaucuaaaaaaaaaaaaaaaaaaaaaaaaaaaaaaaaaaaaaaaaaaaaaaaaaaaaaaaaaaaaaaaaugcaucccccccccccccccccccccccccccccccaaaggcucuuuucagagccaccagaauu

SEQ ID NO: 919 - RNA, 2020 nt, Artificial Sequence
  mRNA product Design a-2 comprising derived and/or modified sequence from HRSV(A2)__F0_DSCav1 (opt4)
gggagaguccgcucagccagguugcagaagcggcuuagcguguguccuaaucuucucucugcguguagguaggccugugccgcaaacaagcuuaccauggagcugcugauccugaaggccaacgccaucaccaccauccugaccgccgugaccuucugcuucgccagcggccagaacaucaccgaggaguucuaccagagcaccugcagcgccgugagcaagggcuaccugagcgcccugagaaccggcugguacaccagcgugaucaccaucgagcugagcaacaucaaggagaacaagugcaacggcaccgacgccaaggugaagcugaucaagcaggagcuggacaaguacaagaacgccgugaccgagcugcagcugcugaugcagagcacccccgccaccaacaacagagccagaagagagcugcccagauucaugaacuacacccugaacaacgccaagaagaccaacgugacccugagcaagaagagaaagagaagauuccugggcuuccugcugggcgugggcagcgccaucgccagcggcguggccgugugcaaggugcugcaccuggagggcgaggugaacaagaucaagagcgcccugcugagcaccaacaaggccguggugagccugagcaacggcgugagcgugcugaccuucaaggugcuggaccugaagaacuacaucgacaagcagcugcugcccauccugaacaagcagagcugcagcaucagcaacaucgagaccgugaucgaguuccagcagaagaacaacagacugcuggagaucaccagagaguucagcgugaacgccggcgugaccacccccgugagcaccuacaugcugaccaacagcgagcugcugagccugaucaacgacaugcccaucaccaacgaccagaagaagcugaugagcaacaacgugcagaucgugagacagcagagcuacagcaucaugugcaucaucaaggaggaggugcuggccuacguggugcagcugccccuguacggcgugaucgacacccccugcuggaagcugcacaccagcccccugugcaccaccaacaccaaggagggcagcaacaucugccugaccagaaccgacagaggcugguacugcgacaacgccggcagcgugagcuucuucccccaggccgagaccugcaaggugcagagcaacagaguguucugcgacaccaugaacagccugacccugcccagcgaggugaaccugugcaacguggacaucuucaaccccaaguacgacugcaagaucaugaccagcaagaccgacgugagcagcagcgugaucaccagccugggcgccaucgugagcugcuacggcaagaccaagugcaccgccagcaacaagaacagaggcaucaucaagaccuucagcaacggcugcgacuacgugagcaacaagggcguggacaccgugagcgugggcaacacccuguacuacgugaacaagcaggagggcaagagccuguacgugaagggcgagcccaucaucaacuucuacgacccccugguguuccccagcgacgaguucgacgccagcaucagccaggugaacgagaagaucaaccagagccuggccuucaucagaaagagcgacgagcugcugcacaacgugaacgccggcaagagcaccaccaacaucaugaucaccaccaucaucaucgugaucaucgugauccugcugagccugaucgccgugggccugcugcuguacugcaaggccagaagcacccccgugacccugagcaaggaccagcugagcggcaucaacaacaucgccuucagcaacugaggacuagucccuguucccagagcccacuuuuuuuucuuuuuuugaaauaaaauagccugucuuucagaucuaaaaaaaaaaaaaaaaaaaaaaaaaaaaaaaaaaaaaaaaaaaaaaaaaaaaaaaaaaaaaaaaugcaucccccccccccccccccccccccccccccccaaaggcucuuuucagagccaccagaauu

SEQ ID NO: 920 - RNA, 2020 nt, Artificial Sequence
  mRNA product Design a-2 comprising derived and/or modified sequence from HRSV(A2)__F0_DSCav1 (opt5)
gggagaguccgcucagccagguugcagaagcggcuuagcguguguccuaaucuucucucugcguguagguaggccugugccgcaaacaagcuuaccauggagcugcucauccugaaggccaacgcuauuaccacaauccuuacggccgugaccuucugcuuugcgagcggccagaauauuacagaagaguucuaccaauccaccuguucugcugucagcaaaggguaucuguccgcccucagaacaggaugguacaccucuguuaucacaauugaacugagcaacaucaaggagaauaaaugcaacggcaccgacgccaaggugaaacuuaucaagcaggaacuggauaaguauaaaaaugcugugacggagcuccagcugcugaugcaguccacccccgccacaaacaaucgggcucgcagagagcucccucgguuuaugaacuacacccugaauaacgccaagaaaacaaaugucacccuuucuaagaaacgcaagagacgguuccugggguuucuccugggagugggcagcgcgauugccuccgggguugcuguguguaagguccuucaccuggaaggagaggugaacaaaaucaagagcgcccuccugucuacgaauaaagcuguugugucccugagcaacggcgucucugugcucacauucaaggugcuggaccuuaaaaauuauauugauaagcaacugcucccgauccugaacaaacaguccugcagcauuucuaacaucgaaaccgucauugaguuucagcagaagaauaaccgccuucuggagaucacaagagaauuuuccguuaaugccggcgugaccacccccgugagcacauacaugcucacgaacuccgagcugcugucucucaucaaugacaugccuauuaccaacgaucaaaagaaacugaugagcaauaacguccagaucgugcggcagcaguccuauagcauuauguguaucauuaaggaagagguucuugcguacgugguccaacugccccucuacggggugaucgacacaccuugcuggaaacugcauaccucuccccuuuguacaaccaauacgaaggaaggauccaacaucugccugacacgcaccgauagaggcugguauugugacaaugccgggagcguuucuuucuucccucaggcugagaccugcaaagugcagagcaaccgggucuuuugugauacaaugaacucccucacccugccgucugaggugaaucugugcaaugucgacauuuucaaccccaaguacgauugcaagaucaugacaagcaaaacggacguguccagcucuguuauuaccucccucggagccaucgugagcuguuauggcaagacaaaaugcaccgcuucuaacaagaaucgcgggauuaucaaaacauuuuccaacggaugugauuacgucagcaauaagggcguggacaccguuuccgugggcaacacgcuguauuacgucaauaagcaagaagggaaaucucuuuaugugaagggagagccuaucauuaacuucuacgacccccugguguucccuagcgaugaauuugacgccuccaucucucagguuaaugagaaaauuaaccagagccucgccuucaucagaaaguccgaugaacugcugcacaaugucaacgcuggcaaaagcaccacaaauauuaugaucaccacaauuaucaucgugauuaucgugauucuucucucucugaucgcggucgggcugcuccuguacugcaaggcccgguccacccccgugacgcuuagcaaggaccagcugucuggaauuaacaauaucgcuuuuuccaacugaggacuagucccuguucccagagcccacuuuuuuuucuuuuuuugaaauaaaauagccugucuuucagaucuaaaaaaaaaaaaaaaaaaaaaaaaaaaaaaaaaaaaaaaaaaaaaaaaaaaaaaaaaaaaaaaaugcaucccccccccccccccccccccccccccccccaaaggcucuuuucagagccaccagaauu

SEQ ID NO: 921 - RNA, 2020 nt, Artificial Sequence
  mRNA product Design a-2 comprising derived and/or modified sequence from HRSV(A2)__F0_DSCav1 (opt6)
gggagaguccgcucagccagguugcagaagcggcuuagcguguguccuaaucuucucucugcguguagguaggccugugccgcaaacaagcuuaccauggaauuauuaauccucaaagcgaacgcuauuacuaccauucuaacagcagucacauucugcuucgccucaggccaaaacauuacagaagaauuuuaccaaucaacaugcucugccguaucaaaaggcuaccuauccgcccuacgaacaggcugguacacaagcguaauaacaaucgaacuaucaaacauaaaagaaaacaaaugcaacgguacagacgccaaaguuaaacuaauaaaacaagaacucgauaaauacaaaaacgcaguaacagaauuacaacuacuaaugcaaucaacaccugcaacaaacaauagagccaggagagaauuaccucgauucaugaauuacacacucaauaacgcaaaaaaaaccaacguuacacuaucaaaaaaaagaaaacgacgauucuuaggauuccuacucggagucggaucagcaauagcaucuggcguugcaguaugcaaaguauuacacuuagaaggugaagucaauaaaauaaaaagcgcgcuacuaaguacaaacaaagcagucgucucccuaucaaacggagucucaguccuaacauucaaaguacucgaccuaaaaaauuacauagauaaacaacuacuuccaauauuaaacaaacaauccuguagcaucagcaauauagaaacaguaauagaauuucaacaaaaaaacaaccgauuauuagaaaucacucgagaauuuuccguaaacgccgggguaacaacuccagucucaaccuacaugcuaaccaauucagaacuauugagcuuaauaaacgacaugccaauaaccaacgaccaaaaaaaacuaaugucuaacaauguucaaaucgucagacaacaaaguuacaguauaauguguauaaucaaagaagaaguccuagcauacguaguccaacucccacuauauggaguuaucgacacaccauguuggaaauuacacaccucaccauuaugcacaaccaauacaaaagaaggaucaaacauaugccuuacacggacagaccgcggaugguauugugacaacgcuggcucagucuccuuuuucccacaagcagaaacaugcaaaguacaaucaaacagagucuuuugcgauaccaugaacucacuuacauuaccaagcgaaguaaaucuuuguaacgucgacaucuucaauccuaaauaugacugcaaaaucaugaccucaaaaacagacguuagcucuucaguaaucacuagcuuaggagcaaucguaucaugcuacggcaaaacaaaauguacagcaucaaauaaaaacagaggaaucauaaaaacauuuucaaacggaugcgauuauguaagcaacaaaggaguagauacuguaagcguaggaaacacauuguacuauguaaacaaacaagaaggaaaaucacucuauguaaaaggagaaccuauaaucaauuucuacgauccauuaguguucccaucagaugaauuugacgccucaauaucacaaguuaaugaaaaaauaaaucaaucgcuagcauucauacguaaaucagaugaauuacuacauaacguaaacgcaggcaaauccacaacaaauaucaugaucacaacaauuauaauaguaauaauaguaauacuacuaucacuaauagccguaggacuccuacuauacugcaaagcaagaucuacuccaguaacccucucaaaagaucaacuaagcggaauuaauaacaucgcauucagcaacuaaggacuagucccuguucccagagcccacuuuuuuuucuuuuuuugaaauaaaauagccugucuuucagaucuaaaaaaaaaaaaaaaaaaaaaaaaaaaaaaaaaaaaaaaaaaaaaaaaaaaaaaaaaaaaaaaaugcaucccccccccccccccccccccccccccccccaaaggcucuuuucagagccaccagaauu

SEQ ID NO: 922 - RNA, 2020 nt, Artificial Sequence
  mRNA product Design a-2 comprising derived and/or modified sequence from HRSV(A2)__F0_DSCav1 (opt11)
gggagaguccgcucagccagguugcagaagcggcuuagcguguguccuaaucuucucucugcguguagguaggccugugccgcaaacaagcuuaccauggaacuacuuauccucaaagccaacgccaucaccaccauccucacagcaguaaccuuuugcuucgccucaggccaaaauaucacagaagaauuuuaccagaguaccugcuccgccguauccaaaggauaccucagcgcgcuccgcaccggcugguacacuucaguaaucacaaucgaacuauccaacaucaaagaaaacaaaugcaacggcaccgacgcgaaagucaaacucaucaaacaagaacuagacaaauacaaaaaugccguaacagaacuacaacuguuaaugcagagcacacccgccaccaacaaccgcgcccgccgggaacucccccgauucaugaacuacacacucaacaacgccaaaaagacgaacgucacccucagcaagaaacgaaaacgcagauuccucgguuuccuacuaggcguaggcucagcaauagccuccggaguagccgucugcaaaguccugcacuuagaaggcgaagucaacaaaaucaaauccgcccuacucuccacgaacaaagccgucgucucccuguccaacggugucuccguuuuaaccuucaaaguucuggaccucaaaaacuacauagacaaacagcuucuccccauccucaacaaacaauccuguagcaucuccaacaucgaaaccgucauagaauuucaacagaaaaacaacagacugcucgaaaucacccgcgaguucuccgucaacgccggcgucacgacucccgucuccaccuauaugcucacgaacucggaacuccuuucccuaaucaacgacaugccgaucaccaacgaccaaaagaaacucaugucaaacaacguacaaauuguccgccaacaaucauacuccaucaugugcauaauuaaagaagaaguccucgcauacguaguccaacucccccucuacggcgucaucgacacccccugcuggaaacuccacaccuccccacucugcacaaccaacaccaaagaaggcucaaacauaugccuaacgcgcaccgaucgcgguugguacugcgacaacgccgguuccgucagcuucuucccccaagcagagacaugcaaaguccaaucaaaccgcgucuucugcgacaccaugaacucacuaacccuuccaagcgaagucaaccucugcaacguugacaucuucaaccccaaauacgacuguaaaaucaugaccuccaagaccgacguauccucuuccgucaucacaucccuaggcgcuaucguauccugcuaugguaaaaccaaaugcaccgccuccaacaaaaaccgcggcaucaucaagacauuuuccaacggcugcgacuacgugagcaacaaaggcgucgacaccgucuccguaggcaacacccucuacuauguaaacaaacaagagggcaaaucacucuacgucaaaggggaacccaucaucaacuucuacgacccgcucguauuccccagcgaugaguucgacgccuccaucucccaggucaacgaaaagauaaaccaaucacucgcauucauucguaaauccgacgaacuccuacacaacgugaaugcaggcaaaucgaccacuaacaucaugaucaccaccaucaucaucgucaucauagucauccuccugucccuuaucgccgucggucuuuuauuauacugcaaagcccgcagcacccccgucacccucucuaaggaccaacucagcggcaucaauaacaucgcauucucuaacuaaggacuagucccuguucccagagcccacuuuuuuuucuuuuuuugaaauaaaauagccugucuuucagaucuaaaaaaaaaaaaaaaaaaaaaaaaaaaaaaaaaaaaaaaaaaaaaaaaaaaaaaaaaaaaaaaaugcaucccccccccccccccccccccccccccccccaaaggcucuuuucagagccaccagaauu

SEQ ID NO: 923 - RNA, 2098 nt, Artificial Sequence
  mRNA product Design a-3 comprising derived and/or modified sequence from HRSV(A2)__F0_DSCav1 (opt1)
gggagagggcgcuuggcuugcaaggacccugagcugcggcauugaagcacacccaacccaacucgacugaagucagccucacugaaccggaucugagaaucuucucucucugggcuugccagggcucuccgaaccuagcuagcauccucuucaauuccaacuagaaagcuuaccauggagcugcucauccugaaggccaacgccaucaccaccauccugacggcggugaccuucugcuucgccagcggccagaacaucaccgaggaguucuaccaguccacgugcagcgccgucuccaagggguaccucagcgcccugcggaccggcugguacaccuccgugaucaccaucgagcugagcaacaucaaggagaacaagugcaacgggaccgacgccaaggugaagcucaucaagcaggagcuggacaaguacaagaacgcggucacggagcugcagcuccugaugcaguccaccccggcaaccaacaaccgcgcccggcgcgagcugccccgguucaugaacuacacccucaacaacgccaagaagacgaacgugacccugagcaagaagcgcaagcggcgcuuccugggcuuccuccugggggugggcuccgccaucgcgagcggcgucgccgugugcaaggugcugcaccucgagggggaggucaacaagaucaagagcgcccugcuguccaccaacaaggccguggugagccucuccaacggcgucagcgugcugaccuucaaggugcuggaccucaagaacuacaucgacaagcagcugcugcccauccugaacaagcagagcugcuccaucagcaacaucgagacggugaucgaguuccagcagaagaacaaccggcuccuggagaucacccgcgaguucagcgugaacgccggggucaccacccccguguccacguacaugcugaccaacagcgagcuccugucccugaucaacgacaugccgaucaccaacgaccagaagaagcucaugagcaacaacgugcagaucguccggcagcaguccuacagcaucaugugcaucaucaaggaggaggugcuggcguacgugguccagcugccccucuacggcgugaucgacacccccugcuggaagcugcacacgagcccccugugcaccaccaacaccaaggagggguccaacaucugccucacgcgcaccgaccggggcugguacugcgacaacgccggcagcgucuccuucuucccgcaggccgagaccugcaaggugcagagcaaccgcguguucugcgacaccaugaacucccugacgcugcccagcgagguaaaccucugcaacgucgacaucuucaaccccaaguacgacugcaagaucaugaccuccaagaccgacgugagcuccagcgugaucaccucccugggggccaucgucagcugcuacggcaagacgaagugcaccgccagcaacaagaaccgggggaucaucaagaccuucuccaacggcugcgacuacgugagcaacaagggcguggacaccguguccgucgggaacacccuguacuacgugaacaagcaggagggcaagagccucuacgugaagggggagcccaucaucaacuucuacgacccgcuggucuuccccuccgacgaguucgacgcgagcaucucccaggugaacgagaagaucaaccagagccuggccuucauccgcaaguccgacgagcugcuccacaacgugaacgccggcaagagcacgaccaacaucaugaucaccaccaucaucaucgucaucaucgugauccugcugucccucaucgccguggggcugcugcucuacugcaaggcccggagcacgcccgucacccuguccaaggaccagcugagcggcaucaacaacaucgcguucuccaacugaggacuagucccuguucccagagcccacuuuuuuuucuuuuuuugaaauaaaauagccugucuuucagaucuaaaaaaaaaaaaaaaaaaaaaaaaaaaaaaaaaaaaaaaaaaaaaaaaaaaaaaaaaaaaaaaaugcaucccccccccccccccccccccccccccccccaaaggcucuuuucagagccaccagaauu

SEQ ID NO: 924 - RNA, 2098 nt, Artificial Sequence
  mRNA product Design a-3 comprising derived and/or modified sequence from HRSV(A2)__F0_DSCav1 (opt1)
gggagagggcgcuuggcuugcaaggacccugagcugcggcauugaagcacacccaacccaacucgacugaagucagccucacugaaccggaucugagaaucuucucucucugggcuugccagggcucuccgaaccuagcuagcauccucuucaauuccaacuagaaagcuuaccauggagcugcucauccugaaggccaacgccaucaccaccauccugacggcggugaccuucugcuucgccagcggccagaacaucaccgaggaguucuaccaguccacgugcagcgccgucuccaagggguaccucagcgcccugcgcaccggcugguacaccuccgugaucaccaucgagcugagcaacaucaaggagaacaagugcaacgggaccgacgccaaggugaagcucaucaagcaggagcuggacaaguacaagaacgcggucacggagcugcagcuccugaugcaguccacccccgccaccaacaaccgggcccgccgggagcugccgcgcuucaugaacuacacccucaacaacgccaagaagacgaacgugacccugagcaagaagcggaagcgccgguuccugggcuuccuccugggggugggcuccgcgaucgccagcggcgucgccgugugcaaggugcugcaccucgagggggaggucaacaagaucaaguccgcccugcugagcaccaacaaggccguggugucccucagcaacggcgucuccgugcugaccuucaaggugcuggaccucaagaacuacaucgacaagcagcugcugcccauccucaacaagcagagcugcuccaucagcaacaucgagacggucaucgaguuccagcagaagaacaaccgccugcuggagaucacccgggaguucuccgugaacgcgggggugaccacccccgucagcacguacaugcucaccaacagcgagcugcugucccucaucaacgacaugcccaucaccaacgaccagaagaagcugaugagcaacaacgugcagaucgugcgccagcaguccuacagcaucaugugcaucaucaaggaggagguccuggccuacguggugcagcucccgcuguacggcgucaucgacacccccugcuggaagcugcacacgagcccccucugcaccaccaacaccaaggaggggagcaacaucugccugacgcggaccgaccgcggcugguacugcgacaacgccggcuccgugagcuucuucccccaggccgagaccugcaagguccaguccaaccggguguucugcgacaccaugaacagccugacgcucccguccgaggugaaccugugcaacgucgacaucuucaaccccaaguacgacugcaagaucaugaccagcaagaccgacguguccagcuccgugaucaccagccugggggccaucgucuccugcuacggcaagacgaagugcaccgcgagcaacaagaaccgcgggaucaucaagaccuucuccaacggcugcgacuacgugagcaacaagggcguggacaccgucagcguggggaacacccucuacuacgugaacaagcaggagggcaagucccuguacgucaagggggagcccaucaucaacuucuacgacccccugguguucccgagcgacgaguucgacgccuccaucagccaggugaacgagaagaucaaccagucccucgccuucauccggaaguccgacgagcugcugcacaacgucaacgccggcaaguccacgaccaacaucaugaucaccaccaucaucaucgugaucaucgugauccugcucagccugaucgccgucgggcugcuccuguacugcaaggcgcgcuccacgcccgugacccugagcaaggaccagcucuccggcaucaacaacaucgccuucagcaacugaggacuagucccuguucccagagcccacuuuuuuuucuuuuuuugaaauaaaauagccugucuuucagaucuaaaaaaaaaaaaaaaaaaaaaaaaaaaaaaaaaaaaaaaaaaaaaaaaaaaaaaaaaaaaaaaaugcaucccccccccccccccccccccccccccccccaaaggcucuuuucagagccaccagaauu

SEQ ID NO: 925 - RNA, 2098 nt, Artificial Sequence
  mRNA product Design a-3 comprising derived and/or modified sequence from HRSV(A2)__F0_DSCav1 (opt2)
gggagagggcgcuuggcuugcaaggacccugagcugcggcauugaagcacacccaacccaacucgacugaagucagccucacugaaccggaucugagaaucuucucucucugggcuugccagggcucuccgaaccuagcuagcauccucuucaauuccaacuagaaagcuuaccauggagcuccucauccucaaggccaacgccaucaccaccauccucaccgccgucaccuucugcuucgccuccggccagaacaucaccgaggaguucuaccaguccaccugcuccgccgucuccaagggcuaccucuccgcccuccgcaccggcugguacaccuccgucaucaccaucgagcucuccaacaucaaggagaacaagugcaacggcaccgacgccaaggucaagcucaucaagcaggagcucgacaaguacaagaacgccgucaccgagcuccagcuccucaugcaguccacccccgccaccaacaaccgcgcccgccgcgagcucccccgcuucaugaacuacacccucaacaacgccaagaagaccaacgucacccucuccaagaagcgcaagcgccgcuuccucggcuuccuccucggcgucggcuccgccaucgccuccggcgucgccgucugcaagguccuccaccucgagggcgaggucaacaagaucaaguccgcccuccucuccaccaacaaggccgucgucucccucuccaacggcgucuccguccucaccuucaagguccucgaccucaagaacuacaucgacaagcagcuccuccccauccucaacaagcaguccugcuccaucuccaacaucgagaccgucaucgaguuccagcagaagaacaaccgccuccucgagaucacccgcgaguucuccgucaacgccggcgucaccacccccgucuccaccuacaugcucaccaacuccgagcuccucucccucaucaacgacaugcccaucaccaacgaccagaagaagcucauguccaacaacguccagaucguccgccagcaguccuacuccaucaugugcaucaucaaggaggagguccucgccuacgucguccagcucccccucuacggcgucaucgacacccccugcuggaagcuccacaccuccccccucugcaccaccaacaccaaggagggcuccaacaucugccucacccgcaccgaccgcggcugguacugcgacaacgccggcuccgucuccuucuucccccaggccgagaccugcaagguccaguccaaccgcgucuucugcgacaccaugaacucccucacccuccccuccgaggucaaccucugcaacgucgacaucuucaaccccaaguacgacugcaagaucaugaccuccaagaccgacgucuccuccuccgucaucaccucccucggcgccaucgucuccugcuacggcaagaccaagugcaccgccuccaacaagaaccgcggcaucaucaagaccuucuccaacggcugcgacuacgucuccaacaagggcgucgacaccgucuccgucggcaacacccucuacuacgucaacaagcaggagggcaagucccucuacgucaagggcgagcccaucaucaacuucuacgacccccucgucuuccccuccgacgaguucgacgccuccaucucccaggucaacgagaagaucaaccagucccucgccuucauccgcaaguccgacgagcuccuccacaacgucaacgccggcaaguccaccaccaacaucaugaucaccaccaucaucaucgucaucaucgucauccuccucucccucaucgccgucggccuccuccucuacugcaaggcccgcuccacccccgucacccucuccaaggaccagcucuccggcaucaacaacaucgccuucuccaacugaggacuagucccuguucccagagcccacuuuuuuuucuuuuuuugaaauaaaauagccugucuuucagaucuaaaaaaaaaaaaaaaaaaaaaaaaaaaaaaaaaaaaaaaaaaaaaaaaaaaaaaaaaaaaaaaaugcaucccccccccccccccccccccccccccccccaaaggcucuuuucagagccaccagaauu

SEQ ID NO: 926 - RNA, 2098 nt, Artificial Sequence
  mRNA product Design a-3 comprising derived and/or modified sequence from HRSV(A2)__F0_DSCav1 (opt3)
gggagagggcgcuuggcuugcaaggacccugagcugcggcauugaagcacacccaacccaacucgacugaagucagccucacugaaccggaucugagaaucuucucucucugggcuugccagggcucuccgaaccuagcuagcauccucuucaauuccaacuagaaagcuuaccauggagcugcucauccuuaaggccaacgcuauuaccacaauacugacugcagugacguucugcuuugccagcggccagaauaucaccgaagaguucuaccaauccacauguucugcggucucaaaaggguauuugagugcuuuaagaacuggaugguacaccagcguuauuacaaucgaacuguccaacauuaaggagaauaaaugcaacgguaccgacgccaaggugaaacuaaucaagcaggaacucgauaaguauaaaaaugcaguaacugagcugcagcuucugaugcagucuacacccgccaccaacaauagggcucggcgcgaguugccucgauuuaugaacuacacgcucaauaacgcaaagaaaacuaaugugacccugucgaagaaacguaagagaagguuccugggcuuucucuuaggggucggaucagccauagcuagcggcguggccguuuguaaggugcugcaccuugaaggugaggucaacaaaaucaagagugcguugcuguccacaaauaaagcagugguaucucuaagcaacgggguuuccgugcucacuuucaagguccuggaccuuaaaaauuauauugauaagcaacuguugccaauccucaacaaacagucaugcaguauuagcaacaucgaaaccgugauagaguuucagcagaagaauaaccggcuguuagagauuacacgcgaguucucugugaaugccggagucaccacgccgguuuccacuuacaugcugacaaacucagaacuccuuagccugaucaaugacaugcccauuaccaacgaucaaaagaaauugaugaguaauaacgugcagaucguaagacagcagucuuauuccaucauguguauuauaaaggaagaggugcuagcuuacgucgugcaacugccucucuacggcguuaucgacacuccaugcuggaaacugcauacaagcccccuuuguaccacgaauaccaaggaaggcucgaacauuugccugacaaggacugaucgggggugguauugugacaaugccggaucuguguccuuuuucccucaggcagagaccugcaaaguccagucaaaccgcguguuuugugauacaaugaauaguuugacucucccaagcgagguaaaccugugcaauguugacaucuucaaccccaaguacgauugcaagauaaugaccuccaaaacagacgugucuagcucagucauuaccaguuuaggugcuaucguguccuguuauggcaagacuaaaugcacggccagcaacaagaaucgagggaucauuaaaacauuuucuaacggaugugauuacgucucaaauaagggcguggacaccguuaguguggguaacacucuguauuacguaaauaagcaagaagggaaaagccuauaugucaagggagagccuaucauuaacuucuacgacccacucguguucccguccgaugaauuugacgcgucuauaucgcagguuaaugagaaaaucaaccagagccuggccuucauuagaaaguccgaugaacuuuugcacaaugugaacgcaggcaaaucaaccacaaauaucaugaucaccacuauuauaaucgucauuaucgugauucugcucagucugaucgcuguaggccuucuguuguacugcaaggccaggucuacacccgugacgcucagcaaggaccagcuguccgggauaaacaauaucgcuuuuucaaacugaggacuagucccuguucccagagcccacuuuuuuuucuuuuuuugaaauaaaauagccugucuuucagaucuaaaaaaaaaaaaaaaaaaaaaaaaaaaaaaaaaaaaaaaaaaaaaaaaaaaaaaaaaaaaaaaaugcaucccccccccccccccccccccccccccccccaaaggcucuuuucagagccaccagaauu

SEQ ID NO: 927 - RNA, 2098 nt, Artificial Sequence
  mRNA product Design a-3 comprising derived and/or modified sequence from HRSV(A2)__F0_DSCav1 (opt4)
gggagagggcgcuuggcuugcaaggacccugagcugcggcauugaagcacacccaacccaacucgacugaagucagccucacugaaccggaucugagaaucuucucucucugggcuugccagggcucuccgaaccuagcuagcauccucuucaauuccaacuagaaagcuuaccauggagcugcugauccugaaggccaacgccaucaccaccauccugaccgccgugaccuucugcuucgccagcggccagaacaucaccgaggaguucuaccagagcaccugcagcgccgugagcaagggcuaccugagcgcccugagaaccggcugguacaccagcgugaucaccaucgagcugagcaacaucaaggagaacaagugcaacggcaccgacgccaaggugaagcugaucaagcaggagcuggacaaguacaagaacgccgugaccgagcugcagcugcugaugcagagcacccccgccaccaacaacagagccagaagagagcugcccagauucaugaacuacacccugaacaacgccaagaagaccaacgugacccugagcaagaagagaaagagaagauuccugggcuuccugcugggcgugggcagcgccaucgccagcggcguggccgugugcaaggugcugcaccuggagggcgaggugaacaagaucaagagcgcccugcugagcaccaacaaggccguggugagccugagcaacggcgugagcgugcugaccuucaaggugcuggaccugaagaacuacaucgacaagcagcugcugcccauccugaacaagcagagcugcagcaucagcaacaucgagaccgugaucgaguuccagcagaagaacaacagacugcuggagaucaccagagaguucagcgugaacgccggcgugaccacccccgugagcaccuacaugcugaccaacagcgagcugcugagccugaucaacgacaugcccaucaccaacgaccagaagaagcugaugagcaacaacgugcagaucgugagacagcagagcuacagcaucaugugcaucaucaaggaggaggugcuggccuacguggugcagcugccccuguacggcgugaucgacacccccugcuggaagcugcacaccagcccccugugcaccaccaacaccaaggagggcagcaacaucugccugaccagaaccgacagaggcugguacugcgacaacgccggcagcgugagcuucuucccccaggccgagaccugcaaggugcagagcaacagaguguucugcgacaccaugaacagccugacccugcccagcgaggugaaccugugcaacguggacaucuucaaccccaaguacgacugcaagaucaugaccagcaagaccgacgugagcagcagcgugaucaccagccugggcgccaucgugagcugcuacggcaagaccaagugcaccgccagcaacaagaacagaggcaucaucaagaccuucagcaacggcugcgacuacgugagcaacaagggcguggacaccgugagcgugggcaacacccuguacuacgugaacaagcaggagggcaagagccuguacgugaagggcgagcccaucaucaacuucuacgacccccugguguuccccagcgacgaguucgacgccagcaucagccaggugaacgagaagaucaaccagagccuggccuucaucagaaagagcgacgagcugcugcacaacgugaacgccggcaagagcaccaccaacaucaugaucaccaccaucaucaucgugaucaucgugauccugcugagccugaucgccgugggccugcugcuguacugcaaggccagaagcacccccgugacccugagcaaggaccagcugagcggcaucaacaacaucgccuucagcaacugaggacuagucccuguucccagagcccacuuuuuuuucuuuuuuugaaauaaaauagccugucuuucagaucuaaaaaaaaaaaaaaaaaaaaaaaaaaaaaaaaaaaaaaaaaaaaaaaaaaaaaaaaaaaaaaaaugcaucccccccccccccccccccccccccccccccaaaggcucuuuucagagccaccagaauu

SEQ ID NO: 928 - RNA, 2098 nt, Artificial Sequence
  mRNA product Design a-3 comprising derived and/or modified sequence from HRSV(A2)__F0_DSCav1 (opt5)
gggagagggcgcuuggcuugcaaggacccugagcugcggcauugaagcacacccaacccaacucgacugaagucagccucacugaaccggaucugagaaucuucucucucugggcuugccagggcucuccgaaccuagcuagcauccucuucaauuccaacuagaaagcuuaccauggagcugcucauccugaaggccaacgcuauuaccacaauccuuacggccgugaccuucugcuuugcgagcggccagaauauuacagaagaguucuaccaauccaccuguucugcugucagcaaaggguaucuguccgcccucagaacaggaugguacaccucuguuaucacaauugaacugagcaacaucaaggagaauaaaugcaacggcaccgacgccaaggugaaacuuaucaagcaggaacuggauaaguauaaaaaugcugugacggagcuccagcugcugaugcaguccacccccgccacaaacaaucgggcucgcagagagcucccucgguuuaugaacuacacccugaauaacgccaagaaaacaaaugucacccuuucuaagaaacgcaagagacgguuccugggguuucuccugggagugggcagcgcgauugccuccgggguugcuguguguaagguccuucaccuggaaggagaggugaacaaaaucaagagcgcccuccugucuacgaauaaagcuguugugucccugagcaacggcgucucugugcucacauucaaggugcuggaccuuaaaaauuauauugauaagcaacugcucccgauccugaacaaacaguccugcagcauuucuaacaucgaaaccgucauugaguuucagcagaagaauaaccgccuucuggagaucacaagagaauuuuccguuaaugccggcgugaccacccccgugagcacauacaugcucacgaacuccgagcugcugucucucaucaaugacaugccuauuaccaacgaucaaaagaaacugaugagcaauaacguccagaucgugcggcagcaguccuauagcauuauguguaucauuaaggaagagguucuugcguacgugguccaacugccccucuacggggugaucgacacaccuugcuggaaacugcauaccucuccccuuuguacaaccaauacgaaggaaggauccaacaucugccugacacgcaccgauagaggcugguauugugacaaugccgggagcguuucuuucuucccucaggcugagaccugcaaagugcagagcaaccgggucuuuugugauacaaugaacucccucacccugccgucugaggugaaucugugcaaugucgacauuuucaaccccaaguacgauugcaagaucaugacaagcaaaacggacguguccagcucuguuauuaccucccucggagccaucgugagcuguuauggcaagacaaaaugcaccgcuucuaacaagaaucgcgggauuaucaaaacauuuuccaacggaugugauuacgucagcaauaagggcguggacaccguuuccgugggcaacacgcuguauuacgucaauaagcaagaagggaaaucucuuuaugugaagggagagccuaucauuaacuucuacgacccccugguguucccuagcgaugaauuugacgccuccaucucucagguuaaugagaaaauuaaccagagccucgccuucaucagaaaguccgaugaacugcugcacaaugucaacgcuggcaaaagcaccacaaauauuaugaucaccacaauuaucaucgugauuaucgugauucuucucucucugaucgcggucgggcugcuccuguacugcaaggcccgguccacccccgugacgcuuagcaaggaccagcugucuggaauuaacaauaucgcuuuuuccaacugaggacuagucccuguucccagagcccacuuuuuuuucuuuuuuugaaauaaaauagccugucuuucagaucuaaaaaaaaaaaaaaaaaaaaaaaaaaaaaaaaaaaaaaaaaaaaaaaaaaaaaaaaaaaaaaaaugcaucccccccccccccccccccccccccccccccaaaggcucuuuucagagccaccagaauu

SEQ ID NO: 929 - RNA, 2098 nt, Artificial Sequence
  mRNA product Design a-3 comprising derived and/or modified sequence from HRSV(A2)__F0_DSCav1 (opt6)
gggagagggcgcuuggcuugcaaggacccugagcugcggcauugaagcacacccaacccaacucgacugaagucagccucacugaaccggaucugagaaucuucucucucugggcuugccagggcucuccgaaccuagcuagcauccucuucaauuccaacuagaaagcuuaccauggaauuauuaauccucaaagcgaacgcuauuacuaccauucuaacagcagucacauucugcuucgccucaggccaaaacauuacagaagaauuuuaccaaucaacaugcucugccguaucaaaaggcuaccuauccgcccuacgaacaggcugguacacaagcguaauaacaaucgaacuaucaaacauaaaagaaaacaaaugcaacgguacagacgccaaaguuaaacuaauaaaacaagaacucgauaaauacaaaaacgcaguaacagaauuacaacuacuaaugcaaucaacaccugcaacaaacaauagagccaggagagaauuaccucgauucaugaauuacacacucaauaacgcaaaaaaaaccaacguuacacuaucaaaaaaaagaaaacgacgauucuuaggauuccuacucggagucggaucagcaauagcaucuggcguugcaguaugcaaaguauuacacuuagaaggugaagucaauaaaauaaaaagcgcgcuacuaaguacaaacaaagcagucgucucccuaucaaacggagucucaguccuaacauucaaaguacucgaccuaaaaaauuacauagauaaacaacuacuuccaauauuaaacaaacaauccuguagcaucagcaauauagaaacaguaauagaauuucaacaaaaaaacaaccgauuauuagaaaucacucgagaauuuuccguaaacgccgggguaacaacuccagucucaaccuacaugcuaaccaauucagaacuauugagcuuaauaaacgacaugccaauaaccaacgaccaaaaaaaacuaaugucuaacaauguucaaaucgucagacaacaaaguuacaguauaauguguauaaucaaagaagaaguccuagcauacguaguccaacucccacuauauggaguuaucgacacaccauguuggaaauuacacaccucaccauuaugcacaaccaauacaaaagaaggaucaaacauaugccuuacacggacagaccgcggaugguauugugacaacgcuggcucagucuccuuuuucccacaagcagaaacaugcaaaguacaaucaaacagagucuuuugcgauaccaugaacucacuuacauuaccaagcgaaguaaaucuuuguaacgucgacaucuucaauccuaaauaugacugcaaaaucaugaccucaaaaacagacguuagcucuucaguaaucacuagcuuaggagcaaucguaucaugcuacggcaaaacaaaauguacagcaucaaauaaaaacagaggaaucauaaaaacauuuucaaacggaugcgauuauguaagcaacaaaggaguagauacuguaagcguaggaaacacauuguacuauguaaacaaacaagaaggaaaaucacucuauguaaaaggagaaccuauaaucaauuucuacgauccauuaguguucccaucagaugaauuugacgccucaauaucacaaguuaaugaaaaaauaaaucaaucgcuagcauucauacguaaaucagaugaauuacuacauaacguaaacgcaggcaaauccacaacaaauaucaugaucacaacaauuauaauaguaauaauaguaauacuacuaucacuaauagccguaggacuccuacuauacugcaaagcaagaucuacuccaguaacccucucaaaagaucaacuaagcggaauuaauaacaucgcauucagcaacuaaggacuagucccuguucccagagcccacuuuuuuuucuuuuuuugaaauaaaauagccugucuuucagaucuaaaaaaaaaaaaaaaaaaaaaaaaaaaaaaaaaaaaaaaaaaaaaaaaaaaaaaaaaaaaaaaaugcaucccccccccccccccccccccccccccccccaaaggcucuuuucagagccaccagaauu

SEQ ID NO: 930 - RNA, 2098 nt, Artificial Sequence
  mRNA product Design a-3 comprising derived and/or modified sequence from HRSV(A2)__F0_DSCav1 (opt11)
gggagagggcgcuuggcuugcaaggacccugagcugcggcauugaagcacacccaacccaacucgacugaagucagccucacugaaccggaucugagaaucuucucucucugggcuugccagggcucuccgaaccuagcuagcauccucuucaauuccaacuagaaagcuuaccauggaacuacuuauccucaaagccaacgccaucaccaccauccucacagcaguaaccuuuugcuucgccucaggccaaaauaucacagaagaauuuuaccagaguaccugcuccgccguauccaaaggauaccucagcgcgcuccgcaccggcugguacacuucaguaaucacaaucgaacuauccaacaucaaagaaaacaaaugcaacggcaccgacgcgaaagucaaacucaucaaacaagaacuagacaaauacaaaaaugccguaacagaacuacaacuguuaaugcagagcacacccgccaccaacaaccgcgcccgccgggaacucccccgauucaugaacuacacacucaacaacgccaaaaagacgaacgucacccucagcaagaaacgaaaacgcagauuccucgguuuccuacuaggcguaggcucagcaauagccuccggaguagccgucugcaaaguccugcacuuagaaggcgaagucaacaaaaucaaauccgcccuacucuccacgaacaaagccgucgucucccuguccaacggugucuccguuuuaaccuucaaaguucuggaccucaaaaacuacauagacaaacagcuucuccccauccucaacaaacaauccuguagcaucuccaacaucgaaaccgucauagaauuucaacagaaaaacaacagacugcucgaaaucacccgcgaguucuccgucaacgccggcgucacgacucccgucuccaccuauaugcucacgaacucggaacuccuuucccuaaucaacgacaugccgaucaccaacgaccaaaagaaacucaugucaaacaacguacaaauuguccgccaacaaucauacuccaucaugugcauaauuaaagaagaaguccucgcauacguaguccaacucccccucuacggcgucaucgacacccccugcuggaaacuccacaccuccccacucugcacaaccaacaccaaagaaggcucaaacauaugccuaacgcgcaccgaucgcgguugguacugcgacaacgccgguuccgucagcuucuucccccaagcagagacaugcaaaguccaaucaaaccgcgucuucugcgacaccaugaacucacuaacccuuccaagcgaagucaaccucugcaacguugacaucuucaaccccaaauacgacuguaaaaucaugaccuccaagaccgacguauccucuuccgucaucacaucccuaggcgcuaucguauccugcuaugguaaaaccaaaugcaccgccuccaacaaaaaccgcggcaucaucaagacauuuuccaacggcugcgacuacgugagcaacaaaggcgucgacaccgucuccguaggcaacacccucuacuauguaaacaaacaagagggcaaaucacucuacgucaaaggggaacccaucaucaacuucuacgacccgcucguauuccccagcgaugaguucgacgccuccaucucccaggucaacgaaaagauaaaccaaucacucgcauucauucguaaauccgacgaacuccuacacaacgugaaugcaggcaaaucgaccacuaacaucaugaucaccaccaucaucaucgucaucauagucauccuccugucccuuaucgccgucggucuuuuauuauacugcaaagcccgcagcacccccgucacccucucuaaggaccaacucagcggcaucaauaacaucgcauucucuaacuaaggacuagucccuguucccagagcccacuuuuuuuucuuuuuuugaaauaaaauagccugucuuucagaucuaaaaaaaaaaaaaaaaaaaaaaaaaaaaaaaaaaaaaaaaaaaaaaaaaaaaaaaaaaaaaaaaugcaucccccccccccccccccccccccccccccccaaaggcucuuuucagagccaccagaauu

SEQ ID NO: 931 - RNA, 2047 nt, Artificial Sequence
  mRNA product Design a-4 comprising derived and/or modified sequence from HRSV(A2)__F0_DSCav1 (opt1)
gggagacuccugucgggcggaaguaggaggaguagaguuuaaaaacaguacucuuuuuccgguucgggacguaguugaagcaacgacaagccggauaaccgcucuugagacaggaagcuuaccauggagcugcucauccugaaggccaacgccaucaccaccauccugacggcggugaccuucugcuucgccagcggccagaacaucaccgaggaguucuaccaguccacgugcagcgccgucuccaagggguaccucagcgcccugcggaccggcugguacaccuccgugaucaccaucgagcugagcaacaucaaggagaacaagugcaacgggaccgacgccaaggugaagcucaucaagcaggagcuggacaaguacaagaacgcggucacggagcugcagcuccugaugcaguccaccccggcaaccaacaaccgcgcccggcgcgagcugccccgguucaugaacuacacccucaacaacgccaagaagacgaacgugacccugagcaagaagcgcaagcggcgcuuccugggcuuccuccugggggugggcuccgccaucgcgagcggcgucgccgugugcaaggugcugcaccucgagggggaggucaacaagaucaagagcgcccugcuguccaccaacaaggccguggugagccucuccaacggcgucagcgugcugaccuucaaggugcuggaccucaagaacuacaucgacaagcagcugcugcccauccugaacaagcagagcugcuccaucagcaacaucgagacggugaucgaguuccagcagaagaacaaccggcuccuggagaucacccgcgaguucagcgugaacgccggggucaccacccccguguccacguacaugcugaccaacagcgagcuccugucccugaucaacgacaugccgaucaccaacgaccagaagaagcucaugagcaacaacgugcagaucguccggcagcaguccuacagcaucaugugcaucaucaaggaggaggugcuggcguacgugguccagcugccccucuacggcgugaucgacacccccugcuggaagcugcacacgagcccccugugcaccaccaacaccaaggagggguccaacaucugccucacgcgcaccgaccggggcugguacugcgacaacgccggcagcgucuccuucuucccgcaggccgagaccugcaaggugcagagcaaccgcguguucugcgacaccaugaacucccugacgcugcccagcgagguaaaccucugcaacgucgacaucuucaaccccaaguacgacugcaagaucaugaccuccaagaccgacgugagcuccagcgugaucaccucccugggggccaucgucagcugcuacggcaagacgaagugcaccgccagcaacaagaaccgggggaucaucaagaccuucuccaacggcugcgacuacgugagcaacaagggcguggacaccguguccgucgggaacacccuguacuacgugaacaagcaggagggcaagagccucuacgugaagggggagcccaucaucaacuucuacgacccgcuggucuuccccuccgacgaguucgacgcgagcaucucccaggugaacgagaagaucaaccagagccuggccuucauccgcaaguccgacgagcugcuccacaacgugaacgccggcaagagcacgaccaacaucaugaucaccaccaucaucaucgucaucaucgugauccugcugucccucaucgccguggggcugcugcucuacugcaaggcccggagcacgcccgucacccuguccaaggaccagcugagcggcaucaacaacaucgcguucuccaacugaggacuagucccuguucccagagcccacuuuuuuuucuuuuuuugaaauaaaauagccugucuuucagaucuaaaaaaaaaaaaaaaaaaaaaaaaaaaaaaaaaaaaaaaaaaaaaaaaaaaaaaaaaaaaaaaaugcaucccccccccccccccccccccccccccccccaaaggcucuuuucagagccaccagaauu

SEQ ID NO: 932 - RNA, 2047 nt, Artificial Sequence
  mRNA product Design a-4 comprising derived and/or modified sequence from HRSV(A2)__F0_DSCav1 (opt1)
gggagacuccugucgggcggaaguaggaggaguagaguuuaaaaacaguacucuuuuuccgguucgggacguaguugaagcaacgacaagccggauaaccgcucuugagacaggaagcuuaccauggagcugcucauccugaaggccaacgccaucaccaccauccugacggcggugaccuucugcuucgccagcggccagaacaucaccgaggaguucuaccaguccacgugcagcgccgucuccaagggguaccucagcgcccugcgcaccggcugguacaccuccgugaucaccaucgagcugagcaacaucaaggagaacaagugcaacgggaccgacgccaaggugaagcucaucaagcaggagcuggacaaguacaagaacgcggucacggagcugcagcuccugaugcaguccacccccgccaccaacaaccgggcccgccgggagcugccgcgcuucaugaacuacacccucaacaacgccaagaagacgaacgugacccugagcaagaagcggaagcgccgguuccugggcuuccuccugggggugggcuccgcgaucgccagcggcgucgccgugugcaaggugcugcaccucgagggggaggucaacaagaucaaguccgcccugcugagcaccaacaaggccguggugucccucagcaacggcgucuccgugcugaccuucaaggugcuggaccucaagaacuacaucgacaagcagcugcugcccauccucaacaagcagagcugcuccaucagcaacaucgagacggucaucgaguuccagcagaagaacaaccgccugcuggagaucacccgggaguucuccgugaacgcgggggugaccacccccgucagcacguacaugcucaccaacagcgagcugcugucccucaucaacgacaugcccaucaccaacgaccagaagaagcugaugagcaacaacgugcagaucgugcgccagcaguccuacagcaucaugugcaucaucaaggaggagguccuggccuacguggugcagcucccgcuguacggcgucaucgacacccccugcuggaagcugcacacgagcccccucugcaccaccaacaccaaggaggggagcaacaucugccugacgcggaccgaccgcggcugguacugcgacaacgccggcuccgugagcuucuucccccaggccgagaccugcaagguccaguccaaccggguguucugcgacaccaugaacagccugacgcucccguccgaggugaaccugugcaacgucgacaucuucaaccccaaguacgacugcaagaucaugaccagcaagaccgacguguccagcuccgugaucaccagccugggggccaucgucuccugcuacggcaagacgaagugcaccgcgagcaacaagaaccgcgggaucaucaagaccuucuccaacggcugcgacuacgugagcaacaagggcguggacaccgucagcguggggaacacccucuacuacgugaacaagcaggagggcaagucccuguacgucaagggggagcccaucaucaacuucuacgacccccugguguucccgagcgacgaguucgacgccuccaucagccaggugaacgagaagaucaaccagucccucgccuucauccggaaguccgacgagcugcugcacaacgucaacgccggcaaguccacgaccaacaucaugaucaccaccaucaucaucgugaucaucgugauccugcucagccugaucgccgucgggcugcuccuguacugcaaggcgcgcuccacgcccgugacccugagcaaggaccagcucuccggcaucaacaacaucgccuucagcaacugaggacuagucccuguucccagagcccacuuuuuuuucuuuuuuugaaauaaaauagccugucuuucagaucuaaaaaaaaaaaaaaaaaaaaaaaaaaaaaaaaaaaaaaaaaaaaaaaaaaaaaaaaaaaaaaaaugcaucccccccccccccccccccccccccccccccaaaggcucuuuucagagccaccagaauu

SEQ ID NO: 933 - RNA, 2047 nt, Artificial Sequence
  mRNA product Design a-4 comprising derived and/or modified sequence from HRSV(A2)__F0_DSCav1 (opt2)
gggagacuccugucgggcggaaguaggaggaguagaguuuaaaaacaguacucuuuuuccgguucgggacguaguugaagcaacgacaagccggauaaccgcucuugagacaggaagcuuaccauggagcuccucauccucaaggccaacgccaucaccaccauccucaccgccgucaccuucugcuucgccuccggccagaacaucaccgaggaguucuaccaguccaccugcuccgccgucuccaagggcuaccucuccgcccuccgcaccggcugguacaccuccgucaucaccaucgagcucuccaacaucaaggagaacaagugcaacggcaccgacgccaaggucaagcucaucaagcaggagcucgacaaguacaagaacgccgucaccgagcuccagcuccucaugcaguccacccccgccaccaacaaccgcgcccgccgcgagcucccccgcuucaugaacuacacccucaacaacgccaagaagaccaacgucacccucuccaagaagcgcaagcgccgcuuccucggcuuccuccucggcgucggcuccgccaucgccuccggcgucgccgucugcaagguccuccaccucgagggcgaggucaacaagaucaaguccgcccuccucuccaccaacaaggccgucgucucccucuccaacggcgucuccguccucaccuucaagguccucgaccucaagaacuacaucgacaagcagcuccuccccauccucaacaagcaguccugcuccaucuccaacaucgagaccgucaucgaguuccagcagaagaacaaccgccuccucgagaucacccgcgaguucuccgucaacgccggcgucaccacccccgucuccaccuacaugcucaccaacuccgagcuccucucccucaucaacgacaugcccaucaccaacgaccagaagaagcucauguccaacaacguccagaucguccgccagcaguccuacuccaucaugugcaucaucaaggaggagguccucgccuacgucguccagcucccccucuacggcgucaucgacacccccugcuggaagcuccacaccuccccccucugcaccaccaacaccaaggagggcuccaacaucugccucacccgcaccgaccgcggcugguacugcgacaacgccggcuccgucuccuucuucccccaggccgagaccugcaagguccaguccaaccgcgucuucugcgacaccaugaacucccucacccuccccuccgaggucaaccucugcaacgucgacaucuucaaccccaaguacgacugcaagaucaugaccuccaagaccgacgucuccuccuccgucaucaccucccucggcgccaucgucuccugcuacggcaagaccaagugcaccgccuccaacaagaaccgcggcaucaucaagaccuucuccaacggcugcgacuacgucuccaacaagggcgucgacaccgucuccgucggcaacacccucuacuacgucaacaagcaggagggcaagucccucuacgucaagggcgagcccaucaucaacuucuacgacccccucgucuuccccuccgacgaguucgacgccuccaucucccaggucaacgagaagaucaaccagucccucgccuucauccgcaaguccgacgagcuccuccacaacgucaacgccggcaaguccaccaccaacaucaugaucaccaccaucaucaucgucaucaucgucauccuccucucccucaucgccgucggccuccuccucuacugcaaggcccgcuccacccccgucacccucuccaaggaccagcucuccggcaucaacaacaucgccuucuccaacugaggacuagucccuguucccagagcccacuuuuuuuucuuuuuuugaaauaaaauagccugucuuucagaucuaaaaaaaaaaaaaaaaaaaaaaaaaaaaaaaaaaaaaaaaaaaaaaaaaaaaaaaaaaaaaaaaugcaucccccccccccccccccccccccccccccccaaaggcucuuuucagagccaccagaauu

SEQ ID NO: 934 - RNA, 2047 nt, Artificial Sequence
  mRNA product Design a-4 comprising derived and/or modified sequence from HRSV(A2)__F0_DSCav1 (opt3)
gggagacuccugucgggcggaaguaggaggaguagaguuuaaaaacaguacucuuuuuccgguucgggacguaguugaagcaacgacaagccggauaaccgcucuugagacaggaagcuuaccauggagcugcucauccuuaaggccaacgcuauuaccacaauacugacugcagugacguucugcuuugccagcggccagaauaucaccgaagaguucuaccaauccacauguucugcggucucaaaaggguauuugagugcuuuaagaacuggaugguacaccagcguuauuacaaucgaacuguccaacauuaaggagaauaaaugcaacgguaccgacgccaaggugaaacuaaucaagcaggaacucgauaaguauaaaaaugcaguaacugagcugcagcuucugaugcagucuacacccgccaccaacaauagggcucggcgcgaguugccucgauuuaugaacuacacgcucaauaacgcaaagaaaacuaaugugacccugucgaagaaacguaagagaagguuccugggcuuucucuuaggggucggaucagccauagcuagcggcguggccguuuguaaggugcugcaccuugaaggugaggucaacaaaaucaagagugcguugcuguccacaaauaaagcagugguaucucuaagcaacgggguuuccgugcucacuuucaagguccuggaccuuaaaaauuauauugauaagcaacuguugccaauccucaacaaacagucaugcaguauuagcaacaucgaaaccgugauagaguuucagcagaagaauaaccggcuguuagagauuacacgcgaguucucugugaaugccggagucaccacgccgguuuccacuuacaugcugacaaacucagaacuccuuagccugaucaaugacaugcccauuaccaacgaucaaaagaaauugaugaguaauaacgugcagaucguaagacagcagucuuauuccaucauguguauuauaaaggaagaggugcuagcuuacgucgugcaacugccucucuacggcguuaucgacacuccaugcuggaaacugcauacaagcccccuuuguaccacgaauaccaaggaaggcucgaacauuugccugacaaggacugaucgggggugguauugugacaaugccggaucuguguccuuuuucccucaggcagagaccugcaaaguccagucaaaccgcguguuuugugauacaaugaauaguuugacucucccaagcgagguaaaccugugcaauguugacaucuucaaccccaaguacgauugcaagauaaugaccuccaaaacagacgugucuagcucagucauuaccaguuuaggugcuaucguguccuguuauggcaagacuaaaugcacggccagcaacaagaaucgagggaucauuaaaacauuuucuaacggaugugauuacgucucaaauaagggcguggacaccguuaguguggguaacacucuguauuacguaaauaagcaagaagggaaaagccuauaugucaagggagagccuaucauuaacuucuacgacccacucguguucccguccgaugaauuugacgcgucuauaucgcagguuaaugagaaaaucaaccagagccuggccuucauuagaaaguccgaugaacuuuugcacaaugugaacgcaggcaaaucaaccacaaauaucaugaucaccacuauuauaaucgucauuaucgugauucugcucagucugaucgcuguaggccuucuguuguacugcaaggccaggucuacacccgugacgcucagcaaggaccagcuguccgggauaaacaauaucgcuuuuucaaacugaggacuagucccuguucccagagcccacuuuuuuuucuuuuuuugaaauaaaauagccugucuuucagaucuaaaaaaaaaaaaaaaaaaaaaaaaaaaaaaaaaaaaaaaaaaaaaaaaaaaaaaaaaaaaaaaaugcaucccccccccccccccccccccccccccccccaaaggcucuuuucagagccaccagaauu

SEQ ID NO: 935 - RNA, 2047 nt, Artificial Sequence
  mRNA product Design a-4 comprising derived and/or modified sequence from HRSV(A2)__F0_DSCav1 (opt4)
gggagacuccugucgggcggaaguaggaggaguagaguuuaaaaacaguacucuuuuuccgguucgggacguaguugaagcaacgacaagccggauaaccgcucuugagacaggaagcuuaccauggagcugcugauccugaaggccaacgccaucaccaccauccugaccgccgugaccuucugcuucgccagcggccagaacaucaccgaggaguucuaccagagcaccugcagcgccgugagcaagggcuaccugagcgcccugagaaccggcugguacaccagcgugaucaccaucgagcugagcaacaucaaggagaacaagugcaacggcaccgacgccaaggugaagcugaucaagcaggagcuggacaaguacaagaacgccgugaccgagcugcagcugcugaugcagagcacccccgccaccaacaacagagccagaagagagcugcccagauucaugaacuacacccugaacaacgccaagaagaccaacgugacccugagcaagaagagaaagagaagauuccugggcuuccugcugggcgugggcagcgccaucgccagcggcguggccgugugcaaggugcugcaccuggagggcgaggugaacaagaucaagagcgcccugcugagcaccaacaaggccguggugagccugagcaacggcgugagcgugcugaccuucaaggugcuggaccugaagaacuacaucgacaagcagcugcugcccauccugaacaagcagagcugcagcaucagcaacaucgagaccgugaucgaguuccagcagaagaacaacagacugcuggagaucaccagagaguucagcgugaacgccggcgugaccacccccgugagcaccuacaugcugaccaacagcgagcugcugagccugaucaacgacaugcccaucaccaacgaccagaagaagcugaugagcaacaacgugcagaucgugagacagcagagcuacagcaucaugugcaucaucaaggaggaggugcuggccuacguggugcagcugccccuguacggcgugaucgacacccccugcuggaagcugcacaccagcccccugugcaccaccaacaccaaggagggcagcaacaucugccugaccagaaccgacagaggcugguacugcgacaacgccggcagcgugagcuucuucccccaggccgagaccugcaaggugcagagcaacagaguguucugcgacaccaugaacagccugacccugcccagcgaggugaaccugugcaacguggacaucuucaaccccaaguacgacugcaagaucaugaccagcaagaccgacgugagcagcagcgugaucaccagccugggcgccaucgugagcugcuacggcaagaccaagugcaccgccagcaacaagaacagaggcaucaucaagaccuucagcaacggcugcgacuacgugagcaacaagggcguggacaccgugagcgugggcaacacccuguacuacgugaacaagcaggagggcaagagccuguacgugaagggcgagcccaucaucaacuucuacgacccccugguguuccccagcgacgaguucgacgccagcaucagccaggugaacgagaagaucaaccagagccuggccuucaucagaaagagcgacgagcugcugcacaacgugaacgccggcaagagcaccaccaacaucaugaucaccaccaucaucaucgugaucaucgugauccugcugagccugaucgccgugggccugcugcuguacugcaaggccagaagcacccccgugacccugagcaaggaccagcugagcggcaucaacaacaucgccuucagcaacugaggacuagucccuguucccagagcccacuuuuuuuucuuuuuuugaaauaaaauagccugucuuucagaucuaaaaaaaaaaaaaaaaaaaaaaaaaaaaaaaaaaaaaaaaaaaaaaaaaaaaaaaaaaaaaaaaugcaucccccccccccccccccccccccccccccccaaaggcucuuuucagagccaccagaauu

SEQ ID NO: 936 - RNA, 2047 nt, Artificial Sequence
  mRNA product Design a-4 comprising derived and/or modified sequence from HRSV(A2)__F0_DSCav1 (opt5)
gggagacuccugucgggcggaaguaggaggaguagaguuuaaaaacaguacucuuuuuccgguucgggacguaguugaagcaacgacaagccggauaaccgcucuugagacaggaagcuuaccauggagcugcucauccugaaggccaacgcuauuaccacaauccuuacggccgugaccuucugcuuugcgagcggccagaauauuacagaagaguucuaccaauccaccuguucugcugucagcaaaggguaucuguccgcccucagaacaggaugguacaccucuguuaucacaauugaacugagcaacaucaaggagaauaaaugcaacggcaccgacgccaaggugaaacuuaucaagcaggaacuggauaaguauaaaaaugcugugacggagcuccagcugcugaugcaguccacccccgccacaaacaaucgggcucgcagagagcucccucgguuuaugaacuacacccugaauaacgccaagaaaacaaaugucacccuuucuaagaaacgcaagagacgguuccugggguuucuccugggagugggcagcgcgauugccuccgggguugcuguguguaagguccuucaccuggaaggagaggugaacaaaaucaagagcgcccuccugucuacgaauaaagcuguugugucccugagcaacggcgucucugugcucacauucaaggugcuggaccuuaaaaauuauauugauaagcaacugcucccgauccugaacaaacaguccugcagcauuucuaacaucgaaaccgucauugaguuucagcagaagaauaaccgccuucuggagaucacaagagaauuuuccguuaaugccggcgugaccacccccgugagcacauacaugcucacgaacuccgagcugcugucucucaucaaugacaugccuauuaccaacgaucaaaagaaacugaugagcaauaacguccagaucgugcggcagcaguccuauagcauuauguguaucauuaaggaagagguucuugcguacgugguccaacugccccucuacggggugaucgacacaccuugcuggaaacugcauaccucuccccuuuguacaaccaauacgaaggaaggauccaacaucugccugacacgcaccgauagaggcugguauugugacaaugccgggagcguuucuuucuucccucaggcugagaccugcaaagugcagagcaaccgggucuuuugugauacaaugaacucccucacccugccgucugaggugaaucugugcaaugucgacauuuucaaccccaaguacgauugcaagaucaugacaagcaaaacggacguguccagcucuguuauuaccucccucggagccaucgugagcuguuauggcaagacaaaaugcaccgcuucuaacaagaaucgcgggauuaucaaaacauuuuccaacggaugugauuacgucagcaauaagggcguggacaccguuuccgugggcaacacgcuguauuacgucaauaagcaagaagggaaaucucuuuaugugaagggagagccuaucauuaacuucuacgacccccugguguucccuagcgaugaauuugacgccuccaucucucagguuaaugagaaaauuaaccagagccucgccuucaucagaaaguccgaugaacugcugcacaaugucaacgcuggcaaaagcaccacaaauauuaugaucaccacaauuaucaucgugauuaucgugauucuucucucucugaucgcggucgggcugcuccuguacugcaaggcccgguccacccccgugacgcuuagcaaggaccagcugucuggaauuaacaauaucgcuuuuuccaacugaggacuagucccuguucccagagcccacuuuuuuuucuuuuuuugaaauaaaauagccugucuuucagaucuaaaaaaaaaaaaaaaaaaaaaaaaaaaaaaaaaaaaaaaaaaaaaaaaaaaaaaaaaaaaaaaaugcaucccccccccccccccccccccccccccccccaaaggcucuuuucagagccaccagaauu

SEQ ID NO: 937 - RNA, 2047 nt, Artificial Sequence
  mRNA product Design a-4 comprising derived and/or modified sequence from HRSV(A2)__F0_DSCav1 (opt6)
gggagacuccugucgggcggaaguaggaggaguagaguuuaaaaacaguacucuuuuuccgguucgggacguaguugaagcaacgacaagccggauaaccgcucuugagacaggaagcuuaccauggaauuauuaauccucaaagcgaacgcuauuacuaccauucuaacagcagucacauucugcuucgccucaggccaaaacauuacagaagaauuuuaccaaucaacaugcucugccguaucaaaaggcuaccuauccgcccuacgaacaggcugguacacaagcguaauaacaaucgaacuaucaaacauaaaagaaaacaaaugcaacgguacagacgccaaaguuaaacuaauaaaacaagaacucgauaaauacaaaaacgcaguaacagaauuacaacuacuaaugcaaucaacaccugcaacaaacaauagagccaggagagaauuaccucgauucaugaauuacacacucaauaacgcaaaaaaaaccaacguuacacuaucaaaaaaaagaaaacgacgauucuuaggauuccuacucggagucggaucagcaauagcaucuggcguugcaguaugcaaaguauuacacuuagaaggugaagucaauaaaauaaaaagcgcgcuacuaaguacaaacaaagcagucgucucccuaucaaacggagucucaguccuaacauucaaaguacucgaccuaaaaaauuacauagauaaacaacuacuuccaauauuaaacaaacaauccuguagcaucagcaauauagaaacaguaauagaauuucaacaaaaaaacaaccgauuauuagaaaucacucgagaauuuuccguaaacgccgggguaacaacuccagucucaaccuacaugcuaaccaauucagaacuauugagcuuaauaaacgacaugccaauaaccaacgaccaaaaaaaacuaaugucuaacaauguucaaaucgucagacaacaaaguuacaguauaauguguauaaucaaagaagaaguccuagcauacguaguccaacucccacuauauggaguuaucgacacaccauguuggaaauuacacaccucaccauuaugcacaaccaauacaaaagaaggaucaaacauaugccuuacacggacagaccgcggaugguauugugacaacgcuggcucagucuccuuuuucccacaagcagaaacaugcaaaguacaaucaaacagagucuuuugcgauaccaugaacucacuuacauuaccaagcgaaguaaaucuuuguaacgucgacaucuucaauccuaaauaugacugcaaaaucaugaccucaaaaacagacguuagcucuucaguaaucacuagcuuaggagcaaucguaucaugcuacggcaaaacaaaauguacagcaucaaauaaaaacagaggaaucauaaaaacauuuucaaacggaugcgauuauguaagcaacaaaggaguagauacuguaagcguaggaaacacauuguacuauguaaacaaacaagaaggaaaaucacucuauguaaaaggagaaccuauaaucaauuucuacgauccauuaguguucccaucagaugaauuugacgccucaauaucacaaguuaaugaaaaaauaaaucaaucgcuagcauucauacguaaaucagaugaauuacuacauaacguaaacgcaggcaaauccacaacaaauaucaugaucacaacaauuauaauaguaauaauaguaauacuacuaucacuaauagccguaggacuccuacuauacugcaaagcaagaucuacuccaguaacccucucaaaagaucaacuaagcggaauuaauaacaucgcauucagcaacuaaggacuagucccuguucccagagcccacuuuuuuuucuuuuuuugaaauaaaauagccugucuuucagaucuaaaaaaaaaaaaaaaaaaaaaaaaaaaaaaaaaaaaaaaaaaaaaaaaaaaaaaaaaaaaaaaaugcaucccccccccccccccccccccccccccccccaaaggcucuuuucagagccaccagaauu

SEQ ID NO: 938 - RNA, 2047 nt, Artificial Sequence
  mRNA product Design a-4 comprising derived and/or modified sequence from HRSV(A2)__F0_DSCav1 (opt11)
gggagacuccugucgggcggaaguaggaggaguagaguuuaaaaacaguacucuuuuuccgguucgggacguaguugaagcaacgacaagccggauaaccgcucuugagacaggaagcuuaccauggaacuacuuauccucaaagccaacgccaucaccaccauccucacagcaguaaccuuuugcuucgccucaggccaaaauaucacagaagaauuuuaccagaguaccugcuccgccguauccaaaggauaccucagcgcgcuccgcaccggcugguacacuucaguaaucacaaucgaacuauccaacaucaaagaaaacaaaugcaacggcaccgacgcgaaagucaaacucaucaaacaagaacuagacaaauacaaaaaugccguaacagaacuacaacuguuaaugcagagcacacccgccaccaacaaccgcgcccgccgggaacucccccgauucaugaacuacacacucaacaacgccaaaaagacgaacgucacccucagcaagaaacgaaaacgcagauuccucgguuuccuacuaggcguaggcucagcaauagccuccggaguagccgucugcaaaguccugcacuuagaaggcgaagucaacaaaaucaaauccgcccuacucuccacgaacaaagccgucgucucccuguccaacggugucuccguuuuaaccuucaaaguucuggaccucaaaaacuacauagacaaacagcuucuccccauccucaacaaacaauccuguagcaucuccaacaucgaaaccgucauagaauuucaacagaaaaacaacagacugcucgaaaucacccgcgaguucuccgucaacgccggcgucacgacucccgucuccaccuauaugcucacgaacucggaacuccuuucccuaaucaacgacaugccgaucaccaacgaccaaaagaaacucaugucaaacaacguacaaauuguccgccaacaaucauacuccaucaugugcauaauuaaagaagaaguccucgcauacguaguccaacucccccucuacggcgucaucgacacccccugcuggaaacuccacaccuccccacucugcacaaccaacaccaaagaaggcucaaacauaugccuaacgcgcaccgaucgcgguugguacugcgacaacgccgguuccgucagcuucuucccccaagcagagacaugcaaaguccaaucaaaccgcgucuucugcgacaccaugaacucacuaacccuuccaagcgaagucaaccucugcaacguugacaucuucaaccccaaauacgacuguaaaaucaugaccuccaagaccgacguauccucuuccgucaucacaucccuaggcgcuaucguauccugcuaugguaaaaccaaaugcaccgccuccaacaaaaaccgcggcaucaucaagacauuuuccaacggcugcgacuacgugagcaacaaaggcgucgacaccgucuccguaggcaacacccucuacuauguaaacaaacaagagggcaaaucacucuacgucaaaggggaacccaucaucaacuucuacgacccgcucguauuccccagcgaugaguucgacgccuccaucucccaggucaacgaaaagauaaaccaaucacucgcauucauucguaaauccgacgaacuccuacacaacgugaaugcaggcaaaucgaccacuaacaucaugaucaccaccaucaucaucgucaucauagucauccuccugucccuuaucgccgucggucuuuuauuauacugcaaagcccgcagcacccccgucacccucucuaaggaccaacucagcggcaucaauaacaucgcauucucuaacuaaggacuagucccuguucccagagcccacuuuuuuuucuuuuuuugaaauaaaauagccugucuuucagaucuaaaaaaaaaaaaaaaaaaaaaaaaaaaaaaaaaaaaaaaaaaaaaaaaaaaaaaaaaaaaaaaaugcaucccccccccccccccccccccccccccccccaaaggcucuuuucagagccaccagaauu

SEQ ID NO: 939 - RNA, 1993 nt, Artificial Sequence
  mRNA product Design a-5 comprising derived and/or modified sequence from HRSV(A2)__F0_DSCav1 (opt1)
gggagacuuucccauucuguagcagaauuugguguugccuguggucuuggucccgcggagaagcuuaccauggagcugcucauccugaaggccaacgccaucaccaccauccugacggcggugaccuucugcuucgccagcggccagaacaucaccgaggaguucuaccaguccacgugcagcgccgucuccaagggguaccucagcgcccugcggaccggcugguacaccuccgugaucaccaucgagcugagcaacaucaaggagaacaagugcaacgggaccgacgccaaggugaagcucaucaagcaggagcuggacaaguacaagaacgcggucacggagcugcagcuccugaugcaguccaccccggcaaccaacaaccgcgcccggcgcgagcugccccgguucaugaacuacacccucaacaacgccaagaagacgaacgugacccugagcaagaagcgcaagcggcgcuuccugggcuuccuccugggggugggcuccgccaucgcgagcggcgucgccgugugcaaggugcugcaccucgagggggaggucaacaagaucaagagcgcccugcuguccaccaacaaggccguggugagccucuccaacggcgucagcgugcugaccuucaaggugcuggaccucaagaacuacaucgacaagcagcugcugcccauccugaacaagcagagcugcuccaucagcaacaucgagacggugaucgaguuccagcagaagaacaaccggcuccuggagaucacccgcgaguucagcgugaacgccggggucaccacccccguguccacguacaugcugaccaacagcgagcuccugucccugaucaacgacaugccgaucaccaacgaccagaagaagcucaugagcaacaacgugcagaucguccggcagcaguccuacagcaucaugugcaucaucaaggaggaggugcuggcguacgugguccagcugccccucuacggcgugaucgacacccccugcuggaagcugcacacgagcccccugugcaccaccaacaccaaggagggguccaacaucugccucacgcgcaccgaccggggcugguacugcgacaacgccggcagcgucuccuucuucccgcaggccgagaccugcaaggugcagagcaaccgcguguucugcgacaccaugaacucccugacgcugcccagcgagguaaaccucugcaacgucgacaucuucaaccccaaguacgacugcaagaucaugaccuccaagaccgacgugagcuccagcgugaucaccucccugggggccaucgucagcugcuacggcaagacgaagugcaccgccagcaacaagaaccgggggaucaucaagaccuucuccaacggcugcgacuacgugagcaacaagggcguggacaccguguccgucgggaacacccuguacuacgugaacaagcaggagggcaagagccucuacgugaagggggagcccaucaucaacuucuacgacccgcuggucuuccccuccgacgaguucgacgcgagcaucucccaggugaacgagaagaucaaccagagccuggccuucauccgcaaguccgacgagcugcuccacaacgugaacgccggcaagagcacgaccaacaucaugaucaccaccaucaucaucgucaucaucgugauccugcugucccucaucgccguggggcugcugcucuacugcaaggcccggagcacgcccgucacccuguccaaggaccagcugagcggcaucaacaacaucgcguucuccaacugaggacuagucccuguucccagagcccacuuuuuuuucuuuuuuugaaauaaaauagccugucuuucagaucuaaaaaaaaaaaaaaaaaaaaaaaaaaaaaaaaaaaaaaaaaaaaaaaaaaaaaaaaaaaaaaaaugcaucccccccccccccccccccccccccccccccaaaggcucuuuucagagccaccagaauu

SEQ ID NO: 940 - RNA, 1993 nt, Artificial Sequence
  mRNA product Design a-5 comprising derived and/or modified sequence from HRSV(A2)__F0_DSCav1 (opt1)
gggagacuuucccauucuguagcagaauuugguguugccuguggucuuggucccgcggagaagcuuaccauggagcugcucauccugaaggccaacgccaucaccaccauccugacggcggugaccuucugcuucgccagcggccagaacaucaccgaggaguucuaccaguccacgugcagcgccgucuccaagggguaccucagcgcccugcgcaccggcugguacaccuccgugaucaccaucgagcugagcaacaucaaggagaacaagugcaacgggaccgacgccaaggugaagcucaucaagcaggagcuggacaaguacaagaacgcggucacggagcugcagcuccugaugcaguccacccccgccaccaacaaccgggcccgccgggagcugccgcgcuucaugaacuacacccucaacaacgccaagaagacgaacgugacccugagcaagaagcggaagcgccgguuccugggcuuccuccugggggugggcuccgcgaucgccagcggcgucgccgugugcaaggugcugcaccucgagggggaggucaacaagaucaaguccgcccugcugagcaccaacaaggccguggugucccucagcaacggcgucuccgugcugaccuucaaggugcuggaccucaagaacuacaucgacaagcagcugcugcccauccucaacaagcagagcugcuccaucagcaacaucgagacggucaucgaguuccagcagaagaacaaccgccugcuggagaucacccgggaguucuccgugaacgcgggggugaccacccccgucagcacguacaugcucaccaacagcgagcugcugucccucaucaacgacaugcccaucaccaacgaccagaagaagcugaugagcaacaacgugcagaucgugcgccagcaguccuacagcaucaugugcaucaucaaggaggagguccuggccuacguggugcagcucccgcuguacggcgucaucgacacccccugcuggaagcugcacacgagcccccucugcaccaccaacaccaaggaggggagcaacaucugccugacgcggaccgaccgcggcugguacugcgacaacgccggcuccgugagcuucuucccccaggccgagaccugcaagguccaguccaaccggguguucugcgacaccaugaacagccugacgcucccguccgaggugaaccugugcaacgucgacaucuucaaccccaaguacgacugcaagaucaugaccagcaagaccgacguguccagcuccgugaucaccagccugggggccaucgucuccugcuacggcaagacgaagugcaccgcgagcaacaagaaccgcgggaucaucaagaccuucuccaacggcugcgacuacgugagcaacaagggcguggacaccgucagcguggggaacacccucuacuacgugaacaagcaggagggcaagucccuguacgucaagggggagcccaucaucaacuucuacgacccccugguguucccgagcgacgaguucgacgccuccaucagccaggugaacgagaagaucaaccagucccucgccuucauccggaaguccgacgagcugcugcacaacgucaacgccggcaaguccacgaccaacaucaugaucaccaccaucaucaucgugaucaucgugauccugcucagccugaucgccgucgggcugcuccuguacugcaaggcgcgcuccacgcccgugacccugagcaaggaccagcucuccggcaucaacaacaucgccuucagcaacugaggacuagucccuguucccagagcccacuuuuuuuucuuuuuuugaaauaaaauagccugucuuucagaucuaaaaaaaaaaaaaaaaaaaaaaaaaaaaaaaaaaaaaaaaaaaaaaaaaaaaaaaaaaaaaaaaugcaucccccccccccccccccccccccccccccccaaaggcucuuuucagagccaccagaauu

SEQ ID NO: 941 - RNA, 1993 nt, Artificial Sequence
  mRNA product Design a-5 comprising derived and/or modified sequence from HRSV(A2)__F0_DSCav1 (opt2)
gggagacuuucccauucuguagcagaauuugguguugccuguggucuuggucccgcggagaagcuuaccauggagcuccucauccucaaggccaacgccaucaccaccauccucaccgccgucaccuucugcuucgccuccggccagaacaucaccgaggaguucuaccaguccaccugcuccgccgucuccaagggcuaccucuccgcccuccgcaccggcugguacaccuccgucaucaccaucgagcucuccaacaucaaggagaacaagugcaacggcaccgacgccaaggucaagcucaucaagcaggagcucgacaaguacaagaacgccgucaccgagcuccagcuccucaugcaguccacccccgccaccaacaaccgcgcccgccgcgagcucccccgcuucaugaacuacacccucaacaacgccaagaagaccaacgucacccucuccaagaagcgcaagcgccgcuuccucggcuuccuccucggcgucggcuccgccaucgccuccggcgucgccgucugcaagguccuccaccucgagggcgaggucaacaagaucaaguccgcccuccucuccaccaacaaggccgucgucucccucuccaacggcgucuccguccucaccuucaagguccucgaccucaagaacuacaucgacaagcagcuccuccccauccucaacaagcaguccugcuccaucuccaacaucgagaccgucaucgaguuccagcagaagaacaaccgccuccucgagaucacccgcgaguucuccgucaacgccggcgucaccacccccgucuccaccuacaugcucaccaacuccgagcuccucucccucaucaacgacaugcccaucaccaacgaccagaagaagcucauguccaacaacguccagaucguccgccagcaguccuacuccaucaugugcaucaucaaggaggagguccucgccuacgucguccagcucccccucuacggcgucaucgacacccccugcuggaagcuccacaccuccccccucugcaccaccaacaccaaggagggcuccaacaucugccucacccgcaccgaccgcggcugguacugcgacaacgccggcuccgucuccuucuucccccaggccgagaccugcaagguccaguccaaccgcgucuucugcgacaccaugaacucccucacccuccccuccgaggucaaccucugcaacgucgacaucuucaaccccaaguacgacugcaagaucaugaccuccaagaccgacgucuccuccuccgucaucaccucccucggcgccaucgucuccugcuacggcaagaccaagugcaccgccuccaacaagaaccgcggcaucaucaagaccuucuccaacggcugcgacuacgucuccaacaagggcgucgacaccgucuccgucggcaacacccucuacuacgucaacaagcaggagggcaagucccucuacgucaagggcgagcccaucaucaacuucuacgacccccucgucuuccccuccgacgaguucgacgccuccaucucccaggucaacgagaagaucaaccagucccucgccuucauccgcaaguccgacgagcuccuccacaacgucaacgccggcaaguccaccaccaacaucaugaucaccaccaucaucaucgucaucaucgucauccuccucucccucaucgccgucggccuccuccucuacugcaaggcccgcuccacccccgucacccucuccaaggaccagcucuccggcaucaacaacaucgccuucuccaacugaggacuagucccuguucccagagcccacuuuuuuuucuuuuuuugaaauaaaauagccugucuuucagaucuaaaaaaaaaaaaaaaaaaaaaaaaaaaaaaaaaaaaaaaaaaaaaaaaaaaaaaaaaaaaaaaaugcaucccccccccccccccccccccccccccccccaaaggcucuuuucagagccaccagaauu

SEQ ID NO: 942 - RNA, 1993 nt, Artificial Sequence
  mRNA product Design a-5 comprising derived and/or modified sequence from HRSV(A2)__F0_DSCav1 (opt3)
gggagacuuucccauucuguagcagaauuugguguugccuguggucuuggucccgcggagaagcuuaccauggagcugcucauccuuaaggccaacgcuauuaccacaauacugacugcagugacguucugcuuugccagcggccagaauaucaccgaagaguucuaccaauccacauguucugcggucucaaaaggguauuugagugcuuuaagaacuggaugguacaccagcguuauuacaaucgaacuguccaacauuaaggagaauaaaugcaacgguaccgacgccaaggugaaacuaaucaagcaggaacucgauaaguauaaaaaugcaguaacugagcugcagcuucugaugcagucuacacccgccaccaacaauagggcucggcgcgaguugccucgauuuaugaacuacacgcucaauaacgcaaagaaaacuaaugugacccugucgaagaaacguaagagaagguuccugggcuuucucuuaggggucggaucagccauagcuagcggcguggccguuuguaaggugcugcaccuugaaggugaggucaacaaaaucaagagugcguugcuguccacaaauaaagcagugguaucucuaagcaacgggguuuccgugcucacuuucaagguccuggaccuuaaaaauuauauugauaagcaacuguugccaauccucaacaaacagucaugcaguauuagcaacaucgaaaccgugauagaguuucagcagaagaauaaccggcuguuagagauuacacgcgaguucucugugaaugccggagucaccacgccgguuuccacuuacaugcugacaaacucagaacuccuuagccugaucaaugacaugcccauuaccaacgaucaaaagaaauugaugaguaauaacgugcagaucguaagacagcagucuuauuccaucauguguauuauaaaggaagaggugcuagcuuacgucgugcaacugccucucuacggcguuaucgacacuccaugcuggaaacugcauacaagcccccuuuguaccacgaauaccaaggaaggcucgaacauuugccugacaaggacugaucgggggugguauugugacaaugccggaucuguguccuuuuucccucaggcagagaccugcaaaguccagucaaaccgcguguuuugugauacaaugaauaguuugacucucccaagcgagguaaaccugugcaauguugacaucuucaaccccaaguacgauugcaagauaaugaccuccaaaacagacgugucuagcucagucauuaccaguuuaggugcuaucguguccuguuauggcaagacuaaaugcacggccagcaacaagaaucgagggaucauuaaaacauuuucuaacggaugugauuacgucucaaauaagggcguggacaccguuaguguggguaacacucuguauuacguaaauaagcaagaagggaaaagccuauaugucaagggagagccuaucauuaacuucuacgacccacucguguucccguccgaugaauuugacgcgucuauaucgcagguuaaugagaaaaucaaccagagccuggccuucauuagaaaguccgaugaacuuuugcacaaugugaacgcaggcaaaucaaccacaaauaucaugaucaccacuauuauaaucgucauuaucgugauucugcucagucugaucgcuguaggccuucuguuguacugcaaggccaggucuacacccgugacgcucagcaaggaccagcuguccgggauaaacaauaucgcuuuuucaaacugaggacuagucccuguucccagagcccacuuuuuuuucuuuuuuugaaauaaaauagccugucuuucagaucuaaaaaaaaaaaaaaaaaaaaaaaaaaaaaaaaaaaaaaaaaaaaaaaaaaaaaaaaaaaaaaaaugcaucccccccccccccccccccccccccccccccaaaggcucuuuucagagccaccagaauu

SEQ ID NO: 943 - RNA, 1993 nt, Artificial Sequence
  mRNA product Design a-5 comprising derived and/or modified sequence from HRSV(A2)__F0_DSCav1 (opt4)
gggagacuuucccauucuguagcagaauuugguguugccuguggucuuggucccgcggagaagcuuaccauggagcugcugauccugaaggccaacgccaucaccaccauccugaccgccgugaccuucugcuucgccagcggccagaacaucaccgaggaguucuaccagagcaccugcagcgccgugagcaagggcuaccugagcgcccugagaaccggcugguacaccagcgugaucaccaucgagcugagcaacaucaaggagaacaagugcaacggcaccgacgccaaggugaagcugaucaagcaggagcuggacaaguacaagaacgccgugaccgagcugcagcugcugaugcagagcacccccgccaccaacaacagagccagaagagagcugcccagauucaugaacuacacccugaacaacgccaagaagaccaacgugacccugagcaagaagagaaagagaagauuccugggcuuccugcugggcgugggcagcgccaucgccagcggcguggccgugugcaaggugcugcaccuggagggcgaggugaacaagaucaagagcgcccugcugagcaccaacaaggccguggugagccugagcaacggcgugagcgugcugaccuucaaggugcuggaccugaagaacuacaucgacaagcagcugcugcccauccugaacaagcagagcugcagcaucagcaacaucgagaccgugaucgaguuccagcagaagaacaacagacugcuggagaucaccagagaguucagcgugaacgccggcgugaccacccccgugagcaccuacaugcugaccaacagcgagcugcugagccugaucaacgacaugcccaucaccaacgaccagaagaagcugaugagcaacaacgugcagaucgugagacagcagagcuacagcaucaugugcaucaucaaggaggaggugcuggccuacguggugcagcugccccuguacggcgugaucgacacccccugcuggaagcugcacaccagcccccugugcaccaccaacaccaaggagggcagcaacaucugccugaccagaaccgacagaggcugguacugcgacaacgccggcagcgugagcuucuucccccaggccgagaccugcaaggugcagagcaacagaguguucugcgacaccaugaacagccugacccugcccagcgaggugaaccugugcaacguggacaucuucaaccccaaguacgacugcaagaucaugaccagcaagaccgacgugagcagcagcgugaucaccagccugggcgccaucgugagcugcuacggcaagaccaagugcaccgccagcaacaagaacagaggcaucaucaagaccuucagcaacggcugcgacuacgugagcaacaagggcguggacaccgugagcgugggcaacacccuguacuacgugaacaagcaggagggcaagagccuguacgugaagggcgagcccaucaucaacuucuacgacccccugguguuccccagcgacgaguucgacgccagcaucagccaggugaacgagaagaucaaccagagccuggccuucaucagaaagagcgacgagcugcugcacaacgugaacgccggcaagagcaccaccaacaucaugaucaccaccaucaucaucgugaucaucgugauccugcugagccugaucgccgugggccugcugcuguacugcaaggccagaagcacccccgugacccugagcaaggaccagcugagcggcaucaacaacaucgccuucagcaacugaggacuagucccuguucccagagcccacuuuuuuuucuuuuuuugaaauaaaauagccugucuuucagaucuaaaaaaaaaaaaaaaaaaaaaaaaaaaaaaaaaaaaaaaaaaaaaaaaaaaaaaaaaaaaaaaaugcaucccccccccccccccccccccccccccccccaaaggcucuuuucagagccaccagaauu

SEQ ID NO: 944 - RNA, 1993 nt, Artificial Sequence
  mRNA product Design a-5 comprising derived and/or modified sequence from HRSV(A2)__F0_DSCav1 (opt5)
gggagacuuucccauucuguagcagaauuugguguugccuguggucuuggucccgcggagaagcuuaccauggagcugcucauccugaaggccaacgcuauuaccacaauccuuacggccgugaccuucugcuuugcgagcggccagaauauuacagaagaguucuaccaauccaccuguucugcugucagcaaaggguaucuguccgcccucagaacaggaugguacaccucuguuaucacaauugaacugagcaacaucaaggagaauaaaugcaacggcaccgacgccaaggugaaacuuaucaagcaggaacuggauaaguauaaaaaugcugugacggagcuccagcugcugaugcaguccacccccgccacaaacaaucgggcucgcagagagcucccucgguuuaugaacuacacccugaauaacgccaagaaaacaaaugucacccuuucuaagaaacgcaagagacgguuccugggguuucuccugggagugggcagcgcgauugccuccgggguugcuguguguaagguccuucaccuggaaggagaggugaacaaaaucaagagcgcccuccugucuacgaauaaagcuguugugucccugagcaacggcgucucugugcucacauucaaggugcuggaccuuaaaaauuauauugauaagcaacugcucccgauccugaacaaacaguccugcagcauuucuaacaucgaaaccgucauugaguuucagcagaagaauaaccgccuucuggagaucacaagagaauuuuccguuaaugccggcgugaccacccccgugagcacauacaugcucacgaacuccgagcugcugucucucaucaaugacaugccuauuaccaacgaucaaaagaaacugaugagcaauaacguccagaucgugcggcagcaguccuauagcauuauguguaucauuaaggaagagguucuugcguacgugguccaacugccccucuacggggugaucgacacaccuugcuggaaacugcauaccucuccccuuuguacaaccaauacgaaggaaggauccaacaucugccugacacgcaccgauagaggcugguauugugacaaugccgggagcguuucuuucuucccucaggcugagaccugcaaagugcagagcaaccgggucuuuugugauacaaugaacucccucacccugccgucugaggugaaucugugcaaugucgacauuuucaaccccaaguacgauugcaagaucaugacaagcaaaacggacguguccagcucuguuauuaccucccucggagccaucgugagcuguuauggcaagacaaaaugcaccgcuucuaacaagaaucgcgggauuaucaaaacauuuuccaacggaugugauuacgucagcaauaagggcguggacaccguuuccgugggcaacacgcuguauuacgucaauaagcaagaagggaaaucucuuuaugugaagggagagccuaucauuaacuucuacgacccccugguguucccuagcgaugaauuugacgccuccaucucucagguuaaugagaaaauuaaccagagccucgccuucaucagaaaguccgaugaacugcugcacaaugucaacgcuggcaaaagcaccacaaauauuaugaucaccacaauuaucaucgugauuaucgugauucuucucucucugaucgcggucgggcugcuccuguacugcaaggcccgguccacccccgugacgcuuagcaaggaccagcugucuggaauuaacaauaucgcuuuuuccaacugaggacuagucccuguucccagagcccacuuuuuuuucuuuuuuugaaauaaaauagccugucuuucagaucuaaaaaaaaaaaaaaaaaaaaaaaaaaaaaaaaaaaaaaaaaaaaaaaaaaaaaaaaaaaaaaaaugcaucccccccccccccccccccccccccccccccaaaggcucuuuucagagccaccagaauu

SEQ ID NO: 945 - RNA, 1993 nt, Artificial Sequence
  mRNA product Design a-5 comprising derived and/or modified sequence from HRSV(A2)__F0_DSCav1 (opt6)
gggagacuuucccauucuguagcagaauuugguguugccuguggucuuggucccgcggagaagcuuaccauggaauuauuaauccucaaagcgaacgcuauuacuaccauucuaacagcagucacauucugcuucgccucaggccaaaacauuacagaagaauuuuaccaaucaacaugcucugccguaucaaaaggcuaccuauccgcccuacgaacaggcugguacacaagcguaauaacaaucgaacuaucaaacauaaaagaaaacaaaugcaacgguacagacgccaaaguuaaacuaauaaaacaagaacucgauaaauacaaaaacgcaguaacagaauuacaacuacuaaugcaaucaacaccugcaacaaacaauagagccaggagagaauuaccucgauucaugaauuacacacucaauaacgcaaaaaaaaccaacguuacacuaucaaaaaaaagaaaacgacgauucuuaggauuccuacucggagucggaucagcaauagcaucuggcguugcaguaugcaaaguauuacacuuagaaggugaagucaauaaaauaaaaagcgcgcuacuaaguacaaacaaagcagucgucucccuaucaaacggagucucaguccuaacauucaaaguacucgaccuaaaaaauuacauagauaaacaacuacuuccaauauuaaacaaacaauccuguagcaucagcaauauagaaacaguaauagaauuucaacaaaaaaacaaccgauuauuagaaaucacucgagaauuuuccguaaacgccgggguaacaacuccagucucaaccuacaugcuaaccaauucagaacuauugagcuuaauaaacgacaugccaauaaccaacgaccaaaaaaaacuaaugucuaacaauguucaaaucgucagacaacaaaguuacaguauaauguguauaaucaaagaagaaguccuagcauacguaguccaacucccacuauauggaguuaucgacacaccauguuggaaauuacacaccucaccauuaugcacaaccaauacaaaagaaggaucaaacauaugccuuacacggacagaccgcggaugguauugugacaacgcuggcucagucuccuuuuucccacaagcagaaacaugcaaaguacaaucaaacagagucuuuugcgauaccaugaacucacuuacauuaccaagcgaaguaaaucuuuguaacgucgacaucuucaauccuaaauaugacugcaaaaucaugaccucaaaaacagacguuagcucuucaguaaucacuagcuuaggagcaaucguaucaugcuacggcaaaacaaaauguacagcaucaaauaaaaacagaggaaucauaaaaacauuuucaaacggaugcgauuauguaagcaacaaaggaguagauacuguaagcguaggaaacacauuguacuauguaaacaaacaagaaggaaaaucacucuauguaaaaggagaaccuauaaucaauuucuacgauccauuaguguucccaucagaugaauuugacgccucaauaucacaaguuaaugaaaaaauaaaucaaucgcuagcauucauacguaaaucagaugaauuacuacauaacguaaacgcaggcaaauccacaacaaauaucaugaucacaacaauuauaauaguaauaauaguaauacuacuaucacuaauagccguaggacuccuacuauacugcaaagcaagaucuacuccaguaacccucucaaaagaucaacuaagcggaauuaauaacaucgcauucagcaacuaaggacuagucccuguucccagagcccacuuuuuuuucuuuuuuugaaauaaaauagccugucuuucagaucuaaaaaaaaaaaaaaaaaaaaaaaaaaaaaaaaaaaaaaaaaaaaaaaaaaaaaaaaaaaaaaaaugcaucccccccccccccccccccccccccccccccaaaggcucuuuucagagccaccagaauu

SEQ ID NO: 946 - RNA, 1993 nt, Artificial Sequence
  mRNA product Design a-5 comprising derived and/or modified sequence from HRSV(A2)__F0_DSCav1 (opt11)
gggagacuuucccauucuguagcagaauuugguguugccuguggucuuggucccgcggagaagcuuaccauggaacuacuuauccucaaagccaacgccaucaccaccauccucacagcaguaaccuuuugcuucgccucaggccaaaauaucacagaagaauuuuaccagaguaccugcuccgccguauccaaaggauaccucagcgcgcuccgcaccggcugguacacuucaguaaucacaaucgaacuauccaacaucaaagaaaacaaaugcaacggcaccgacgcgaaagucaaacucaucaaacaagaacuagacaaauacaaaaaugccguaacagaacuacaacuguuaaugcagagcacacccgccaccaacaaccgcgcccgccgggaacucccccgauucaugaacuacacacucaacaacgccaaaaagacgaacgucacccucagcaagaaacgaaaacgcagauuccucgguuuccuacuaggcguaggcucagcaauagccuccggaguagccgucugcaaaguccugcacuuagaaggcgaagucaacaaaaucaaauccgcccuacucuccacgaacaaagccgucgucucccuguccaacggugucuccguuuuaaccuucaaaguucuggaccucaaaaacuacauagacaaacagcuucuccccauccucaacaaacaauccuguagcaucuccaacaucgaaaccgucauagaauuucaacagaaaaacaacagacugcucgaaaucacccgcgaguucuccgucaacgccggcgucacgacucccgucuccaccuauaugcucacgaacucggaacuccuuucccuaaucaacgacaugccgaucaccaacgaccaaaagaaacucaugucaaacaacguacaaauuguccgccaacaaucauacuccaucaugugcauaauuaaagaagaaguccucgcauacguaguccaacucccccucuacggcgucaucgacacccccugcuggaaacuccacaccuccccacucugcacaaccaacaccaaagaaggcucaaacauaugccuaacgcgcaccgaucgcgguugguacugcgacaacgccgguuccgucagcuucuucccccaagcagagacaugcaaaguccaaucaaaccgcgucuucugcgacaccaugaacucacuaacccuuccaagcgaagucaaccucugcaacguugacaucuucaaccccaaauacgacuguaaaaucaugaccuccaagaccgacguauccucuuccgucaucacaucccuaggcgcuaucguauccugcuaugguaaaaccaaaugcaccgccuccaacaaaaaccgcggcaucaucaagacauuuuccaacggcugcgacuacgugagcaacaaaggcgucgacaccgucuccguaggcaacacccucuacuauguaaacaaacaagagggcaaaucacucuacgucaaaggggaacccaucaucaacuucuacgacccgcucguauuccccagcgaugaguucgacgccuccaucucccaggucaacgaaaagauaaaccaaucacucgcauucauucguaaauccgacgaacuccuacacaacgugaaugcaggcaaaucgaccacuaacaucaugaucaccaccaucaucaucgucaucauagucauccuccugucccuuaucgccgucggucuuuuauuauacugcaaagcccgcagcacccccgucacccucucuaaggaccaacucagcggcaucaauaacaucgcauucucuaacuaaggacuagucccuguucccagagcccacuuuuuuuucuuuuuuugaaauaaaauagccugucuuucagaucuaaaaaaaaaaaaaaaaaaaaaaaaaaaaaaaaaaaaaaaaaaaaaaaaaaaaaaaaaaaaaaaaugcaucccccccccccccccccccccccccccccccaaaggcucuuuucagagccaccagaauu

SEQ ID NO: 947 - RNA, 2174 nt, Artificial Sequence
  mRNA product Design b-1 comprising derived and/or modified sequence from HRSV(A2)__F0_DSCav1 (opt1)
gggagacggagacggccugcaggaccugcucucucagcccucagccgaggccuacgccgagccgagugcgcagccgacgaccgggaggagccgcagccuucaacucugagguacugugauccgcgcugcccgccgggccgccccaguccgcugcugcggcaccuccuucccucgcgcccucuucgcucgccagcgccuucccugugagccugcgucaccgcggccgccaagcuuaccauggagcugcucauccugaaggccaacgccaucaccaccauccugacggcggugaccuucugcuucgccagcggccagaacaucaccgaggaguucuaccaguccacgugcagcgccgucuccaagggguaccucagcgcccugcggaccggcugguacaccuccgugaucaccaucgagcugagcaacaucaaggagaacaagugcaacgggaccgacgccaaggugaagcucaucaagcaggagcuggacaaguacaagaacgcggucacggagcugcagcuccugaugcaguccaccccggcaaccaacaaccgcgcccggcgcgagcugccccgguucaugaacuacacccucaacaacgccaagaagacgaacgugacccugagcaagaagcgcaagcggcgcuuccugggcuuccuccugggggugggcuccgccaucgcgagcggcgucgccgugugcaaggugcugcaccucgagggggaggucaacaagaucaagagcgcccugcuguccaccaacaaggccguggugagccucuccaacggcgucagcgugcugaccuucaaggugcuggaccucaagaacuacaucgacaagcagcugcugcccauccugaacaagcagagcugcuccaucagcaacaucgagacggugaucgaguuccagcagaagaacaaccggcuccuggagaucacccgcgaguucagcgugaacgccggggucaccacccccguguccacguacaugcugaccaacagcgagcuccugucccugaucaacgacaugccgaucaccaacgaccagaagaagcucaugagcaacaacgugcagaucguccggcagcaguccuacagcaucaugugcaucaucaaggaggaggugcuggcguacgugguccagcugccccucuacggcgugaucgacacccccugcuggaagcugcacacgagcccccugugcaccaccaacaccaaggagggguccaacaucugccucacgcgcaccgaccggggcugguacugcgacaacgccggcagcgucuccuucuucccgcaggccgagaccugcaaggugcagagcaaccgcguguucugcgacaccaugaacucccugacgcugcccagcgagguaaaccucugcaacgucgacaucuucaaccccaaguacgacugcaagaucaugaccuccaagaccgacgugagcuccagcgugaucaccucccugggggccaucgucagcugcuacggcaagacgaagugcaccgccagcaacaagaaccgggggaucaucaagaccuucuccaacggcugcgacuacgugagcaacaagggcguggacaccguguccgucgggaacacccuguacuacgugaacaagcaggagggcaagagccucuacgugaagggggagcccaucaucaacuucuacgacccgcuggucuuccccuccgacgaguucgacgcgagcaucucccaggugaacgagaagaucaaccagagccuggccuucauccgcaaguccgacgagcugcuccacaacgugaacgccggcaagagcacgaccaacaucaugaucaccaccaucaucaucgucaucaucgugauccugcugucccucaucgccguggggcugcugcucuacugcaaggcccggagcacgcccgucacccuguccaaggaccagcugagcggcaucaacaacaucgcguucuccaacugaggacuaguguccaccugucccuccugggcugcuggauugucucguuuuccugccaaauaaacaggaucagcgcuuuacagaucuaaaaaaaaaaaaaaaaaaaaaaaaaaaaaaaaaaaaaaaaaaaaaaaaaaaaaaaaaaaaaaaaugcaucccccccccccccccccccccccccccccccaaaggcucuuuucagagccaccagaauu

SEQ ID NO: 948 - RNA, 2174 nt, Artificial Sequence
  mRNA product Design b-1 comprising derived and/or modified sequence from HRSV(A2)__F0_DSCav1 (opt1)
gggagacggagacggccugcaggaccugcucucucagcccucagccgaggccuacgccgagccgagugcgcagccgacgaccgggaggagccgcagccuucaacucugagguacugugauccgcgcugcccgccgggccgccccaguccgcugcugcggcaccuccuucccucgcgcccucuucgcucgccagcgccuucccugugagccugcgucaccgcggccgccaagcuuaccauggagcugcucauccugaaggccaacgccaucaccaccauccugacggcggugaccuucugcuucgccagcggccagaacaucaccgaggaguucuaccaguccacgugcagcgccgucuccaagggguaccucagcgcccugcgcaccggcugguacaccuccgugaucaccaucgagcugagcaacaucaaggagaacaagugcaacgggaccgacgccaaggugaagcucaucaagcaggagcuggacaaguacaagaacgcggucacggagcugcagcuccugaugcaguccacccccgccaccaacaaccgggcccgccgggagcugccgcgcuucaugaacuacacccucaacaacgccaagaagacgaacgugacccugagcaagaagcggaagcgccgguuccugggcuuccuccugggggugggcuccgcgaucgccagcggcgucgccgugugcaaggugcugcaccucgagggggaggucaacaagaucaaguccgcccugcugagcaccaacaaggccguggugucccucagcaacggcgucuccgugcugaccuucaaggugcuggaccucaagaacuacaucgacaagcagcugcugcccauccucaacaagcagagcugcuccaucagcaacaucgagacggucaucgaguuccagcagaagaacaaccgccugcuggagaucacccgggaguucuccgugaacgcgggggugaccacccccgucagcacguacaugcucaccaacagcgagcugcugucccucaucaacgacaugcccaucaccaacgaccagaagaagcugaugagcaacaacgugcagaucgugcgccagcaguccuacagcaucaugugcaucaucaaggaggagguccuggccuacguggugcagcucccgcuguacggcgucaucgacacccccugcuggaagcugcacacgagcccccucugcaccaccaacaccaaggaggggagcaacaucugccugacgcggaccgaccgcggcugguacugcgacaacgccggcuccgugagcuucuucccccaggccgagaccugcaagguccaguccaaccggguguucugcgacaccaugaacagccugacgcucccguccgaggugaaccugugcaacgucgacaucuucaaccccaaguacgacugcaagaucaugaccagcaagaccgacguguccagcuccgugaucaccagccugggggccaucgucuccugcuacggcaagacgaagugcaccgcgagcaacaagaaccgcgggaucaucaagaccuucuccaacggcugcgacuacgugagcaacaagggcguggacaccgucagcguggggaacacccucuacuacgugaacaagcaggagggcaagucccuguacgucaagggggagcccaucaucaacuucuacgacccccugguguucccgagcgacgaguucgacgccuccaucagccaggugaacgagaagaucaaccagucccucgccuucauccggaaguccgacgagcugcugcacaacgucaacgccggcaaguccacgaccaacaucaugaucaccaccaucaucaucgugaucaucgugauccugcucagccugaucgccgucgggcugcuccuguacugcaaggcgcgcuccacgcccgugacccugagcaaggaccagcucuccggcaucaacaacaucgccuucagcaacugaggacuaguguccaccugucccuccugggcugcuggauugucucguuuuccugccaaauaaacaggaucagcgcuuuacagaucuaaaaaaaaaaaaaaaaaaaaaaaaaaaaaaaaaaaaaaaaaaaaaaaaaaaaaaaaaaaaaaaaugcaucccccccccccccccccccccccccccccccaaaggcucuuuucagagccaccagaauu

SEQ ID NO: 949 - RNA, 2174 nt, Artificial Sequence
  mRNA product Design b-1 comprising derived and/or modified sequence from HRSV(A2)__F0_DSCav1 (opt2)
gggagacggagacggccugcaggaccugcucucucagcccucagccgaggccuacgccgagccgagugcgcagccgacgaccgggaggagccgcagccuucaacucugagguacugugauccgcgcugcccgccgggccgccccaguccgcugcugcggcaccuccuucccucgcgcccucuucgcucgccagcgccuucccugugagccugcgucaccgcggccgccaagcuuaccauggagcuccucauccucaaggccaacgccaucaccaccauccucaccgccgucaccuucugcuucgccuccggccagaacaucaccgaggaguucuaccaguccaccugcuccgccgucuccaagggcuaccucuccgcccuccgcaccggcugguacaccuccgucaucaccaucgagcucuccaacaucaaggagaacaagugcaacggcaccgacgccaaggucaagcucaucaagcaggagcucgacaaguacaagaacgccgucaccgagcuccagcuccucaugcaguccacccccgccaccaacaaccgcgcccgccgcgagcucccccgcuucaugaacuacacccucaacaacgccaagaagaccaacgucacccucuccaagaagcgcaagcgccgcuuccucggcuuccuccucggcgucggcuccgccaucgccuccggcgucgccgucugcaagguccuccaccucgagggcgaggucaacaagaucaaguccgcccuccucuccaccaacaaggccgucgucucccucuccaacggcgucuccguccucaccuucaagguccucgaccucaagaacuacaucgacaagcagcuccuccccauccucaacaagcaguccugcuccaucuccaacaucgagaccgucaucgaguuccagcagaagaacaaccgccuccucgagaucacccgcgaguucuccgucaacgccggcgucaccacccccgucuccaccuacaugcucaccaacuccgagcuccucucccucaucaacgacaugcccaucaccaacgaccagaagaagcucauguccaacaacguccagaucguccgccagcaguccuacuccaucaugugcaucaucaaggaggagguccucgccuacgucguccagcucccccucuacggcgucaucgacacccccugcuggaagcuccacaccuccccccucugcaccaccaacaccaaggagggcuccaacaucugccucacccgcaccgaccgcggcugguacugcgacaacgccggcuccgucuccuucuucccccaggccgagaccugcaagguccaguccaaccgcgucuucugcgacaccaugaacucccucacccuccccuccgaggucaaccucugcaacgucgacaucuucaaccccaaguacgacugcaagaucaugaccuccaagaccgacgucuccuccuccgucaucaccucccucggcgccaucgucuccugcuacggcaagaccaagugcaccgccuccaacaagaaccgcggcaucaucaagaccuucuccaacggcugcgacuacgucuccaacaagggcgucgacaccgucuccgucggcaacacccucuacuacgucaacaagcaggagggcaagucccucuacgucaagggcgagcccaucaucaacuucuacgacccccucgucuuccccuccgacgaguucgacgccuccaucucccaggucaacgagaagaucaaccagucccucgccuucauccgcaaguccgacgagcuccuccacaacgucaacgccggcaaguccaccaccaacaucaugaucaccaccaucaucaucgucaucaucgucauccuccucucccucaucgccgucggccuccuccucuacugcaaggcccgcuccacccccgucacccucuccaaggaccagcucuccggcaucaacaacaucgccuucuccaacugaggacuaguguccaccugucccuccugggcugcuggauugucucguuuuccugccaaauaaacaggaucagcgcuuuacagaucuaaaaaaaaaaaaaaaaaaaaaaaaaaaaaaaaaaaaaaaaaaaaaaaaaaaaaaaaaaaaaaaaugcaucccccccccccccccccccccccccccccccaaaggcucuuuucagagccaccagaauu

SEQ ID NO: 950 - RNA, 2174 nt, Artificial Sequence
  mRNA product Design b-1 comprising derived and/or modified sequence from HRSV(A2)__F0_DSCav1 (opt3)
gggagacggagacggccugcaggaccugcucucucagcccucagccgaggccuacgccgagccgagugcgcagccgacgaccgggaggagccgcagccuucaacucugagguacugugauccgcgcugcccgccgggccgccccaguccgcugcugcggcaccuccuucccucgcgcccucuucgcucgccagcgccuucccugugagccugcgucaccgcggccgccaagcuuaccauggagcugcucauccuuaaggccaacgcuauuaccacaauacugacugcagugacguucugcuuugccagcggccagaauaucaccgaagaguucuaccaauccacauguucugcggucucaaaaggguauuugagugcuuuaagaacuggaugguacaccagcguuauuacaaucgaacuguccaacauuaaggagaauaaaugcaacgguaccgacgccaaggugaaacuaaucaagcaggaacucgauaaguauaaaaaugcaguaacugagcugcagcuucugaugcagucuacacccgccaccaacaauagggcucggcgcgaguugccucgauuuaugaacuacacgcucaauaacgcaaagaaaacuaaugugacccugucgaagaaacguaagagaagguuccugggcuuucucuuaggggucggaucagccauagcuagcggcguggccguuuguaaggugcugcaccuugaaggugaggucaacaaaaucaagagugcguugcuguccacaaauaaagcagugguaucucuaagcaacgggguuuccgugcucacuuucaagguccuggaccuuaaaaauuauauugauaagcaacuguugccaauccucaacaaacagucaugcaguauuagcaacaucgaaaccgugauagaguuucagcagaagaauaaccggcuguuagagauuacacgcgaguucucugugaaugccggagucaccacgccgguuuccacuuacaugcugacaaacucagaacuccuuagccugaucaaugacaugcccauuaccaacgaucaaaagaaauugaugaguaauaacgugcagaucguaagacagcagucuuauuccaucauguguauuauaaaggaagaggugcuagcuuacgucgugcaacugccucucuacggcguuaucgacacuccaugcuggaaacugcauacaagcccccuuuguaccacgaauaccaaggaaggcucgaacauuugccugacaaggacugaucgggggugguauugugacaaugccggaucuguguccuuuuucccucaggcagagaccugcaaaguccagucaaaccgcguguuuugugauacaaugaauaguuugacucucccaagcgagguaaaccugugcaauguugacaucuucaaccccaaguacgauugcaagauaaugaccuccaaaacagacgugucuagcucagucauuaccaguuuaggugcuaucguguccuguuauggcaagacuaaaugcacggccagcaacaagaaucgagggaucauuaaaacauuuucuaacggaugugauuacgucucaaauaagggcguggacaccguuaguguggguaacacucuguauuacguaaauaagcaagaagggaaaagccuauaugucaagggagagccuaucauuaacuucuacgacccacucguguucccguccgaugaauuugacgcgucuauaucgcagguuaaugagaaaaucaaccagagccuggccuucauuagaaaguccgaugaacuuuugcacaaugugaacgcaggcaaaucaaccacaaauaucaugaucaccacuauuauaaucgucauuaucgugauucugcucagucugaucgcuguaggccuucuguuguacugcaaggccaggucuacacccgugacgcucagcaaggaccagcuguccgggauaaacaauaucgcuuuuucaaacugaggacuaguguccaccugucccuccugggcugcuggauugucucguuuuccugccaaauaaacaggaucagcgcuuuacagaucuaaaaaaaaaaaaaaaaaaaaaaaaaaaaaaaaaaaaaaaaaaaaaaaaaaaaaaaaaaaaaaaaugcaucccccccccccccccccccccccccccccccaaaggcucuuuucagagccaccagaauu

SEQ ID NO: 951 - RNA, 2174 nt, Artificial Sequence
  mRNA product Design b-1 comprising derived and/or modified sequence from HRSV(A2)__F0_DSCav1 (opt4)
gggagacggagacggccugcaggaccugcucucucagcccucagccgaggccuacgccgagccgagugcgcagccgacgaccgggaggagccgcagccuucaacucugagguacugugauccgcgcugcccgccgggccgccccaguccgcugcugcggcaccuccuucccucgcgcccucuucgcucgccagcgccuucccugugagccugcgucaccgcggccgccaagcuuaccauggagcugcugauccugaaggccaacgccaucaccaccauccugaccgccgugaccuucugcuucgccagcggccagaacaucaccgaggaguucuaccagagcaccugcagcgccgugagcaagggcuaccugagcgcccugagaaccggcugguacaccagcgugaucaccaucgagcugagcaacaucaaggagaacaagugcaacggcaccgacgccaaggugaagcugaucaagcaggagcuggacaaguacaagaacgccgugaccgagcugcagcugcugaugcagagcacccccgccaccaacaacagagccagaagagagcugcccagauucaugaacuacacccugaacaacgccaagaagaccaacgugacccugagcaagaagagaaagagaagauuccugggcuuccugcugggcgugggcagcgccaucgccagcggcguggccgugugcaaggugcugcaccuggagggcgaggugaacaagaucaagagcgcccugcugagcaccaacaaggccguggugagccugagcaacggcgugagcgugcugaccuucaaggugcuggaccugaagaacuacaucgacaagcagcugcugcccauccugaacaagcagagcugcagcaucagcaacaucgagaccgugaucgaguuccagcagaagaacaacagacugcuggagaucaccagagaguucagcgugaacgccggcgugaccacccccgugagcaccuacaugcugaccaacagcgagcugcugagccugaucaacgacaugcccaucaccaacgaccagaagaagcugaugagcaacaacgugcagaucgugagacagcagagcuacagcaucaugugcaucaucaaggaggaggugcuggccuacguggugcagcugccccuguacggcgugaucgacacccccugcuggaagcugcacaccagcccccugugcaccaccaacaccaaggagggcagcaacaucugccugaccagaaccgacagaggcugguacugcgacaacgccggcagcgugagcuucuucccccaggccgagaccugcaaggugcagagcaacagaguguucugcgacaccaugaacagccugacccugcccagcgaggugaaccugugcaacguggacaucuucaaccccaaguacgacugcaagaucaugaccagcaagaccgacgugagcagcagcgugaucaccagccugggcgccaucgugagcugcuacggcaagaccaagugcaccgccagcaacaagaacagaggcaucaucaagaccuucagcaacggcugcgacuacgugagcaacaagggcguggacaccgugagcgugggcaacacccuguacuacgugaacaagcaggagggcaagagccuguacgugaagggcgagcccaucaucaacuucuacgacccccugguguuccccagcgacgaguucgacgccagcaucagccaggugaacgagaagaucaaccagagccuggccuucaucagaaagagcgacgagcugcugcacaacgugaacgccggcaagagcaccaccaacaucaugaucaccaccaucaucaucgugaucaucgugauccugcugagccugaucgccgugggccugcugcuguacugcaaggccagaagcacccccgugacccugagcaaggaccagcugagcggcaucaacaacaucgccuucagcaacugaggacuaguguccaccugucccuccugggcugcuggauugucucguuuuccugccaaauaaacaggaucagcgcuuuacagaucuaaaaaaaaaaaaaaaaaaaaaaaaaaaaaaaaaaaaaaaaaaaaaaaaaaaaaaaaaaaaaaaaugcaucccccccccccccccccccccccccccccccaaaggcucuuuucagagccaccagaauu

SEQ ID NO: 952 - RNA, 2174 nt, Artificial Sequence
  mRNA product Design b-1 comprising derived and/or modified sequence from HRSV(A2)__F0_DSCav1 (opt5)
gggagacggagacggccugcaggaccugcucucucagcccucagccgaggccuacgccgagccgagugcgcagccgacgaccgggaggagccgcagccuucaacucugagguacugugauccgcgcugcccgccgggccgccccaguccgcugcugcggcaccuccuucccucgcgcccucuucgcucgccagcgccuucccugugagccugcgucaccgcggccgccaagcuuaccauggagcugcucauccugaaggccaacgcuauuaccacaauccuuacggccgugaccuucugcuuugcgagcggccagaauauuacagaagaguucuaccaauccaccuguucugcugucagcaaaggguaucuguccgcccucagaacaggaugguacaccucuguuaucacaauugaacugagcaacaucaaggagaauaaaugcaacggcaccgacgccaaggugaaacuuaucaagcaggaacuggauaaguauaaaaaugcugugacggagcuccagcugcugaugcaguccacccccgccacaaacaaucgggcucgcagagagcucccucgguuuaugaacuacacccugaauaacgccaagaaaacaaaugucacccuuucuaagaaacgcaagagacgguuccugggguuucuccugggagugggcagcgcgauugccuccgggguugcuguguguaagguccuucaccuggaaggagaggugaacaaaaucaagagcgcccuccugucuacgaauaaagcuguugugucccugagcaacggcgucucugugcucacauucaaggugcuggaccuuaaaaauuauauugauaagcaacugcucccgauccugaacaaacaguccugcagcauuucuaacaucgaaaccgucauugaguuucagcagaagaauaaccgccuucuggagaucacaagagaauuuuccguuaaugccggcgugaccacccccgugagcacauacaugcucacgaacuccgagcugcugucucucaucaaugacaugccuauuaccaacgaucaaaagaaacugaugagcaauaacguccagaucgugcggcagcaguccuauagcauuauguguaucauuaaggaagagguucuugcguacgugguccaacugccccucuacggggugaucgacacaccuugcuggaaacugcauaccucuccccuuuguacaaccaauacgaaggaaggauccaacaucugccugacacgcaccgauagaggcugguauugugacaaugccgggagcguuucuuucuucccucaggcugagaccugcaaagugcagagcaaccgggucuuuugugauacaaugaacucccucacccugccgucugaggugaaucugugcaaugucgacauuuucaaccccaaguacgauugcaagaucaugacaagcaaaacggacguguccagcucuguuauuaccucccucggagccaucgugagcuguuauggcaagacaaaaugcaccgcuucuaacaagaaucgcgggauuaucaaaacauuuuccaacggaugugauuacgucagcaauaagggcguggacaccguuuccgugggcaacacgcuguauuacgucaauaagcaagaagggaaaucucuuuaugugaagggagagccuaucauuaacuucuacgacccccugguguucccuagcgaugaauuugacgccuccaucucucagguuaaugagaaaauuaaccagagccucgccuucaucagaaaguccgaugaacugcugcacaaugucaacgcuggcaaaagcaccacaaauauuaugaucaccacaauuaucaucgugauuaucgugauucuucucucucugaucgcggucgggcugcuccuguacugcaaggcccgguccacccccgugacgcuuagcaaggaccagcugucuggaauuaacaauaucgcuuuuuccaacugaggacuaguguccaccugucccuccugggcugcuggauugucucguuuuccugccaaauaaacaggaucagcgcuuuacagaucuaaaaaaaaaaaaaaaaaaaaaaaaaaaaaaaaaaaaaaaaaaaaaaaaaaaaaaaaaaaaaaaaugcaucccccccccccccccccccccccccccccccaaaggcucuuuucagagccaccagaauu

SEQ ID NO: 953 - RNA, 2174 nt, Artificial Sequence
  mRNA product Design b-1 comprising derived and/or modified sequence from HRSV(A2)__F0_DSCav1 (opt6)
gggagacggagacggccugcaggaccugcucucucagcccucagccgaggccuacgccgagccgagugcgcagccgacgaccgggaggagccgcagccuucaacucugagguacugugauccgcgcugcccgccgggccgccccaguccgcugcugcggcaccuccuucccucgcgcccucuucgcucgccagcgccuucccugugagccugcgucaccgcggccgccaagcuuaccauggaauuauuaauccucaaagcgaacgcuauuacuaccauucuaacagcagucacauucugcuucgccucaggccaaaacauuacagaagaauuuuaccaaucaacaugcucugccguaucaaaaggcuaccuauccgcccuacgaacaggcugguacacaagcguaauaacaaucgaacuaucaaacauaaaagaaaacaaaugcaacgguacagacgccaaaguuaaacuaauaaaacaagaacucgauaaauacaaaaacgcaguaacagaauuacaacuacuaaugcaaucaacaccugcaacaaacaauagagccaggagagaauuaccucgauucaugaauuacacacucaauaacgcaaaaaaaaccaacguuacacuaucaaaaaaaagaaaacgacgauucuuaggauuccuacucggagucggaucagcaauagcaucuggcguugcaguaugcaaaguauuacacuuagaaggugaagucaauaaaauaaaaagcgcgcuacuaaguacaaacaaagcagucgucucccuaucaaacggagucucaguccuaacauucaaaguacucgaccuaaaaaauuacauagauaaacaacuacuuccaauauuaaacaaacaauccuguagcaucagcaauauagaaacaguaauagaauuucaacaaaaaaacaaccgauuauuagaaaucacucgagaauuuuccguaaacgccgggguaacaacuccagucucaaccuacaugcuaaccaauucagaacuauugagcuuaauaaacgacaugccaauaaccaacgaccaaaaaaaacuaaugucuaacaauguucaaaucgucagacaacaaaguuacaguauaauguguauaaucaaagaagaaguccuagcauacguaguccaacucccacuauauggaguuaucgacacaccauguuggaaauuacacaccucaccauuaugcacaaccaauacaaaagaaggaucaaacauaugccuuacacggacagaccgcggaugguauugugacaacgcuggcucagucuccuuuuucccacaagcagaaacaugcaaaguacaaucaaacagagucuuuugcgauaccaugaacucacuuacauuaccaagcgaaguaaaucuuuguaacgucgacaucuucaauccuaaauaugacugcaaaaucaugaccucaaaaacagacguuagcucuucaguaaucacuagcuuaggagcaaucguaucaugcuacggcaaaacaaaauguacagcaucaaauaaaaacagaggaaucauaaaaacauuuucaaacggaugcgauuauguaagcaacaaaggaguagauacuguaagcguaggaaacacauuguacuauguaaacaaacaagaaggaaaaucacucuauguaaaaggagaaccuauaaucaauuucuacgauccauuaguguucccaucagaugaauuugacgccucaauaucacaaguuaaugaaaaaauaaaucaaucgcuagcauucauacguaaaucagaugaauuacuacauaacguaaacgcaggcaaauccacaacaaauaucaugaucacaacaauuauaauaguaauaauaguaauacuacuaucacuaauagccguaggacuccuacuauacugcaaagcaagaucuacuccaguaacccucucaaaagaucaacuaagcggaauuaauaacaucgcauucagcaacuaaggacuaguguccaccugucccuccugggcugcuggauugucucguuuuccugccaaauaaacaggaucagcgcuuuacagaucuaaaaaaaaaaaaaaaaaaaaaaaaaaaaaaaaaaaaaaaaaaaaaaaaaaaaaaaaaaaaaaaaugcaucccccccccccccccccccccccccccccccaaaggcucuuuucagagccaccagaauu

SEQ ID NO: 954 - RNA, 2174 nt, Artificial Sequence
  mRNA product Design b-1 comprising derived and/or modified sequence from HRSV(A2)__F0_DSCav1 (opt11)
gggagacggagacggccugcaggaccugcucucucagcccucagccgaggccuacgccgagccgagugcgcagccgacgaccgggaggagccgcagccuucaacucugagguacugugauccgcgcugcccgccgggccgccccaguccgcugcugcggcaccuccuucccucgcgcccucuucgcucgccagcgccuucccugugagccugcgucaccgcggccgccaagcuuaccauggaacuacuuauccucaaagccaacgccaucaccaccauccucacagcaguaaccuuuugcuucgccucaggccaaaauaucacagaagaauuuuaccagaguaccugcuccgccguauccaaaggauaccucagcgcgcuccgcaccggcugguacacuucaguaaucacaaucgaacuauccaacaucaaagaaaacaaaugcaacggcaccgacgcgaaagucaaacucaucaaacaagaacuagacaaauacaaaaaugccguaacagaacuacaacuguuaaugcagagcacacccgccaccaacaaccgcgcccgccgggaacucccccgauucaugaacuacacacucaacaacgccaaaaagacgaacgucacccucagcaagaaacgaaaacgcagauuccucgguuuccuacuaggcguaggcucagcaauagccuccggaguagccgucugcaaaguccugcacuuagaaggcgaagucaacaaaaucaaauccgcccuacucuccacgaacaaagccgucgucucccuguccaacggugucuccguuuuaaccuucaaaguucuggaccucaaaaacuacauagacaaacagcuucuccccauccucaacaaacaauccuguagcaucuccaacaucgaaaccgucauagaauuucaacagaaaaacaacagacugcucgaaaucacccgcgaguucuccgucaacgccggcgucacgacucccgucuccaccuauaugcucacgaacucggaacuccuuucccuaaucaacgacaugccgaucaccaacgaccaaaagaaacucaugucaaacaacguacaaauuguccgccaacaaucauacuccaucaugugcauaauuaaagaagaaguccucgcauacguaguccaacucccccucuacggcgucaucgacacccccugcuggaaacuccacaccuccccacucugcacaaccaacaccaaagaaggcucaaacauaugccuaacgcgcaccgaucgcgguugguacugcgacaacgccgguuccgucagcuucuucccccaagcagagacaugcaaaguccaaucaaaccgcgucuucugcgacaccaugaacucacuaacccuuccaagcgaagucaaccucugcaacguugacaucuucaaccccaaauacgacuguaaaaucaugaccuccaagaccgacguauccucuuccgucaucacaucccuaggcgcuaucguauccugcuaugguaaaaccaaaugcaccgccuccaacaaaaaccgcggcaucaucaagacauuuuccaacggcugcgacuacgugagcaacaaaggcgucgacaccgucuccguaggcaacacccucuacuauguaaacaaacaagagggcaaaucacucuacgucaaaggggaacccaucaucaacuucuacgacccgcucguauuccccagcgaugaguucgacgccuccaucucccaggucaacgaaaagauaaaccaaucacucgcauucauucguaaauccgacgaacuccuacacaacgugaaugcaggcaaaucgaccacuaacaucaugaucaccaccaucaucaucgucaucauagucauccuccugucccuuaucgccgucggucuuuuauuauacugcaaagcccgcagcacccccgucacccucucuaaggaccaacucagcggcaucaauaacaucgcauucucuaacuaaggacuaguguccaccugucccuccugggcugcuggauugucucguuuuccugccaaauaaacaggaucagcgcuuuacagaucuaaaaaaaaaaaaaaaaaaaaaaaaaaaaaaaaaaaaaaaaaaaaaaaaaaaaaaaaaaaaaaaaugcaucccccccccccccccccccccccccccccccaaaggcucuuuucagagccaccagaauu

SEQ ID NO: 955 - RNA, 1994 nt, Artificial Sequence
  mRNA product Design b-2 comprising derived and/or modified sequence from HRSV(A2)__F0_DSCav1 (opt1)
gggagagccucugcuggaguccggggaguggcguuggcugcuagagcgaagcuuaccauggagcugcucauccugaaggccaacgccaucaccaccauccugacggcggugaccuucugcuucgccagcggccagaacaucaccgaggaguucuaccaguccacgugcagcgccgucuccaagggguaccucagcgcccugcggaccggcugguacaccuccgugaucaccaucgagcugagcaacaucaaggagaacaagugcaacgggaccgacgccaaggugaagcucaucaagcaggagcuggacaaguacaagaacgcggucacggagcugcagcuccugaugcaguccaccccggcaaccaacaaccgcgcccggcgcgagcugccccgguucaugaacuacacccucaacaacgccaagaagacgaacgugacccugagcaagaagcgcaagcggcgcuuccugggcuuccuccugggggugggcuccgccaucgcgagcggcgucgccgugugcaaggugcugcaccucgagggggaggucaacaagaucaagagcgcccugcuguccaccaacaaggccguggugagccucuccaacggcgucagcgugcugaccuucaaggugcuggaccucaagaacuacaucgacaagcagcugcugcccauccugaacaagcagagcugcuccaucagcaacaucgagacggugaucgaguuccagcagaagaacaaccggcuccuggagaucacccgcgaguucagcgugaacgccggggucaccacccccguguccacguacaugcugaccaacagcgagcuccugucccugaucaacgacaugccgaucaccaacgaccagaagaagcucaugagcaacaacgugcagaucguccggcagcaguccuacagcaucaugugcaucaucaaggaggaggugcuggcguacgugguccagcugccccucuacggcgugaucgacacccccugcuggaagcugcacacgagcccccugugcaccaccaacaccaaggagggguccaacaucugccucacgcgcaccgaccggggcugguacugcgacaacgccggcagcgucuccuucuucccgcaggccgagaccugcaaggugcagagcaaccgcguguucugcgacaccaugaacucccugacgcugcccagcgagguaaaccucugcaacgucgacaucuucaaccccaaguacgacugcaagaucaugaccuccaagaccgacgugagcuccagcgugaucaccucccugggggccaucgucagcugcuacggcaagacgaagugcaccgccagcaacaagaaccgggggaucaucaagaccuucuccaacggcugcgacuacgugagcaacaagggcguggacaccguguccgucgggaacacccuguacuacgugaacaagcaggagggcaagagccucuacgugaagggggagcccaucaucaacuucuacgacccgcuggucuuccccuccgacgaguucgacgcgagcaucucccaggugaacgagaagaucaaccagagccuggccuucauccgcaaguccgacgagcugcuccacaacgugaacgccggcaagagcacgaccaacaucaugaucaccaccaucaucaucgucaucaucgugauccugcugucccucaucgccguggggcugcugcucuacugcaaggcccggagcacgcccgucacccuguccaaggaccagcugagcggcaucaacaacaucgcguucuccaacugaggacuaguguccaccugucccuccugggcugcuggauugucucguuuuccugccaaauaaacaggaucagcgcuuuacagaucuaaaaaaaaaaaaaaaaaaaaaaaaaaaaaaaaaaaaaaaaaaaaaaaaaaaaaaaaaaaaaaaaugcaucccccccccccccccccccccccccccccccaaaggcucuuuucagagccaccagaauu

SEQ ID NO: 956 - RNA, 1994 nt, Artificial Sequence
  mRNA product Design b-2 comprising derived and/or modified sequence from HRSV(A2)__F0_DSCav1 (opt1)
gggagagccucugcuggaguccggggaguggcguuggcugcuagagcgaagcuuaccauggagcugcucauccugaaggccaacgccaucaccaccauccugacggcggugaccuucugcuucgccagcggccagaacaucaccgaggaguucuaccaguccacgugcagcgccgucuccaagggguaccucagcgcccugcgcaccggcugguacaccuccgugaucaccaucgagcugagcaacaucaaggagaacaagugcaacgggaccgacgccaaggugaagcucaucaagcaggagcuggacaaguacaagaacgcggucacggagcugcagcuccugaugcaguccacccccgccaccaacaaccgggcccgccgggagcugccgcgcuucaugaacuacacccucaacaacgccaagaagacgaacgugacccugagcaagaagcggaagcgccgguuccugggcuuccuccugggggugggcuccgcgaucgccagcggcgucgccgugugcaaggugcugcaccucgagggggaggucaacaagaucaaguccgcccugcugagcaccaacaaggccguggugucccucagcaacggcgucuccgugcugaccuucaaggugcuggaccucaagaacuacaucgacaagcagcugcugcccauccucaacaagcagagcugcuccaucagcaacaucgagacggucaucgaguuccagcagaagaacaaccgccugcuggagaucacccgggaguucuccgugaacgcgggggugaccacccccgucagcacguacaugcucaccaacagcgagcugcugucccucaucaacgacaugcccaucaccaacgaccagaagaagcugaugagcaacaacgugcagaucgugcgccagcaguccuacagcaucaugugcaucaucaaggaggagguccuggccuacguggugcagcucccgcuguacggcgucaucgacacccccugcuggaagcugcacacgagcccccucugcaccaccaacaccaaggaggggagcaacaucugccugacgcggaccgaccgcggcugguacugcgacaacgccggcuccgugagcuucuucccccaggccgagaccugcaagguccaguccaaccggguguucugcgacaccaugaacagccugacgcucccguccgaggugaaccugugcaacgucgacaucuucaaccccaaguacgacugcaagaucaugaccagcaagaccgacguguccagcuccgugaucaccagccugggggccaucgucuccugcuacggcaagacgaagugcaccgcgagcaacaagaaccgcgggaucaucaagaccuucuccaacggcugcgacuacgugagcaacaagggcguggacaccgucagcguggggaacacccucuacuacgugaacaagcaggagggcaagucccuguacgucaagggggagcccaucaucaacuucuacgacccccugguguucccgagcgacgaguucgacgccuccaucagccaggugaacgagaagaucaaccagucccucgccuucauccggaaguccgacgagcugcugcacaacgucaacgccggcaaguccacgaccaacaucaugaucaccaccaucaucaucgugaucaucgugauccugcucagccugaucgccgucgggcugcuccuguacugcaaggcgcgcuccacgcccgugacccugagcaaggaccagcucuccggcaucaacaacaucgccuucagcaacugaggacuaguguccaccugucccuccugggcugcuggauugucucguuuuccugccaaauaaacaggaucagcgcuuuacagaucuaaaaaaaaaaaaaaaaaaaaaaaaaaaaaaaaaaaaaaaaaaaaaaaaaaaaaaaaaaaaaaaaugcaucccccccccccccccccccccccccccccccaaaggcucuuuucagagccaccagaauu

SEQ ID NO: 957 - RNA, 1994 nt, Artificial Sequence
  mRNA product Design b-2 comprising derived and/or modified sequence from HRSV(A2)__F0_DSCav1 (opt2)
gggagagccucugcuggaguccggggaguggcguuggcugcuagagcgaagcuuaccauggagcuccucauccucaaggccaacgccaucaccaccauccucaccgccgucaccuucugcuucgccuccggccagaacaucaccgaggaguucuaccaguccaccugcuccgccgucuccaagggcuaccucuccgcccuccgcaccggcugguacaccuccgucaucaccaucgagcucuccaacaucaaggagaacaagugcaacggcaccgacgccaaggucaagcucaucaagcaggagcucgacaaguacaagaacgccgucaccgagcuccagcuccucaugcaguccacccccgccaccaacaaccgcgcccgccgcgagcucccccgcuucaugaacuacacccucaacaacgccaagaagaccaacgucacccucuccaagaagcgcaagcgccgcuuccucggcuuccuccucggcgucggcuccgccaucgccuccggcgucgccgucugcaagguccuccaccucgagggcgaggucaacaagaucaaguccgcccuccucuccaccaacaaggccgucgucucccucuccaacggcgucuccguccucaccuucaagguccucgaccucaagaacuacaucgacaagcagcuccuccccauccucaacaagcaguccugcuccaucuccaacaucgagaccgucaucgaguuccagcagaagaacaaccgccuccucgagaucacccgcgaguucuccgucaacgccggcgucaccacccccgucuccaccuacaugcucaccaacuccgagcuccucucccucaucaacgacaugcccaucaccaacgaccagaagaagcucauguccaacaacguccagaucguccgccagcaguccuacuccaucaugugcaucaucaaggaggagguccucgccuacgucguccagcucccccucuacggcgucaucgacacccccugcuggaagcuccacaccuccccccucugcaccaccaacaccaaggagggcuccaacaucugccucacccgcaccgaccgcggcugguacugcgacaacgccggcuccgucuccuucuucccccaggccgagaccugcaagguccaguccaaccgcgucuucugcgacaccaugaacucccucacccuccccuccgaggucaaccucugcaacgucgacaucuucaaccccaaguacgacugcaagaucaugaccuccaagaccgacgucuccuccuccgucaucaccucccucggcgccaucgucuccugcuacggcaagaccaagugcaccgccuccaacaagaaccgcggcaucaucaagaccuucuccaacggcugcgacuacgucuccaacaagggcgucgacaccgucuccgucggcaacacccucuacuacgucaacaagcaggagggcaagucccucuacgucaagggcgagcccaucaucaacuucuacgacccccucgucuuccccuccgacgaguucgacgccuccaucucccaggucaacgagaagaucaaccagucccucgccuucauccgcaaguccgacgagcuccuccacaacgucaacgccggcaaguccaccaccaacaucaugaucaccaccaucaucaucgucaucaucgucauccuccucucccucaucgccgucggccuccuccucuacugcaaggcccgcuccacccccgucacccucuccaaggaccagcucuccggcaucaacaacaucgccuucuccaacugaggacuaguguccaccugucccuccugggcugcuggauugucucguuuuccugccaaauaaacaggaucagcgcuuuacagaucuaaaaaaaaaaaaaaaaaaaaaaaaaaaaaaaaaaaaaaaaaaaaaaaaaaaaaaaaaaaaaaaaugcaucccccccccccccccccccccccccccccccaaaggcucuuuucagagccaccagaauu

SEQ ID NO: 958 - RNA, 1994 nt, Artificial Sequence
  mRNA product Design b-2 comprising derived and/or modified sequence from HRSV(A2)__F0_DSCav1 (opt3)
gggagagccucugcuggaguccggggaguggcguuggcugcuagagcgaagcuuaccauggagcugcucauccuuaaggccaacgcuauuaccacaauacugacugcagugacguucugcuuugccagcggccagaauaucaccgaagaguucuaccaauccacauguucugcggucucaaaaggguauuugagugcuuuaagaacuggaugguacaccagcguuauuacaaucgaacuguccaacauuaaggagaauaaaugcaacgguaccgacgccaaggugaaacuaaucaagcaggaacucgauaaguauaaaaaugcaguaacugagcugcagcuucugaugcagucuacacccgccaccaacaauagggcucggcgcgaguugccucgauuuaugaacuacacgcucaauaacgcaaagaaaacuaaugugacccugucgaagaaacguaagagaagguuccugggcuuucucuuaggggucggaucagccauagcuagcggcguggccguuuguaaggugcugcaccuugaaggugaggucaacaaaaucaagagugcguugcuguccacaaauaaagcagugguaucucuaagcaacgggguuuccgugcucacuuucaagguccuggaccuuaaaaauuauauugauaagcaacuguugccaauccucaacaaacagucaugcaguauuagcaacaucgaaaccgugauagaguuucagcagaagaauaaccggcuguuagagauuacacgcgaguucucugugaaugccggagucaccacgccgguuuccacuuacaugcugacaaacucagaacuccuuagccugaucaaugacaugcccauuaccaacgaucaaaagaaauugaugaguaauaacgugcagaucguaagacagcagucuuauuccaucauguguauuauaaaggaagaggugcuagcuuacgucgugcaacugccucucuacggcguuaucgacacuccaugcuggaaacugcauacaagcccccuuuguaccacgaauaccaaggaaggcucgaacauuugccugacaaggacugaucgggggugguauugugacaaugccggaucuguguccuuuuucccucaggcagagaccugcaaaguccagucaaaccgcguguuuugugauacaaugaauaguuugacucucccaagcgagguaaaccugugcaauguugacaucuucaaccccaaguacgauugcaagauaaugaccuccaaaacagacgugucuagcucagucauuaccaguuuaggugcuaucguguccuguuauggcaagacuaaaugcacggccagcaacaagaaucgagggaucauuaaaacauuuucuaacggaugugauuacgucucaaauaagggcguggacaccguuaguguggguaacacucuguauuacguaaauaagcaagaagggaaaagccuauaugucaagggagagccuaucauuaacuucuacgacccacucguguucccguccgaugaauuugacgcgucuauaucgcagguuaaugagaaaaucaaccagagccuggccuucauuagaaaguccgaugaacuuuugcacaaugugaacgcaggcaaaucaaccacaaauaucaugaucaccacuauuauaaucgucauuaucgugauucugcucagucugaucgcuguaggccuucuguuguacugcaaggccaggucuacacccgugacgcucagcaaggaccagcuguccgggauaaacaauaucgcuuuuucaaacugaggacuaguguccaccugucccuccugggcugcuggauugucucguuuuccugccaaauaaacaggaucagcgcuuuacagaucuaaaaaaaaaaaaaaaaaaaaaaaaaaaaaaaaaaaaaaaaaaaaaaaaaaaaaaaaaaaaaaaaugcaucccccccccccccccccccccccccccccccaaaggcucuuuucagagccaccagaauu

SEQ ID NO: 959 - RNA, 1994 nt, Artificial Sequence
  mRNA product Design b-2 comprising derived and/or modified sequence from HRSV(A2)__F0_DSCav1 (opt4)
gggagagccucugcuggaguccggggaguggcguuggcugcuagagcgaagcuuaccauggagcugcugauccugaaggccaacgccaucaccaccauccugaccgccgugaccuucugcuucgccagcggccagaacaucaccgaggaguucuaccagagcaccugcagcgccgugagcaagggcuaccugagcgcccugagaaccggcugguacaccagcgugaucaccaucgagcugagcaacaucaaggagaacaagugcaacggcaccgacgccaaggugaagcugaucaagcaggagcuggacaaguacaagaacgccgugaccgagcugcagcugcugaugcagagcacccccgccaccaacaacagagccagaagagagcugcccagauucaugaacuacacccugaacaacgccaagaagaccaacgugacccugagcaagaagagaaagagaagauuccugggcuuccugcugggcgugggcagcgccaucgccagcggcguggccgugugcaaggugcugcaccuggagggcgaggugaacaagaucaagagcgcccugcugagcaccaacaaggccguggugagccugagcaacggcgugagcgugcugaccuucaaggugcuggaccugaagaacuacaucgacaagcagcugcugcccauccugaacaagcagagcugcagcaucagcaacaucgagaccgugaucgaguuccagcagaagaacaacagacugcuggagaucaccagagaguucagcgugaacgccggcgugaccacccccgugagcaccuacaugcugaccaacagcgagcugcugagccugaucaacgacaugcccaucaccaacgaccagaagaagcugaugagcaacaacgugcagaucgugagacagcagagcuacagcaucaugugcaucaucaaggaggaggugcuggccuacguggugcagcugccccuguacggcgugaucgacacccccugcuggaagcugcacaccagcccccugugcaccaccaacaccaaggagggcagcaacaucugccugaccagaaccgacagaggcugguacugcgacaacgccggcagcgugagcuucuucccccaggccgagaccugcaaggugcagagcaacagaguguucugcgacaccaugaacagccugacccugcccagcgaggugaaccugugcaacguggacaucuucaaccccaaguacgacugcaagaucaugaccagcaagaccgacgugagcagcagcgugaucaccagccugggcgccaucgugagcugcuacggcaagaccaagugcaccgccagcaacaagaacagaggcaucaucaagaccuucagcaacggcugcgacuacgugagcaacaagggcguggacaccgugagcgugggcaacacccuguacuacgugaacaagcaggagggcaagagccuguacgugaagggcgagcccaucaucaacuucuacgacccccugguguuccccagcgacgaguucgacgccagcaucagccaggugaacgagaagaucaaccagagccuggccuucaucagaaagagcgacgagcugcugcacaacgugaacgccggcaagagcaccaccaacaucaugaucaccaccaucaucaucgugaucaucgugauccugcugagccugaucgccgugggccugcugcuguacugcaaggccagaagcacccccgugacccugagcaaggaccagcugagcggcaucaacaacaucgccuucagcaacugaggacuaguguccaccugucccuccugggcugcuggauugucucguuuuccugccaaauaaacaggaucagcgcuuuacagaucuaaaaaaaaaaaaaaaaaaaaaaaaaaaaaaaaaaaaaaaaaaaaaaaaaaaaaaaaaaaaaaaaugcaucccccccccccccccccccccccccccccccaaaggcucuuuucagagccaccagaauu

SEQ ID NO: 960 - RNA, 1994 nt, Artificial Sequence
  mRNA product Design b-2 comprising derived and/or modified sequence from HRSV(A2)__F0_DSCav1 (opt5)
gggagagccucugcuggaguccggggaguggcguuggcugcuagagcgaagcuuaccauggagcugcucauccugaaggccaacgcuauuaccacaauccuuacggccgugaccuucugcuuugcgagcggccagaauauuacagaagaguucuaccaauccaccuguucugcugucagcaaaggguaucuguccgcccucagaacaggaugguacaccucuguuaucacaauugaacugagcaacaucaaggagaauaaaugcaacggcaccgacgccaaggugaaacuuaucaagcaggaacuggauaaguauaaaaaugcugugacggagcuccagcugcugaugcaguccacccccgccacaaacaaucgggcucgcagagagcucccucgguuuaugaacuacacccugaauaacgccaagaaaacaaaugucacccuuucuaagaaacgcaagagacgguuccugggguuucuccugggagugggcagcgcgauugccuccgggguugcuguguguaagguccuucaccuggaaggagaggugaacaaaaucaagagcgcccuccugucuacgaauaaagcuguugugucccugagcaacggcgucucugugcucacauucaaggugcuggaccuuaaaaauuauauugauaagcaacugcucccgauccugaacaaacaguccugcagcauuucuaacaucgaaaccgucauugaguuucagcagaagaauaaccgccuucuggagaucacaagagaauuuuccguuaaugccggcgugaccacccccgugagcacauacaugcucacgaacuccgagcugcugucucucaucaaugacaugccuauuaccaacgaucaaaagaaacugaugagcaauaacguccagaucgugcggcagcaguccuauagcauuauguguaucauuaaggaagagguucuugcguacgugguccaacugccccucuacggggugaucgacacaccuugcuggaaacugcauaccucuccccuuuguacaaccaauacgaaggaaggauccaacaucugccugacacgcaccgauagaggcugguauugugacaaugccgggagcguuucuuucuucccucaggcugagaccugcaaagugcagagcaaccgggucuuuugugauacaaugaacucccucacccugccgucugaggugaaucugugcaaugucgacauuuucaaccccaaguacgauugcaagaucaugacaagcaaaacggacguguccagcucuguuauuaccucccucggagccaucgugagcuguuauggcaagacaaaaugcaccgcuucuaacaagaaucgcgggauuaucaaaacauuuuccaacggaugugauuacgucagcaauaagggcguggacaccguuuccgugggcaacacgcuguauuacgucaauaagcaagaagggaaaucucuuuaugugaagggagagccuaucauuaacuucuacgacccccugguguucccuagcgaugaauuugacgccuccaucucucagguuaaugagaaaauuaaccagagccucgccuucaucagaaaguccgaugaacugcugcacaaugucaacgcuggcaaaagcaccacaaauauuaugaucaccacaauuaucaucgugauuaucgugauucuucucucucugaucgcggucgggcugcuccuguacugcaaggcccgguccacccccgugacgcuuagcaaggaccagcugucuggaauuaacaauaucgcuuuuuccaacugaggacuaguguccaccugucccuccugggcugcuggauugucucguuuuccugccaaauaaacaggaucagcgcuuuacagaucuaaaaaaaaaaaaaaaaaaaaaaaaaaaaaaaaaaaaaaaaaaaaaaaaaaaaaaaaaaaaaaaaugcaucccccccccccccccccccccccccccccccaaaggcucuuuucagagccaccagaauu

SEQ ID NO: 961 - RNA, 1994 nt, Artificial Sequence
  mRNA product Design b-2 comprising derived and/or modified sequence from HRSV(A2)__F0_DSCav1 (opt6)
gggagagccucugcuggaguccggggaguggcguuggcugcuagagcgaagcuuaccauggaauuauuaauccucaaagcgaacgcuauuacuaccauucuaacagcagucacauucugcuucgccucaggccaaaacauuacagaagaauuuuaccaaucaacaugcucugccguaucaaaaggcuaccuauccgcccuacgaacaggcugguacacaagcguaauaacaaucgaacuaucaaacauaaaagaaaacaaaugcaacgguacagacgccaaaguuaaacuaauaaaacaagaacucgauaaauacaaaaacgcaguaacagaauuacaacuacuaaugcaaucaacaccugcaacaaacaauagagccaggagagaauuaccucgauucaugaauuacacacucaauaacgcaaaaaaaaccaacguuacacuaucaaaaaaaagaaaacgacgauucuuaggauuccuacucggagucggaucagcaauagcaucuggcguugcaguaugcaaaguauuacacuuagaaggugaagucaauaaaauaaaaagcgcgcuacuaaguacaaacaaagcagucgucucccuaucaaacggagucucaguccuaacauucaaaguacucgaccuaaaaaauuacauagauaaacaacuacuuccaauauuaaacaaacaauccuguagcaucagcaauauagaaacaguaauagaauuucaacaaaaaaacaaccgauuauuagaaaucacucgagaauuuuccguaaacgccgggguaacaacuccagucucaaccuacaugcuaaccaauucagaacuauugagcuuaauaaacgacaugccaauaaccaacgaccaaaaaaaacuaaugucuaacaauguucaaaucgucagacaacaaaguuacaguauaauguguauaaucaaagaagaaguccuagcauacguaguccaacucccacuauauggaguuaucgacacaccauguuggaaauuacacaccucaccauuaugcacaaccaauacaaaagaaggaucaaacauaugccuuacacggacagaccgcggaugguauugugacaacgcuggcucagucuccuuuuucccacaagcagaaacaugcaaaguacaaucaaacagagucuuuugcgauaccaugaacucacuuacauuaccaagcgaaguaaaucuuuguaacgucgacaucuucaauccuaaauaugacugcaaaaucaugaccucaaaaacagacguuagcucuucaguaaucacuagcuuaggagcaaucguaucaugcuacggcaaaacaaaauguacagcaucaaauaaaaacagaggaaucauaaaaacauuuucaaacggaugcgauuauguaagcaacaaaggaguagauacuguaagcguaggaaacacauuguacuauguaaacaaacaagaaggaaaaucacucuauguaaaaggagaaccuauaaucaauuucuacgauccauuaguguucccaucagaugaauuugacgccucaauaucacaaguuaaugaaaaaauaaaucaaucgcuagcauucauacguaaaucagaugaauuacuacauaacguaaacgcaggcaaauccacaacaaauaucaugaucacaacaauuauaauaguaauaauaguaauacuacuaucacuaauagccguaggacuccuacuauacugcaaagcaagaucuacuccaguaacccucucaaaagaucaacuaagcggaauuaauaacaucgcauucagcaacuaaggacuaguguccaccugucccuccugggcugcuggauugucucguuuuccugccaaauaaacaggaucagcgcuuuacagaucuaaaaaaaaaaaaaaaaaaaaaaaaaaaaaaaaaaaaaaaaaaaaaaaaaaaaaaaaaaaaaaaaugcaucccccccccccccccccccccccccccccccaaaggcucuuuucagagccaccagaauu

SEQ ID NO: 962 - RNA, 1994 nt, Artificial Sequence
  mRNA product Design b-2 comprising derived and/or modified sequence from HRSV(A2)__F0_DSCav1 (opt11)
gggagagccucugcuggaguccggggaguggcguuggcugcuagagcgaagcuuaccauggaacuacuuauccucaaagccaacgccaucaccaccauccucacagcaguaaccuuuugcuucgccucaggccaaaauaucacagaagaauuuuaccagaguaccugcuccgccguauccaaaggauaccucagcgcgcuccgcaccggcugguacacuucaguaaucacaaucgaacuauccaacaucaaagaaaacaaaugcaacggcaccgacgcgaaagucaaacucaucaaacaagaacuagacaaauacaaaaaugccguaacagaacuacaacuguuaaugcagagcacacccgccaccaacaaccgcgcccgccgggaacucccccgauucaugaacuacacacucaacaacgccaaaaagacgaacgucacccucagcaagaaacgaaaacgcagauuccucgguuuccuacuaggcguaggcucagcaauagccuccggaguagccgucugcaaaguccugcacuuagaaggcgaagucaacaaaaucaaauccgcccuacucuccacgaacaaagccgucgucucccuguccaacggugucuccguuuuaaccuucaaaguucuggaccucaaaaacuacauagacaaacagcuucuccccauccucaacaaacaauccuguagcaucuccaacaucgaaaccgucauagaauuucaacagaaaaacaacagacugcucgaaaucacccgcgaguucuccgucaacgccggcgucacgacucccgucuccaccuauaugcucacgaacucggaacuccuuucccuaaucaacgacaugccgaucaccaacgaccaaaagaaacucaugucaaacaacguacaaauuguccgccaacaaucauacuccaucaugugcauaauuaaagaagaaguccucgcauacguaguccaacucccccucuacggcgucaucgacacccccugcuggaaacuccacaccuccccacucugcacaaccaacaccaaagaaggcucaaacauaugccuaacgcgcaccgaucgcgguugguacugcgacaacgccgguuccgucagcuucuucccccaagcagagacaugcaaaguccaaucaaaccgcgucuucugcgacaccaugaacucacuaacccuuccaagcgaagucaaccucugcaacguugacaucuucaaccccaaauacgacuguaaaaucaugaccuccaagaccgacguauccucuuccgucaucacaucccuaggcgcuaucguauccugcuaugguaaaaccaaaugcaccgccuccaacaaaaaccgcggcaucaucaagacauuuuccaacggcugcgacuacgugagcaacaaaggcgucgacaccgucuccguaggcaacacccucuacuauguaaacaaacaagagggcaaaucacucuacgucaaaggggaacccaucaucaacuucuacgacccgcucguauuccccagcgaugaguucgacgccuccaucucccaggucaacgaaaagauaaaccaaucacucgcauucauucguaaauccgacgaacuccuacacaacgugaaugcaggcaaaucgaccacuaacaucaugaucaccaccaucaucaucgucaucauagucauccuccugucccuuaucgccgucggucuuuuauuauacugcaaagcccgcagcacccccgucacccucucuaaggaccaacucagcggcaucaauaacaucgcauucucuaacuaaggacuaguguccaccugucccuccugggcugcuggauugucucguuuuccugccaaauaaacaggaucagcgcuuuacagaucuaaaaaaaaaaaaaaaaaaaaaaaaaaaaaaaaaaaaaaaaaaaaaaaaaaaaaaaaaaaaaaaaugcaucccccccccccccccccccccccccccccccaaaggcucuuuucagagccaccagaauu

SEQ ID NO: 963 - RNA, 2014 nt, Artificial Sequence
  mRNA product Design b-3 comprising derived and/or modified sequence from HRSV(A2)__F0_DSCav1 (opt1)
gggagagucccgcagucggcguccagcggcucugcuuguucgugugugugucguugcaggccuuauucaagcuuaccauggagcugcucauccugaaggccaacgccaucaccaccauccugacggcggugaccuucugcuucgccagcggccagaacaucaccgaggaguucuaccaguccacgugcagcgccgucuccaagggguaccucagcgcccugcggaccggcugguacaccuccgugaucaccaucgagcugagcaacaucaaggagaacaagugcaacgggaccgacgccaaggugaagcucaucaagcaggagcuggacaaguacaagaacgcggucacggagcugcagcuccugaugcaguccaccccggcaaccaacaaccgcgcccggcgcgagcugccccgguucaugaacuacacccucaacaacgccaagaagacgaacgugacccugagcaagaagcgcaagcggcgcuuccugggcuuccuccugggggugggcuccgccaucgcgagcggcgucgccgugugcaaggugcugcaccucgagggggaggucaacaagaucaagagcgcccugcuguccaccaacaaggccguggugagccucuccaacggcgucagcgugcugaccuucaaggugcuggaccucaagaacuacaucgacaagcagcugcugcccauccugaacaagcagagcugcuccaucagcaacaucgagacggugaucgaguuccagcagaagaacaaccggcuccuggagaucacccgcgaguucagcgugaacgccggggucaccacccccguguccacguacaugcugaccaacagcgagcuccugucccugaucaacgacaugccgaucaccaacgaccagaagaagcucaugagcaacaacgugcagaucguccggcagcaguccuacagcaucaugugcaucaucaaggaggaggugcuggcguacgugguccagcugccccucuacggcgugaucgacacccccugcuggaagcugcacacgagcccccugugcaccaccaacaccaaggagggguccaacaucugccucacgcgcaccgaccggggcugguacugcgacaacgccggcagcgucuccuucuucccgcaggccgagaccugcaaggugcagagcaaccgcguguucugcgacaccaugaacucccugacgcugcccagcgagguaaaccucugcaacgucgacaucuucaaccccaaguacgacugcaagaucaugaccuccaagaccgacgugagcuccagcgugaucaccucccugggggccaucgucagcugcuacggcaagacgaagugcaccgccagcaacaagaaccgggggaucaucaagaccuucuccaacggcugcgacuacgugagcaacaagggcguggacaccguguccgucgggaacacccuguacuacgugaacaagcaggagggcaagagccucuacgugaagggggagcccaucaucaacuucuacgacccgcuggucuuccccuccgacgaguucgacgcgagcaucucccaggugaacgagaagaucaaccagagccuggccuucauccgcaaguccgacgagcugcuccacaacgugaacgccggcaagagcacgaccaacaucaugaucaccaccaucaucaucgucaucaucgugauccugcugucccucaucgccguggggcugcugcucuacugcaaggcccggagcacgcccgucacccuguccaaggaccagcugagcggcaucaacaacaucgcguucuccaacugaggacuaguguccaccugucccuccugggcugcuggauugucucguuuuccugccaaauaaacaggaucagcgcuuuacagaucuaaaaaaaaaaaaaaaaaaaaaaaaaaaaaaaaaaaaaaaaaaaaaaaaaaaaaaaaaaaaaaaaugcaucccccccccccccccccccccccccccccccaaaggcucuuuucagagccaccagaauu

SEQ ID NO: 964 - RNA, 2014 nt, Artificial Sequence
  mRNA product Design b-3 comprising derived and/or modified sequence from HRSV(A2)__F0_DSCav1 (opt1)
gggagagucccgcagucggcguccagcggcucugcuuguucgugugugugucguugcaggccuuauucaagcuuaccauggagcugcucauccugaaggccaacgccaucaccaccauccugacggcggugaccuucugcuucgccagcggccagaacaucaccgaggaguucuaccaguccacgugcagcgccgucuccaagggguaccucagcgcccugcgcaccggcugguacaccuccgugaucaccaucgagcugagcaacaucaaggagaacaagugcaacgggaccgacgccaaggugaagcucaucaagcaggagcuggacaaguacaagaacgcggucacggagcugcagcuccugaugcaguccacccccgccaccaacaaccgggcccgccgggagcugccgcgcuucaugaacuacacccucaacaacgccaagaagacgaacgugacccugagcaagaagcggaagcgccgguuccugggcuuccuccugggggugggcuccgcgaucgccagcggcgucgccgugugcaaggugcugcaccucgagggggaggucaacaagaucaaguccgcccugcugagcaccaacaaggccguggugucccucagcaacggcgucuccgugcugaccuucaaggugcuggaccucaagaacuacaucgacaagcagcugcugcccauccucaacaagcagagcugcuccaucagcaacaucgagacggucaucgaguuccagcagaagaacaaccgccugcuggagaucacccgggaguucuccgugaacgcgggggugaccacccccgucagcacguacaugcucaccaacagcgagcugcugucccucaucaacgacaugcccaucaccaacgaccagaagaagcugaugagcaacaacgugcagaucgugcgccagcaguccuacagcaucaugugcaucaucaaggaggagguccuggccuacguggugcagcucccgcuguacggcgucaucgacacccccugcuggaagcugcacacgagcccccucugcaccaccaacaccaaggaggggagcaacaucugccugacgcggaccgaccgcggcugguacugcgacaacgccggcuccgugagcuucuucccccaggccgagaccugcaagguccaguccaaccggguguucugcgacaccaugaacagccugacgcucccguccgaggugaaccugugcaacgucgacaucuucaaccccaaguacgacugcaagaucaugaccagcaagaccgacguguccagcuccgugaucaccagccugggggccaucgucuccugcuacggcaagacgaagugcaccgcgagcaacaagaaccgcgggaucaucaagaccuucuccaacggcugcgacuacgugagcaacaagggcguggacaccgucagcguggggaacacccucuacuacgugaacaagcaggagggcaagucccuguacgucaagggggagcccaucaucaacuucuacgacccccugguguucccgagcgacgaguucgacgccuccaucagccaggugaacgagaagaucaaccagucccucgccuucauccggaaguccgacgagcugcugcacaacgucaacgccggcaaguccacgaccaacaucaugaucaccaccaucaucaucgugaucaucgugauccugcucagccugaucgccgucgggcugcuccuguacugcaaggcgcgcuccacgcccgugacccugagcaaggaccagcucuccggcaucaacaacaucgccuucagcaacugaggacuaguguccaccugucccuccugggcugcuggauugucucguuuuccugccaaauaaacaggaucagcgcuuuacagaucuaaaaaaaaaaaaaaaaaaaaaaaaaaaaaaaaaaaaaaaaaaaaaaaaaaaaaaaaaaaaaaaaugcaucccccccccccccccccccccccccccccccaaaggcucuuuucagagccaccagaauu

SEQ ID NO: 965 - RNA, 2014 nt, Artificial Sequence
  mRNA product Design b-3 comprising derived and/or modified sequence from HRSV(A2)__F0_DSCav1 (opt2)
gggagagucccgcagucggcguccagcggcucugcuuguucgugugugugucguugcaggccuuauucaagcuuaccauggagcuccucauccucaaggccaacgccaucaccaccauccucaccgccgucaccuucugcuucgccuccggccagaacaucaccgaggaguucuaccaguccaccugcuccgccgucuccaagggcuaccucuccgcccuccgcaccggcugguacaccuccgucaucaccaucgagcucuccaacaucaaggagaacaagugcaacggcaccgacgccaaggucaagcucaucaagcaggagcucgacaaguacaagaacgccgucaccgagcuccagcuccucaugcaguccacccccgccaccaacaaccgcgcccgccgcgagcucccccgcuucaugaacuacacccucaacaacgccaagaagaccaacgucacccucuccaagaagcgcaagcgccgcuuccucggcuuccuccucggcgucggcuccgccaucgccuccggcgucgccgucugcaagguccuccaccucgagggcgaggucaacaagaucaaguccgcccuccucuccaccaacaaggccgucgucucccucuccaacggcgucuccguccucaccuucaagguccucgaccucaagaacuacaucgacaagcagcuccuccccauccucaacaagcaguccugcuccaucuccaacaucgagaccgucaucgaguuccagcagaagaacaaccgccuccucgagaucacccgcgaguucuccgucaacgccggcgucaccacccccgucuccaccuacaugcucaccaacuccgagcuccucucccucaucaacgacaugcccaucaccaacgaccagaagaagcucauguccaacaacguccagaucguccgccagcaguccuacuccaucaugugcaucaucaaggaggagguccucgccuacgucguccagcucccccucuacggcgucaucgacacccccugcuggaagcuccacaccuccccccucugcaccaccaacaccaaggagggcuccaacaucugccucacccgcaccgaccgcggcugguacugcgacaacgccggcuccgucuccuucuucccccaggccgagaccugcaagguccaguccaaccgcgucuucugcgacaccaugaacucccucacccuccccuccgaggucaaccucugcaacgucgacaucuucaaccccaaguacgacugcaagaucaugaccuccaagaccgacgucuccuccuccgucaucaccucccucggcgccaucgucuccugcuacggcaagaccaagugcaccgccuccaacaagaaccgcggcaucaucaagaccuucuccaacggcugcgacuacgucuccaacaagggcgucgacaccgucuccgucggcaacacccucuacuacgucaacaagcaggagggcaagucccucuacgucaagggcgagcccaucaucaacuucuacgacccccucgucuuccccuccgacgaguucgacgccuccaucucccaggucaacgagaagaucaaccagucccucgccuucauccgcaaguccgacgagcuccuccacaacgucaacgccggcaaguccaccaccaacaucaugaucaccaccaucaucaucgucaucaucgucauccuccucucccucaucgccgucggccuccuccucuacugcaaggcccgcuccacccccgucacccucuccaaggaccagcucuccggcaucaacaacaucgccuucuccaacugaggacuaguguccaccugucccuccugggcugcuggauugucucguuuuccugccaaauaaacaggaucagcgcuuuacagaucuaaaaaaaaaaaaaaaaaaaaaaaaaaaaaaaaaaaaaaaaaaaaaaaaaaaaaaaaaaaaaaaaugcaucccccccccccccccccccccccccccccccaaaggcucuuuucagagccaccagaauu

SEQ ID NO: 966 - RNA, 2014 nt, Artificial Sequence
  mRNA product Design b-3 comprising derived and/or modified sequence from HRSV(A2)__F0_DSCav1 (opt3)
gggagagucccgcagucggcguccagcggcucugcuuguucgugugugugucguugcaggccuuauucaagcuuaccauggagcugcucauccuuaaggccaacgcuauuaccacaauacugacugcagugacguucugcuuugccagcggccagaauaucaccgaagaguucuaccaauccacauguucugcggucucaaaaggguauuugagugcuuuaagaacuggaugguacaccagcguuauuacaaucgaacuguccaacauuaaggagaauaaaugcaacgguaccgacgccaaggugaaacuaaucaagcaggaacucgauaaguauaaaaaugcaguaacugagcugcagcuucugaugcagucuacacccgccaccaacaauagggcucggcgcgaguugccucgauuuaugaacuacacgcucaauaacgcaaagaaaacuaaugugacccugucgaagaaacguaagagaagguuccugggcuuucucuuaggggucggaucagccauagcuagcggcguggccguuuguaaggugcugcaccuugaaggugaggucaacaaaaucaagagugcguugcuguccacaaauaaagcagugguaucucuaagcaacgggguuuccgugcucacuuucaagguccuggaccuuaaaaauuauauugauaagcaacuguugccaauccucaacaaacagucaugcaguauuagcaacaucgaaaccgugauagaguuucagcagaagaauaaccggcuguuagagauuacacgcgaguucucugugaaugccggagucaccacgccgguuuccacuuacaugcugacaaacucagaacuccuuagccugaucaaugacaugcccauuaccaacgaucaaaagaaauugaugaguaauaacgugcagaucguaagacagcagucuuauuccaucauguguauuauaaaggaagaggugcuagcuuacgucgugcaacugccucucuacggcguuaucgacacuccaugcuggaaacugcauacaagcccccuuuguaccacgaauaccaaggaaggcucgaacauuugccugacaaggacugaucgggggugguauugugacaaugccggaucuguguccuuuuucccucaggcagagaccugcaaaguccagucaaaccgcguguuuugugauacaaugaauaguuugacucucccaagcgagguaaaccugugcaauguugacaucuucaaccccaaguacgauugcaagauaaugaccuccaaaacagacgugucuagcucagucauuaccaguuuaggugcuaucguguccuguuauggcaagacuaaaugcacggccagcaacaagaaucgagggaucauuaaaacauuuucuaacggaugugauuacgucucaaauaagggcguggacaccguuaguguggguaacacucuguauuacguaaauaagcaagaagggaaaagccuauaugucaagggagagccuaucauuaacuucuacgacccacucguguucccguccgaugaauuugacgcgucuauaucgcagguuaaugagaaaaucaaccagagccuggccuucauuagaaaguccgaugaacuuuugcacaaugugaacgcaggcaaaucaaccacaaauaucaugaucaccacuauuauaaucgucauuaucgugauucugcucagucugaucgcuguaggccuucuguuguacugcaaggccaggucuacacccgugacgcucagcaaggaccagcuguccgggauaaacaauaucgcuuuuucaaacugaggacuaguguccaccugucccuccugggcugcuggauugucucguuuuccugccaaauaaacaggaucagcgcuuuacagaucuaaaaaaaaaaaaaaaaaaaaaaaaaaaaaaaaaaaaaaaaaaaaaaaaaaaaaaaaaaaaaaaaugcaucccccccccccccccccccccccccccccccaaaggcucuuuucagagccaccagaauu

SEQ ID NO: 967 - RNA, 2014 nt, Artificial Sequence
  mRNA product Design b-3 comprising derived and/or modified sequence from HRSV(A2)__F0_DSCav1 (opt4)
gggagagucccgcagucggcguccagcggcucugcuuguucgugugugugucguugcaggccuuauucaagcuuaccauggagcugcugauccugaaggccaacgccaucaccaccauccugaccgccgugaccuucugcuucgccagcggccagaacaucaccgaggaguucuaccagagcaccugcagcgccgugagcaagggcuaccugagcgcccugagaaccggcugguacaccagcgugaucaccaucgagcugagcaacaucaaggagaacaagugcaacggcaccgacgccaaggugaagcugaucaagcaggagcuggacaaguacaagaacgccgugaccgagcugcagcugcugaugcagagcacccccgccaccaacaacagagccagaagagagcugcccagauucaugaacuacacccugaacaacgccaagaagaccaacgugacccugagcaagaagagaaagagaagauuccugggcuuccugcugggcgugggcagcgccaucgccagcggcguggccgugugcaaggugcugcaccuggagggcgaggugaacaagaucaagagcgcccugcugagcaccaacaaggccguggugagccugagcaacggcgugagcgugcugaccuucaaggugcuggaccugaagaacuacaucgacaagcagcugcugcccauccugaacaagcagagcugcagcaucagcaacaucgagaccgugaucgaguuccagcagaagaacaacagacugcuggagaucaccagagaguucagcgugaacgccggcgugaccacccccgugagcaccuacaugcugaccaacagcgagcugcugagccugaucaacgacaugcccaucaccaacgaccagaagaagcugaugagcaacaacgugcagaucgugagacagcagagcuacagcaucaugugcaucaucaaggaggaggugcuggccuacguggugcagcugccccuguacggcgugaucgacacccccugcuggaagcugcacaccagcccccugugcaccaccaacaccaaggagggcagcaacaucugccugaccagaaccgacagaggcugguacugcgacaacgccggcagcgugagcuucuucccccaggccgagaccugcaaggugcagagcaacagaguguucugcgacaccaugaacagccugacccugcccagcgaggugaaccugugcaacguggacaucuucaaccccaaguacgacugcaagaucaugaccagcaagaccgacgugagcagcagcgugaucaccagccugggcgccaucgugagcugcuacggcaagaccaagugcaccgccagcaacaagaacagaggcaucaucaagaccuucagcaacggcugcgacuacgugagcaacaagggcguggacaccgugagcgugggcaacacccuguacuacgugaacaagcaggagggcaagagccuguacgugaagggcgagcccaucaucaacuucuacgacccccugguguuccccagcgacgaguucgacgccagcaucagccaggugaacgagaagaucaaccagagccuggccuucaucagaaagagcgacgagcugcugcacaacgugaacgccggcaagagcaccaccaacaucaugaucaccaccaucaucaucgugaucaucgugauccugcugagccugaucgccgugggccugcugcuguacugcaaggccagaagcacccccgugacccugagcaaggaccagcugagcggcaucaacaacaucgccuucagcaacugaggacuaguguccaccugucccuccugggcugcuggauugucucguuuuccugccaaauaaacaggaucagcgcuuuacagaucuaaaaaaaaaaaaaaaaaaaaaaaaaaaaaaaaaaaaaaaaaaaaaaaaaaaaaaaaaaaaaaaaugcaucccccccccccccccccccccccccccccccaaaggcucuuuucagagccaccagaauu

SEQ ID NO: 968 - RNA, 2014 nt, Artificial Sequence
  mRNA product Design b-3 comprising derived and/or modified sequence from HRSV(A2)__F0_DSCav1 (opt5)
gggagagucccgcagucggcguccagcggcucugcuuguucgugugugugucguugcaggccuuauucaagcuuaccauggagcugcucauccugaaggccaacgcuauuaccacaauccuuacggccgugaccuucugcuuugcgagcggccagaauauuacagaagaguucuaccaauccaccuguucugcugucagcaaaggguaucuguccgcccucagaacaggaugguacaccucuguuaucacaauugaacugagcaacaucaaggagaauaaaugcaacggcaccgacgccaaggugaaacuuaucaagcaggaacuggauaaguauaaaaaugcugugacggagcuccagcugcugaugcaguccacccccgccacaaacaaucgggcucgcagagagcucccucgguuuaugaacuacacccugaauaacgccaagaaaacaaaugucacccuuucuaagaaacgcaagagacgguuccugggguuucuccugggagugggcagcgcgauugccuccgggguugcuguguguaagguccuucaccuggaaggagaggugaacaaaaucaagagcgcccuccugucuacgaauaaagcuguugugucccugagcaacggcgucucugugcucacauucaaggugcuggaccuuaaaaauuauauugauaagcaacugcucccgauccugaacaaacaguccugcagcauuucuaacaucgaaaccgucauugaguuucagcagaagaauaaccgccuucuggagaucacaagagaauuuuccguuaaugccggcgugaccacccccgugagcacauacaugcucacgaacuccgagcugcugucucucaucaaugacaugccuauuaccaacgaucaaaagaaacugaugagcaauaacguccagaucgugcggcagcaguccuauagcauuauguguaucauuaaggaagagguucuugcguacgugguccaacugccccucuacggggugaucgacacaccuugcuggaaacugcauaccucuccccuuuguacaaccaauacgaaggaaggauccaacaucugccugacacgcaccgauagaggcugguauugugacaaugccgggagcguuucuuucuucccucaggcugagaccugcaaagugcagagcaaccgggucuuuugugauacaaugaacucccucacccugccgucugaggugaaucugugcaaugucgacauuuucaaccccaaguacgauugcaagaucaugacaagcaaaacggacguguccagcucuguuauuaccucccucggagccaucgugagcuguuauggcaagacaaaaugcaccgcuucuaacaagaaucgcgggauuaucaaaacauuuuccaacggaugugauuacgucagcaauaagggcguggacaccguuuccgugggcaacacgcuguauuacgucaauaagcaagaagggaaaucucuuuaugugaagggagagccuaucauuaacuucuacgacccccugguguucccuagcgaugaauuugacgccuccaucucucagguuaaugagaaaauuaaccagagccucgccuucaucagaaaguccgaugaacugcugcacaaugucaacgcuggcaaaagcaccacaaauauuaugaucaccacaauuaucaucgugauuaucgugauucuucucucucugaucgcggucgggcugcuccuguacugcaaggcccgguccacccccgugacgcuuagcaaggaccagcugucuggaauuaacaauaucgcuuuuuccaacugaggacuaguguccaccugucccuccugggcugcuggauugucucguuuuccugccaaauaaacaggaucagcgcuuuacagaucuaaaaaaaaaaaaaaaaaaaaaaaaaaaaaaaaaaaaaaaaaaaaaaaaaaaaaaaaaaaaaaaaugcaucccccccccccccccccccccccccccccccaaaggcucuuuucagagccaccagaauu

SEQ ID NO: 969 - RNA, 2014 nt, Artificial Sequence
  mRNA product Design b-3 comprising derived and/or modified sequence from HRSV(A2)__F0_DSCav1 (opt6)
gggagagucccgcagucggcguccagcggcucugcuuguucgugugugugucguugcaggccuuauucaagcuuaccauggaauuauuaauccucaaagcgaacgcuauuacuaccauucuaacagcagucacauucugcuucgccucaggccaaaacauuacagaagaauuuuaccaaucaacaugcucugccguaucaaaaggcuaccuauccgcccuacgaacaggcugguacacaagcguaauaacaaucgaacuaucaaacauaaaagaaaacaaaugcaacgguacagacgccaaaguuaaacuaauaaaacaagaacucgauaaauacaaaaacgcaguaacagaauuacaacuacuaaugcaaucaacaccugcaacaaacaauagagccaggagagaauuaccucgauucaugaauuacacacucaauaacgcaaaaaaaaccaacguuacacuaucaaaaaaaagaaaacgacgauucuuaggauuccuacucggagucggaucagcaauagcaucuggcguugcaguaugcaaaguauuacacuuagaaggugaagucaauaaaauaaaaagcgcgcuacuaaguacaaacaaagcagucgucucccuaucaaacggagucucaguccuaacauucaaaguacucgaccuaaaaaauuacauagauaaacaacuacuuccaauauuaaacaaacaauccuguagcaucagcaauauagaaacaguaauagaauuucaacaaaaaaacaaccgauuauuagaaaucacucgagaauuuuccguaaacgccgggguaacaacuccagucucaaccuacaugcuaaccaauucagaacuauugagcuuaauaaacgacaugccaauaaccaacgaccaaaaaaaacuaaugucuaacaauguucaaaucgucagacaacaaaguuacaguauaauguguauaaucaaagaagaaguccuagcauacguaguccaacucccacuauauggaguuaucgacacaccauguuggaaauuacacaccucaccauuaugcacaaccaauacaaaagaaggaucaaacauaugccuuacacggacagaccgcggaugguauugugacaacgcuggcucagucuccuuuuucccacaagcagaaacaugcaaaguacaaucaaacagagucuuuugcgauaccaugaacucacuuacauuaccaagcgaaguaaaucuuuguaacgucgacaucuucaauccuaaauaugacugcaaaaucaugaccucaaaaacagacguuagcucuucaguaaucacuagcuuaggagcaaucguaucaugcuacggcaaaacaaaauguacagcaucaaauaaaaacagaggaaucauaaaaacauuuucaaacggaugcgauuauguaagcaacaaaggaguagauacuguaagcguaggaaacacauuguacuauguaaacaaacaagaaggaaaaucacucuauguaaaaggagaaccuauaaucaauuucuacgauccauuaguguucccaucagaugaauuugacgccucaauaucacaaguuaaugaaaaaauaaaucaaucgcuagcauucauacguaaaucagaugaauuacuacauaacguaaacgcaggcaaauccacaacaaauaucaugaucacaacaauuauaauaguaauaauaguaauacuacuaucacuaauagccguaggacuccuacuauacugcaaagcaagaucuacuccaguaacccucucaaaagaucaacuaagcggaauuaauaacaucgcauucagcaacuaaggacuaguguccaccugucccuccugggcugcuggauugucucguuuuccugccaaauaaacaggaucagcgcuuuacagaucuaaaaaaaaaaaaaaaaaaaaaaaaaaaaaaaaaaaaaaaaaaaaaaaaaaaaaaaaaaaaaaaaugcaucccccccccccccccccccccccccccccccaaaggcucuuuucagagccaccagaauu

SEQ ID NO: 970 - RNA, 2014 nt, Artificial Sequence
  mRNA product Design b-3 comprising derived and/or modified sequence from HRSV(A2)__F0_DSCav1 (opt11)
gggagagucccgcagucggcguccagcggcucugcuuguucgugugugugucguugcaggccuuauucaagcuuaccauggaacuacuuauccucaaagccaacgccaucaccaccauccucacagcaguaaccuuuugcuucgccucaggccaaaauaucacagaagaauuuuaccagaguaccugcuccgccguauccaaaggauaccucagcgcgcuccgcaccggcugguacacuucaguaaucacaaucgaacuauccaacaucaaagaaaacaaaugcaacggcaccgacgcgaaagucaaacucaucaaacaagaacuagacaaauacaaaaaugccguaacagaacuacaacuguuaaugcagagcacacccgccaccaacaaccgcgcccgccgggaacucccccgauucaugaacuacacacucaacaacgccaaaaagacgaacgucacccucagcaagaaacgaaaacgcagauuccucgguuuccuacuaggcguaggcucagcaauagccuccggaguagccgucugcaaaguccugcacuuagaaggcgaagucaacaaaaucaaauccgcccuacucuccacgaacaaagccgucgucucccuguccaacggugucuccguuuuaaccuucaaaguucuggaccucaaaaacuacauagacaaacagcuucuccccauccucaacaaacaauccuguagcaucuccaacaucgaaaccgucauagaauuucaacagaaaaacaacagacugcucgaaaucacccgcgaguucuccgucaacgccggcgucacgacucccgucuccaccuauaugcucacgaacucggaacuccuuucccuaaucaacgacaugccgaucaccaacgaccaaaagaaacucaugucaaacaacguacaaauuguccgccaacaaucauacuccaucaugugcauaauuaaagaagaaguccucgcauacguaguccaacucccccucuacggcgucaucgacacccccugcuggaaacuccacaccuccccacucugcacaaccaacaccaaagaaggcucaaacauaugccuaacgcgcaccgaucgcgguugguacugcgacaacgccgguuccgucagcuucuucccccaagcagagacaugcaaaguccaaucaaaccgcgucuucugcgacaccaugaacucacuaacccuuccaagcgaagucaaccucugcaacguugacaucuucaaccccaaauacgacuguaaaaucaugaccuccaagaccgacguauccucuuccgucaucacaucccuaggcgcuaucguauccugcuaugguaaaaccaaaugcaccgccuccaacaaaaaccgcggcaucaucaagacauuuuccaacggcugcgacuacgugagcaacaaaggcgucgacaccgucuccguaggcaacacccucuacuauguaaacaaacaagagggcaaaucacucuacgucaaaggggaacccaucaucaacuucuacgacccgcucguauuccccagcgaugaguucgacgccuccaucucccaggucaacgaaaagauaaaccaaucacucgcauucauucguaaauccgacgaacuccuacacaacgugaaugcaggcaaaucgaccacuaacaucaugaucaccaccaucaucaucgucaucauagucauccuccugucccuuaucgccgucggucuuuuauuauacugcaaagcccgcagcacccccgucacccucucuaaggaccaacucagcggcaucaauaacaucgcauucucuaacuaaggacuaguguccaccugucccuccugggcugcuggauugucucguuuuccugccaaauaaacaggaucagcgcuuuacagaucuaaaaaaaaaaaaaaaaaaaaaaaaaaaaaaaaaaaaaaaaaaaaaaaaaaaaaaaaaaaaaaaaugcaucccccccccccccccccccccccccccccccaaaggcucuuuucagagccaccagaauu

SEQ ID NO: 971 - RNA, 2065 nt, Artificial Sequence
  mRNA product Design b-4 comprising derived and/or modified sequence from HRSV(A2)__F0_DSCav1 (opt1)
gggagagucccgcagucggcguccagcggcucugcuuguucgugugugugucguugcaggccuuauucaagcuuaccauggagcugcucauccugaaggccaacgccaucaccaccauccugacggcggugaccuucugcuucgccagcggccagaacaucaccgaggaguucuaccaguccacgugcagcgccgucuccaagggguaccucagcgcccugcggaccggcugguacaccuccgugaucaccaucgagcugagcaacaucaaggagaacaagugcaacgggaccgacgccaaggugaagcucaucaagcaggagcuggacaaguacaagaacgcggucacggagcugcagcuccugaugcaguccaccccggcaaccaacaaccgcgcccggcgcgagcugccccgguucaugaacuacacccucaacaacgccaagaagacgaacgugacccugagcaagaagcgcaagcggcgcuuccugggcuuccuccugggggugggcuccgccaucgcgagcggcgucgccgugugcaaggugcugcaccucgagggggaggucaacaagaucaagagcgcccugcuguccaccaacaaggccguggugagccucuccaacggcgucagcgugcugaccuucaaggugcuggaccucaagaacuacaucgacaagcagcugcugcccauccugaacaagcagagcugcuccaucagcaacaucgagacggugaucgaguuccagcagaagaacaaccggcuccuggagaucacccgcgaguucagcgugaacgccggggucaccacccccguguccacguacaugcugaccaacagcgagcuccugucccugaucaacgacaugccgaucaccaacgaccagaagaagcucaugagcaacaacgugcagaucguccggcagcaguccuacagcaucaugugcaucaucaaggaggaggugcuggcguacgugguccagcugccccucuacggcgugaucgacacccccugcuggaagcugcacacgagcccccugugcaccaccaacaccaaggagggguccaacaucugccucacgcgcaccgaccggggcugguacugcgacaacgccggcagcgucuccuucuucccgcaggccgagaccugcaaggugcagagcaaccgcguguucugcgacaccaugaacucccugacgcugcccagcgagguaaaccucugcaacgucgacaucuucaaccccaaguacgacugcaagaucaugaccuccaagaccgacgugagcuccagcgugaucaccucccugggggccaucgucagcugcuacggcaagacgaagugcaccgccagcaacaagaaccgggggaucaucaagaccuucuccaacggcugcgacuacgugagcaacaagggcguggacaccguguccgucgggaacacccuguacuacgugaacaagcaggagggcaagagccucuacgugaagggggagcccaucaucaacuucuacgacccgcuggucuuccccuccgacgaguucgacgcgagcaucucccaggugaacgagaagaucaaccagagccuggccuucauccgcaaguccgacgagcugcuccacaacgugaacgccggcaagagcacgaccaacaucaugaucaccaccaucaucaucgucaucaucgugauccugcugucccucaucgccguggggcugcugcucuacugcaaggcccggagcacgcccgucacccuguccaaggaccagcugagcggcaucaacaacaucgcguucuccaacugaggacuaguaauaaggaaacuguaugaaugucugugggcaggaagugaagagauccuucuguaaagguuuuuggaauuaugucugcugaauaauaaacuuuuuugaaauaauaaaucugguagaaaaaugagaucuaaaaaaaaaaaaaaaaaaaaaaaaaaaaaaaaaaaaaaaaaaaaaaaaaaaaaaaaaaaaaaaaugcaucccccccccccccccccccccccccccccccaaaggcucuuuucagagccaccagaauu

SEQ ID NO: 972 - RNA, 2065 nt, Artificial Sequence
  mRNA product Design b-4 comprising derived and/or modified sequence from HRSV(A2)__F0_DSCav1 (opt1)
gggagagucccgcagucggcguccagcggcucugcuuguucgugugugugucguugcaggccuuauucaagcuuaccauggagcugcucauccugaaggccaacgccaucaccaccauccugacggcggugaccuucugcuucgccagcggccagaacaucaccgaggaguucuaccaguccacgugcagcgccgucuccaagggguaccucagcgcccugcgcaccggcugguacaccuccgugaucaccaucgagcugagcaacaucaaggagaacaagugcaacgggaccgacgccaaggugaagcucaucaagcaggagcuggacaaguacaagaacgcggucacggagcugcagcuccugaugcaguccacccccgccaccaacaaccgggcccgccgggagcugccgcgcuucaugaacuacacccucaacaacgccaagaagacgaacgugacccugagcaagaagcggaagcgccgguuccugggcuuccuccugggggugggcuccgcgaucgccagcggcgucgccgugugcaaggugcugcaccucgagggggaggucaacaagaucaaguccgcccugcugagcaccaacaaggccguggugucccucagcaacggcgucuccgugcugaccuucaaggugcuggaccucaagaacuacaucgacaagcagcugcugcccauccucaacaagcagagcugcuccaucagcaacaucgagacggucaucgaguuccagcagaagaacaaccgccugcuggagaucacccgggaguucuccgugaacgcgggggugaccacccccgucagcacguacaugcucaccaacagcgagcugcugucccucaucaacgacaugcccaucaccaacgaccagaagaagcugaugagcaacaacgugcagaucgugcgccagcaguccuacagcaucaugugcaucaucaaggaggagguccuggccuacguggugcagcucccgcuguacggcgucaucgacacccccugcuggaagcugcacacgagcccccucugcaccaccaacaccaaggaggggagcaacaucugccugacgcggaccgaccgcggcugguacugcgacaacgccggcuccgugagcuucuucccccaggccgagaccugcaagguccaguccaaccggguguucugcgacaccaugaacagccugacgcucccguccgaggugaaccugugcaacgucgacaucuucaaccccaaguacgacugcaagaucaugaccagcaagaccgacguguccagcuccgugaucaccagccugggggccaucgucuccugcuacggcaagacgaagugcaccgcgagcaacaagaaccgcgggaucaucaagaccuucuccaacggcugcgacuacgugagcaacaagggcguggacaccgucagcguggggaacacccucuacuacgugaacaagcaggagggcaagucccuguacgucaagggggagcccaucaucaacuucuacgacccccugguguucccgagcgacgaguucgacgccuccaucagccaggugaacgagaagaucaaccagucccucgccuucauccggaaguccgacgagcugcugcacaacgucaacgccggcaaguccacgaccaacaucaugaucaccaccaucaucaucgugaucaucgugauccugcucagccugaucgccgucgggcugcuccuguacugcaaggcgcgcuccacgcccgugacccugagcaaggaccagcucuccggcaucaacaacaucgccuucagcaacugaggacuaguaauaaggaaacuguaugaaugucugugggcaggaagugaagagauccuucuguaaagguuuuuggaauuaugucugcugaauaauaaacuuuuuugaaauaauaaaucugguagaaaaaugagaucuaaaaaaaaaaaaaaaaaaaaaaaaaaaaaaaaaaaaaaaaaaaaaaaaaaaaaaaaaaaaaaaaugcaucccccccccccccccccccccccccccccccaaaggcucuuuucagagccaccagaauu

SEQ ID NO: 973 - RNA, 2065 nt, Artificial Sequence
  mRNA product Design b-4 comprising derived and/or modified sequence from HRSV(A2)__F0_DSCav1 (opt2)
gggagagucccgcagucggcguccagcggcucugcuuguucgugugugugucguugcaggccuuauucaagcuuaccauggagcuccucauccucaaggccaacgccaucaccaccauccucaccgccgucaccuucugcuucgccuccggccagaacaucaccgaggaguucuaccaguccaccugcuccgccgucuccaagggcuaccucuccgcccuccgcaccggcugguacaccuccgucaucaccaucgagcucuccaacaucaaggagaacaagugcaacggcaccgacgccaaggucaagcucaucaagcaggagcucgacaaguacaagaacgccgucaccgagcuccagcuccucaugcaguccacccccgccaccaacaaccgcgcccgccgcgagcucccccgcuucaugaacuacacccucaacaacgccaagaagaccaacgucacccucuccaagaagcgcaagcgccgcuuccucggcuuccuccucggcgucggcuccgccaucgccuccggcgucgccgucugcaagguccuccaccucgagggcgaggucaacaagaucaaguccgcccuccucuccaccaacaaggccgucgucucccucuccaacggcgucuccguccucaccuucaagguccucgaccucaagaacuacaucgacaagcagcuccuccccauccucaacaagcaguccugcuccaucuccaacaucgagaccgucaucgaguuccagcagaagaacaaccgccuccucgagaucacccgcgaguucuccgucaacgccggcgucaccacccccgucuccaccuacaugcucaccaacuccgagcuccucucccucaucaacgacaugcccaucaccaacgaccagaagaagcucauguccaacaacguccagaucguccgccagcaguccuacuccaucaugugcaucaucaaggaggagguccucgccuacgucguccagcucccccucuacggcgucaucgacacccccugcuggaagcuccacaccuccccccucugcaccaccaacaccaaggagggcuccaacaucugccucacccgcaccgaccgcggcugguacugcgacaacgccggcuccgucuccuucuucccccaggccgagaccugcaagguccaguccaaccgcgucuucugcgacaccaugaacucccucacccuccccuccgaggucaaccucugcaacgucgacaucuucaaccccaaguacgacugcaagaucaugaccuccaagaccgacgucuccuccuccgucaucaccucccucggcgccaucgucuccugcuacggcaagaccaagugcaccgccuccaacaagaaccgcggcaucaucaagaccuucuccaacggcugcgacuacgucuccaacaagggcgucgacaccgucuccgucggcaacacccucuacuacgucaacaagcaggagggcaagucccucuacgucaagggcgagcccaucaucaacuucuacgacccccucgucuuccccuccgacgaguucgacgccuccaucucccaggucaacgagaagaucaaccagucccucgccuucauccgcaaguccgacgagcuccuccacaacgucaacgccggcaaguccaccaccaacaucaugaucaccaccaucaucaucgucaucaucgucauccuccucucccucaucgccgucggccuccuccucuacugcaaggcccgcuccacccccgucacccucuccaaggaccagcucuccggcaucaacaacaucgccuucuccaacugaggacuaguaauaaggaaacuguaugaaugucugugggcaggaagugaagagauccuucuguaaagguuuuuggaauuaugucugcugaauaauaaacuuuuuugaaauaauaaaucugguagaaaaaugagaucuaaaaaaaaaaaaaaaaaaaaaaaaaaaaaaaaaaaaaaaaaaaaaaaaaaaaaaaaaaaaaaaaugcaucccccccccccccccccccccccccccccccaaaggcucuuuucagagccaccagaauu

SEQ ID NO: 974 - RNA, 2065 nt, Artificial Sequence
  mRNA product Design b-4 comprising derived and/or modified sequence from HRSV(A2)__F0_DSCav1 (opt3)
gggagagucccgcagucggcguccagcggcucugcuuguucgugugugugucguugcaggccuuauucaagcuuaccauggagcugcucauccuuaaggccaacgcuauuaccacaauacugacugcagugacguucugcuuugccagcggccagaauaucaccgaagaguucuaccaauccacauguucugcggucucaaaaggguauuugagugcuuuaagaacuggaugguacaccagcguuauuacaaucgaacuguccaacauuaaggagaauaaaugcaacgguaccgacgccaaggugaaacuaaucaagcaggaacucgauaaguauaaaaaugcaguaacugagcugcagcuucugaugcagucuacacccgccaccaacaauagggcucggcgcgaguugccucgauuuaugaacuacacgcucaauaacgcaaagaaaacuaaugugacccugucgaagaaacguaagagaagguuccugggcuuucucuuaggggucggaucagccauagcuagcggcguggccguuuguaaggugcugcaccuugaaggugaggucaacaaaaucaagagugcguugcuguccacaaauaaagcagugguaucucuaagcaacgggguuuccgugcucacuuucaagguccuggaccuuaaaaauuauauugauaagcaacuguugccaauccucaacaaacagucaugcaguauuagcaacaucgaaaccgugauagaguuucagcagaagaauaaccggcuguuagagauuacacgcgaguucucugugaaugccggagucaccacgccgguuuccacuuacaugcugacaaacucagaacuccuuagccugaucaaugacaugcccauuaccaacgaucaaaagaaauugaugaguaauaacgugcagaucguaagacagcagucuuauuccaucauguguauuauaaaggaagaggugcuagcuuacgucgugcaacugccucucuacggcguuaucgacacuccaugcuggaaacugcauacaagcccccuuuguaccacgaauaccaaggaaggcucgaacauuugccugacaaggacugaucgggggugguauugugacaaugccggaucuguguccuuuuucccucaggcagagaccugcaaaguccagucaaaccgcguguuuugugauacaaugaauaguuugacucucccaagcgagguaaaccugugcaauguugacaucuucaaccccaaguacgauugcaagauaaugaccuccaaaacagacgugucuagcucagucauuaccaguuuaggugcuaucguguccuguuauggcaagacuaaaugcacggccagcaacaagaaucgagggaucauuaaaacauuuucuaacggaugugauuacgucucaaauaagggcguggacaccguuaguguggguaacacucuguauuacguaaauaagcaagaagggaaaagccuauaugucaagggagagccuaucauuaacuucuacgacccacucguguucccguccgaugaauuugacgcgucuauaucgcagguuaaugagaaaaucaaccagagccuggccuucauuagaaaguccgaugaacuuuugcacaaugugaacgcaggcaaaucaaccacaaauaucaugaucaccacuauuauaaucgucauuaucgugauucugcucagucugaucgcuguaggccuucuguuguacugcaaggccaggucuacacccgugacgcucagcaaggaccagcuguccgggauaaacaauaucgcuuuuucaaacugaggacuaguaauaaggaaacuguaugaaugucugugggcaggaagugaagagauccuucuguaaagguuuuuggaauuaugucugcugaauaauaaacuuuuuugaaauaauaaaucugguagaaaaaugagaucuaaaaaaaaaaaaaaaaaaaaaaaaaaaaaaaaaaaaaaaaaaaaaaaaaaaaaaaaaaaaaaaaugcaucccccccccccccccccccccccccccccccaaaggcucuuuucagagccaccagaauu

SEQ ID NO: 975 - RNA, 2065 nt, Artificial Sequence
  mRNA product Design b-4 comprising derived and/or modified sequence from HRSV(A2)__F0_DSCav1 (opt4)
gggagagucccgcagucggcguccagcggcucugcuuguucgugugugugucguugcaggccuuauucaagcuuaccauggagcugcugauccugaaggccaacgccaucaccaccauccugaccgccgugaccuucugcuucgccagcggccagaacaucaccgaggaguucuaccagagcaccugcagcgccgugagcaagggcuaccugagcgcccugagaaccggcugguacaccagcgugaucaccaucgagcugagcaacaucaaggagaacaagugcaacggcaccgacgccaaggugaagcugaucaagcaggagcuggacaaguacaagaacgccgugaccgagcugcagcugcugaugcagagcacccccgccaccaacaacagagccagaagagagcugcccagauucaugaacuacacccugaacaacgccaagaagaccaacgugacccugagcaagaagagaaagagaagauuccugggcuuccugcugggcgugggcagcgccaucgccagcggcguggccgugugcaaggugcugcaccuggagggcgaggugaacaagaucaagagcgcccugcugagcaccaacaaggccguggugagccugagcaacggcgugagcgugcugaccuucaaggugcuggaccugaagaacuacaucgacaagcagcugcugcccauccugaacaagcagagcugcagcaucagcaacaucgagaccgugaucgaguuccagcagaagaacaacagacugcuggagaucaccagagaguucagcgugaacgccggcgugaccacccccgugagcaccuacaugcugaccaacagcgagcugcugagccugaucaacgacaugcccaucaccaacgaccagaagaagcugaugagcaacaacgugcagaucgugagacagcagagcuacagcaucaugugcaucaucaaggaggaggugcuggccuacguggugcagcugccccuguacggcgugaucgacacccccugcuggaagcugcacaccagcccccugugcaccaccaacaccaaggagggcagcaacaucugccugaccagaaccgacagaggcugguacugcgacaacgccggcagcgugagcuucuucccccaggccgagaccugcaaggugcagagcaacagaguguucugcgacaccaugaacagccugacccugcccagcgaggugaaccugugcaacguggacaucuucaaccccaaguacgacugcaagaucaugaccagcaagaccgacgugagcagcagcgugaucaccagccugggcgccaucgugagcugcuacggcaagaccaagugcaccgccagcaacaagaacagaggcaucaucaagaccuucagcaacggcugcgacuacgugagcaacaagggcguggacaccgugagcgugggcaacacccuguacuacgugaacaagcaggagggcaagagccuguacgugaagggcgagcccaucaucaacuucuacgacccccugguguuccccagcgacgaguucgacgccagcaucagccaggugaacgagaagaucaaccagagccuggccuucaucagaaagagcgacgagcugcugcacaacgugaacgccggcaagagcaccaccaacaucaugaucaccaccaucaucaucgugaucaucgugauccugcugagccugaucgccgugggccugcugcuguacugcaaggccagaagcacccccgugacccugagcaaggaccagcugagcggcaucaacaacaucgccuucagcaacugaggacuaguaauaaggaaacuguaugaaugucugugggcaggaagugaagagauccuucuguaaagguuuuuggaauuaugucugcugaauaauaaacuuuuuugaaauaauaaaucugguagaaaaaugagaucuaaaaaaaaaaaaaaaaaaaaaaaaaaaaaaaaaaaaaaaaaaaaaaaaaaaaaaaaaaaaaaaaugcaucccccccccccccccccccccccccccccccaaaggcucuuuucagagccaccagaauu

SEQ ID NO: 976 - RNA, 2065 nt, Artificial Sequence
  mRNA product Design b-4 comprising derived and/or modified sequence from HRSV(A2)__F0_DSCav1 (opt5)
gggagagucccgcagucggcguccagcggcucugcuuguucgugugugugucguugcaggccuuauucaagcuuaccauggagcugcucauccugaaggccaacgcuauuaccacaauccuuacggccgugaccuucugcuuugcgagcggccagaauauuacagaagaguucuaccaauccaccuguucugcugucagcaaaggguaucuguccgcccucagaacaggaugguacaccucuguuaucacaauugaacugagcaacaucaaggagaauaaaugcaacggcaccgacgccaaggugaaacuuaucaagcaggaacuggauaaguauaaaaaugcugugacggagcuccagcugcugaugcaguccacccccgccacaaacaaucgggcucgcagagagcucccucgguuuaugaacuacacccugaauaacgccaagaaaacaaaugucacccuuucuaagaaacgcaagagacgguuccugggguuucuccugggagugggcagcgcgauugccuccgggguugcuguguguaagguccuucaccuggaaggagaggugaacaaaaucaagagcgcccuccugucuacgaauaaagcuguugugucccugagcaacggcgucucugugcucacauucaaggugcuggaccuuaaaaauuauauugauaagcaacugcucccgauccugaacaaacaguccugcagcauuucuaacaucgaaaccgucauugaguuucagcagaagaauaaccgccuucuggagaucacaagagaauuuuccguuaaugccggcgugaccacccccgugagcacauacaugcucacgaacuccgagcugcugucucucaucaaugacaugccuauuaccaacgaucaaaagaaacugaugagcaauaacguccagaucgugcggcagcaguccuauagcauuauguguaucauuaaggaagagguucuugcguacgugguccaacugccccucuacggggugaucgacacaccuugcuggaaacugcauaccucuccccuuuguacaaccaauacgaaggaaggauccaacaucugccugacacgcaccgauagaggcugguauugugacaaugccgggagcguuucuuucuucccucaggcugagaccugcaaagugcagagcaaccgggucuuuugugauacaaugaacucccucacccugccgucugaggugaaucugugcaaugucgacauuuucaaccccaaguacgauugcaagaucaugacaagcaaaacggacguguccagcucuguuauuaccucccucggagccaucgugagcuguuauggcaagacaaaaugcaccgcuucuaacaagaaucgcgggauuaucaaaacauuuuccaacggaugugauuacgucagcaauaagggcguggacaccguuuccgugggcaacacgcuguauuacgucaauaagcaagaagggaaaucucuuuaugugaagggagagccuaucauuaacuucuacgacccccugguguucccuagcgaugaauuugacgccuccaucucucagguuaaugagaaaauuaaccagagccucgccuucaucagaaaguccgaugaacugcugcacaaugucaacgcuggcaaaagcaccacaaauauuaugaucaccacaauuaucaucgugauuaucgugauucuucucucucugaucgcggucgggcugcuccuguacugcaaggcccgguccacccccgugacgcuuagcaaggaccagcugucuggaauuaacaauaucgcuuuuuccaacugaggacuaguaauaaggaaacuguaugaaugucugugggcaggaagugaagagauccuucuguaaagguuuuuggaauuaugucugcugaauaauaaacuuuuuugaaauaauaaaucugguagaaaaaugagaucuaaaaaaaaaaaaaaaaaaaaaaaaaaaaaaaaaaaaaaaaaaaaaaaaaaaaaaaaaaaaaaaaugcaucccccccccccccccccccccccccccccccaaaggcucuuuucagagccaccagaauu

SEQ ID NO: 977 - RNA, 2065 nt, Artificial Sequence
  mRNA product Design b-4 comprising derived and/or modified sequence from HRSV(A2)__F0_DSCav1 (opt6)
gggagagucccgcagucggcguccagcggcucugcuuguucgugugugugucguugcaggccuuauucaagcuuaccauggaauuauuaauccucaaagcgaacgcuauuacuaccauucuaacagcagucacauucugcuucgccucaggccaaaacauuacagaagaauuuuaccaaucaacaugcucugccguaucaaaaggcuaccuauccgcccuacgaacaggcugguacacaagcguaauaacaaucgaacuaucaaacauaaaagaaaacaaaugcaacgguacagacgccaaaguuaaacuaauaaaacaagaacucgauaaauacaaaaacgcaguaacagaauuacaacuacuaaugcaaucaacaccugcaacaaacaauagagccaggagagaauuaccucgauucaugaauuacacacucaauaacgcaaaaaaaaccaacguuacacuaucaaaaaaaagaaaacgacgauucuuaggauuccuacucggagucggaucagcaauagcaucuggcguugcaguaugcaaaguauuacacuuagaaggugaagucaauaaaauaaaaagcgcgcuacuaaguacaaacaaagcagucgucucccuaucaaacggagucucaguccuaacauucaaaguacucgaccuaaaaaauuacauagauaaacaacuacuuccaauauuaaacaaacaauccuguagcaucagcaauauagaaacaguaauagaauuucaacaaaaaaacaaccgauuauuagaaaucacucgagaauuuuccguaaacgccgggguaacaacuccagucucaaccuacaugcuaaccaauucagaacuauugagcuuaauaaacgacaugccaauaaccaacgaccaaaaaaaacuaaugucuaacaauguucaaaucgucagacaacaaaguuacaguauaauguguauaaucaaagaagaaguccuagcauacguaguccaacucccacuauauggaguuaucgacacaccauguuggaaauuacacaccucaccauuaugcacaaccaauacaaaagaaggaucaaacauaugccuuacacggacagaccgcggaugguauugugacaacgcuggcucagucuccuuuuucccacaagcagaaacaugcaaaguacaaucaaacagagucuuuugcgauaccaugaacucacuuacauuaccaagcgaaguaaaucuuuguaacgucgacaucuucaauccuaaauaugacugcaaaaucaugaccucaaaaacagacguuagcucuucaguaaucacuagcuuaggagcaaucguaucaugcuacggcaaaacaaaauguacagcaucaaauaaaaacagaggaaucauaaaaacauuuucaaacggaugcgauuauguaagcaacaaaggaguagauacuguaagcguaggaaacacauuguacuauguaaacaaacaagaaggaaaaucacucuauguaaaaggagaaccuauaaucaauuucuacgauccauuaguguucccaucagaugaauuugacgccucaauaucacaaguuaaugaaaaaauaaaucaaucgcuagcauucauacguaaaucagaugaauuacuacauaacguaaacgcaggcaaauccacaacaaauaucaugaucacaacaauuauaauaguaauaauaguaauacuacuaucacuaauagccguaggacuccuacuauacugcaaagcaagaucuacuccaguaacccucucaaaagaucaacuaagcggaauuaauaacaucgcauucagcaacuaaggacuaguaauaaggaaacuguaugaaugucugugggcaggaagugaagagauccuucuguaaagguuuuuggaauuaugucugcugaauaauaaacuuuuuugaaauaauaaaucugguagaaaaaugagaucuaaaaaaaaaaaaaaaaaaaaaaaaaaaaaaaaaaaaaaaaaaaaaaaaaaaaaaaaaaaaaaaaugcaucccccccccccccccccccccccccccccccaaaggcucuuuucagagccaccagaauu

SEQ ID NO: 978 - RNA, 2065 nt, Artificial Sequence
  mRNA product Design b-4 comprising derived and/or modified sequence from HRSV(A2)__F0_DSCav1 (opt11)
gggagagucccgcagucggcguccagcggcucugcuuguucgugugugugucguugcaggccuuauucaagcuuaccauggaacuacuuauccucaaagccaacgccaucaccaccauccucacagcaguaaccuuuugcuucgccucaggccaaaauaucacagaagaauuuuaccagaguaccugcuccgccguauccaaaggauaccucagcgcgcuccgcaccggcugguacacuucaguaaucacaaucgaacuauccaacaucaaagaaaacaaaugcaacggcaccgacgcgaaagucaaacucaucaaacaagaacuagacaaauacaaaaaugccguaacagaacuacaacuguuaaugcagagcacacccgccaccaacaaccgcgcccgccgggaacucccccgauucaugaacuacacacucaacaacgccaaaaagacgaacgucacccucagcaagaaacgaaaacgcagauuccucgguuuccuacuaggcguaggcucagcaauagccuccggaguagccgucugcaaaguccugcacuuagaaggcgaagucaacaaaaucaaauccgcccuacucuccacgaacaaagccgucgucucccuguccaacggugucuccguuuuaaccuucaaaguucuggaccucaaaaacuacauagacaaacagcuucuccccauccucaacaaacaauccuguagcaucuccaacaucgaaaccgucauagaauuucaacagaaaaacaacagacugcucgaaaucacccgcgaguucuccgucaacgccggcgucacgacucccgucuccaccuauaugcucacgaacucggaacuccuuucccuaaucaacgacaugccgaucaccaacgaccaaaagaaacucaugucaaacaacguacaaauuguccgccaacaaucauacuccaucaugugcauaauuaaagaagaaguccucgcauacguaguccaacucccccucuacggcgucaucgacacccccugcuggaaacuccacaccuccccacucugcacaaccaacaccaaagaaggcucaaacauaugccuaacgcgcaccgaucgcgguugguacugcgacaacgccgguuccgucagcuucuucccccaagcagagacaugcaaaguccaaucaaaccgcgucuucugcgacaccaugaacucacuaacccuuccaagcgaagucaaccucugcaacguugacaucuucaaccccaaauacgacuguaaaaucaugaccuccaagaccgacguauccucuuccgucaucacaucccuaggcgcuaucguauccugcuaugguaaaaccaaaugcaccgccuccaacaaaaaccgcggcaucaucaagacauuuuccaacggcugcgacuacgugagcaacaaaggcgucgacaccgucuccguaggcaacacccucuacuauguaaacaaacaagagggcaaaucacucuacgucaaaggggaacccaucaucaacuucuacgacccgcucguauuccccagcgaugaguucgacgccuccaucucccaggucaacgaaaagauaaaccaaucacucgcauucauucguaaauccgacgaacuccuacacaacgugaaugcaggcaaaucgaccacuaacaucaugaucaccaccaucaucaucgucaucauagucauccuccugucccuuaucgccgucggucuuuuauuauacugcaaagcccgcagcacccccgucacccucucuaaggaccaacucagcggcaucaauaacaucgcauucucuaacuaaggacuaguaauaaggaaacuguaugaaugucugugggcaggaagugaagagauccuucuguaaagguuuuuggaauuaugucugcugaauaauaaacuuuuuugaaauaauaaaucugguagaaaaaugagaucuaaaaaaaaaaaaaaaaaaaaaaaaaaaaaaaaaaaaaaaaaaaaaaaaaaaaaaaaaaaaaaaaugcaucccccccccccccccccccccccccccccccaaaggcucuuuucagagccaccagaauu

SEQ ID NO: 979 - RNA, 2127 nt, Artificial Sequence
  mRNA product Design b-5 comprising derived and/or modified sequence from HRSV(A2)__F0_DSCav1 (opt1)
gggagacuccugucgggcggaaguaggaggaguagaguuuaaaaacaguacucuuuuuccgguucgggacguaguugaagcaacgacaagccggauaaccgcucuugagacaggaagcuuaccauggagcugcucauccugaaggccaacgccaucaccaccauccugacggcggugaccuucugcuucgccagcggccagaacaucaccgaggaguucuaccaguccacgugcagcgccgucuccaagggguaccucagcgcccugcggaccggcugguacaccuccgugaucaccaucgagcugagcaacaucaaggagaacaagugcaacgggaccgacgccaaggugaagcucaucaagcaggagcuggacaaguacaagaacgcggucacggagcugcagcuccugaugcaguccaccccggcaaccaacaaccgcgcccggcgcgagcugccccgguucaugaacuacacccucaacaacgccaagaagacgaacgugacccugagcaagaagcgcaagcggcgcuuccugggcuuccuccugggggugggcuccgccaucgcgagcggcgucgccgugugcaaggugcugcaccucgagggggaggucaacaagaucaagagcgcccugcuguccaccaacaaggccguggugagccucuccaacggcgucagcgugcugaccuucaaggugcuggaccucaagaacuacaucgacaagcagcugcugcccauccugaacaagcagagcugcuccaucagcaacaucgagacggugaucgaguuccagcagaagaacaaccggcuccuggagaucacccgcgaguucagcgugaacgccggggucaccacccccguguccacguacaugcugaccaacagcgagcuccugucccugaucaacgacaugccgaucaccaacgaccagaagaagcucaugagcaacaacgugcagaucguccggcagcaguccuacagcaucaugugcaucaucaaggaggaggugcuggcguacgugguccagcugccccucuacggcgugaucgacacccccugcuggaagcugcacacgagcccccugugcaccaccaacaccaaggagggguccaacaucugccucacgcgcaccgaccggggcugguacugcgacaacgccggcagcgucuccuucuucccgcaggccgagaccugcaaggugcagagcaaccgcguguucugcgacaccaugaacucccugacgcugcccagcgagguaaaccucugcaacgucgacaucuucaaccccaaguacgacugcaagaucaugaccuccaagaccgacgugagcuccagcgugaucaccucccugggggccaucgucagcugcuacggcaagacgaagugcaccgccagcaacaagaaccgggggaucaucaagaccuucuccaacggcugcgacuacgugagcaacaagggcguggacaccguguccgucgggaacacccuguacuacgugaacaagcaggagggcaagagccucuacgugaagggggagcccaucaucaacuucuacgacccgcuggucuuccccuccgacgaguucgacgcgagcaucucccaggugaacgagaagaucaaccagagccuggccuucauccgcaaguccgacgagcugcuccacaacgugaacgccggcaagagcacgaccaacaucaugaucaccaccaucaucaucgucaucaucgugauccugcugucccucaucgccguggggcugcugcucuacugcaaggcccggagcacgcccgucacccuguccaaggaccagcugagcggcaucaacaacaucgcguucuccaacugaggacuaguacuggcugcaucucccuuuccucuguccuccauccuucucccaggauggugaagggggaccugguacccagugauccccaccccaggauccuaaaucaugacuuaccugcuaauaaaaacucauuggaaaagugagaagaucuaaaaaaaaaaaaaaaaaaaaaaaaaaaaaaaaaaaaaaaaaaaaaaaaaaaaaaaaaaaaaaaaugcaucccccccccccccccccccccccccccccccaaaggcucuuuucagagccaccagaauu

SEQ ID NO: 980 - RNA, 2127 nt, Artificial Sequence
  mRNA product Design b-5 comprising derived and/or modified sequence from HRSV(A2)__F0_DSCav1 (opt1)
gggagacuccugucgggcggaaguaggaggaguagaguuuaaaaacaguacucuuuuuccgguucgggacguaguugaagcaacgacaagccggauaaccgcucuugagacaggaagcuuaccauggagcugcucauccugaaggccaacgccaucaccaccauccugacggcggugaccuucugcuucgccagcggccagaacaucaccgaggaguucuaccaguccacgugcagcgccgucuccaagggguaccucagcgcccugcgcaccggcugguacaccuccgugaucaccaucgagcugagcaacaucaaggagaacaagugcaacgggaccgacgccaaggugaagcucaucaagcaggagcuggacaaguacaagaacgcggucacggagcugcagcuccugaugcaguccacccccgccaccaacaaccgggcccgccgggagcugccgcgcuucaugaacuacacccucaacaacgccaagaagacgaacgugacccugagcaagaagcggaagcgccgguuccugggcuuccuccugggggugggcuccgcgaucgccagcggcgucgccgugugcaaggugcugcaccucgagggggaggucaacaagaucaaguccgcccugcugagcaccaacaaggccguggugucccucagcaacggcgucuccgugcugaccuucaaggugcuggaccucaagaacuacaucgacaagcagcugcugcccauccucaacaagcagagcugcuccaucagcaacaucgagacggucaucgaguuccagcagaagaacaaccgccugcuggagaucacccgggaguucuccgugaacgcgggggugaccacccccgucagcacguacaugcucaccaacagcgagcugcugucccucaucaacgacaugcccaucaccaacgaccagaagaagcugaugagcaacaacgugcagaucgugcgccagcaguccuacagcaucaugugcaucaucaaggaggagguccuggccuacguggugcagcucccgcuguacggcgucaucgacacccccugcuggaagcugcacacgagcccccucugcaccaccaacaccaaggaggggagcaacaucugccugacgcggaccgaccgcggcugguacugcgacaacgccggcuccgugagcuucuucccccaggccgagaccugcaagguccaguccaaccggguguucugcgacaccaugaacagccugacgcucccguccgaggugaaccugugcaacgucgacaucuucaaccccaaguacgacugcaagaucaugaccagcaagaccgacguguccagcuccgugaucaccagccugggggccaucgucuccugcuacggcaagacgaagugcaccgcgagcaacaagaaccgcgggaucaucaagaccuucuccaacggcugcgacuacgugagcaacaagggcguggacaccgucagcguggggaacacccucuacuacgugaacaagcaggagggcaagucccuguacgucaagggggagcccaucaucaacuucuacgacccccugguguucccgagcgacgaguucgacgccuccaucagccaggugaacgagaagaucaaccagucccucgccuucauccggaaguccgacgagcugcugcacaacgucaacgccggcaaguccacgaccaacaucaugaucaccaccaucaucaucgugaucaucgugauccugcucagccugaucgccgucgggcugcuccuguacugcaaggcgcgcuccacgcccgugacccugagcaaggaccagcucuccggcaucaacaacaucgccuucagcaacugaggacuaguacuggcugcaucucccuuuccucuguccuccauccuucucccaggauggugaagggggaccugguacccagugauccccaccccaggauccuaaaucaugacuuaccugcuaauaaaaacucauuggaaaagugagaagaucuaaaaaaaaaaaaaaaaaaaaaaaaaaaaaaaaaaaaaaaaaaaaaaaaaaaaaaaaaaaaaaaaugcaucccccccccccccccccccccccccccccccaaaggcucuuuucagagccaccagaauu

SEQ ID NO: 981 - RNA, 2127 nt, Artificial Sequence
  mRNA product Design b-5 comprising derived and/or modified sequence from HRSV(A2)__F0_DSCav1 (opt2)
gggagacuccugucgggcggaaguaggaggaguagaguuuaaaaacaguacucuuuuuccgguucgggacguaguugaagcaacgacaagccggauaaccgcucuugagacaggaagcuuaccauggagcuccucauccucaaggccaacgccaucaccaccauccucaccgccgucaccuucugcuucgccuccggccagaacaucaccgaggaguucuaccaguccaccugcuccgccgucuccaagggcuaccucuccgcccuccgcaccggcugguacaccuccgucaucaccaucgagcucuccaacaucaaggagaacaagugcaacggcaccgacgccaaggucaagcucaucaagcaggagcucgacaaguacaagaacgccgucaccgagcuccagcuccucaugcaguccacccccgccaccaacaaccgcgcccgccgcgagcucccccgcuucaugaacuacacccucaacaacgccaagaagaccaacgucacccucuccaagaagcgcaagcgccgcuuccucggcuuccuccucggcgucggcuccgccaucgccuccggcgucgccgucugcaagguccuccaccucgagggcgaggucaacaagaucaaguccgcccuccucuccaccaacaaggccgucgucucccucuccaacggcgucuccguccucaccuucaagguccucgaccucaagaacuacaucgacaagcagcuccuccccauccucaacaagcaguccugcuccaucuccaacaucgagaccgucaucgaguuccagcagaagaacaaccgccuccucgagaucacccgcgaguucuccgucaacgccggcgucaccacccccgucuccaccuacaugcucaccaacuccgagcuccucucccucaucaacgacaugcccaucaccaacgaccagaagaagcucauguccaacaacguccagaucguccgccagcaguccuacuccaucaugugcaucaucaaggaggagguccucgccuacgucguccagcucccccucuacggcgucaucgacacccccugcuggaagcuccacaccuccccccucugcaccaccaacaccaaggagggcuccaacaucugccucacccgcaccgaccgcggcugguacugcgacaacgccggcuccgucuccuucuucccccaggccgagaccugcaagguccaguccaaccgcgucuucugcgacaccaugaacucccucacccuccccuccgaggucaaccucugcaacgucgacaucuucaaccccaaguacgacugcaagaucaugaccuccaagaccgacgucuccuccuccgucaucaccucccucggcgccaucgucuccugcuacggcaagaccaagugcaccgccuccaacaagaaccgcggcaucaucaagaccuucuccaacggcugcgacuacgucuccaacaagggcgucgacaccgucuccgucggcaacacccucuacuacgucaacaagcaggagggcaagucccucuacgucaagggcgagcccaucaucaacuucuacgacccccucgucuuccccuccgacgaguucgacgccuccaucucccaggucaacgagaagaucaaccagucccucgccuucauccgcaaguccgacgagcuccuccacaacgucaacgccggcaaguccaccaccaacaucaugaucaccaccaucaucaucgucaucaucgucauccuccucucccucaucgccgucggccuccuccucuacugcaaggcccgcuccacccccgucacccucuccaaggaccagcucuccggcaucaacaacaucgccuucuccaacugaggacuaguacuggcugcaucucccuuuccucuguccuccauccuucucccaggauggugaagggggaccugguacccagugauccccaccccaggauccuaaaucaugacuuaccugcuaauaaaaacucauuggaaaagugagaagaucuaaaaaaaaaaaaaaaaaaaaaaaaaaaaaaaaaaaaaaaaaaaaaaaaaaaaaaaaaaaaaaaaugcaucccccccccccccccccccccccccccccccaaaggcucuuuucagagccaccagaauu

SEQ ID NO: 982 - RNA, 2127 nt, Artificial Sequence
  mRNA product Design b-5 comprising derived and/or modified sequence from HRSV(A2)__F0_DSCav1 (opt3)
gggagacuccugucgggcggaaguaggaggaguagaguuuaaaaacaguacucuuuuuccgguucgggacguaguugaagcaacgacaagccggauaaccgcucuugagacaggaagcuuaccauggagcugcucauccuuaaggccaacgcuauuaccacaauacugacugcagugacguucugcuuugccagcggccagaauaucaccgaagaguucuaccaauccacauguucugcggucucaaaaggguauuugagugcuuuaagaacuggaugguacaccagcguuauuacaaucgaacuguccaacauuaaggagaauaaaugcaacgguaccgacgccaaggugaaacuaaucaagcaggaacucgauaaguauaaaaaugcaguaacugagcugcagcuucugaugcagucuacacccgccaccaacaauagggcucggcgcgaguugccucgauuuaugaacuacacgcucaauaacgcaaagaaaacuaaugugacccugucgaagaaacguaagagaagguuccugggcuuucucuuaggggucggaucagccauagcuagcggcguggccguuuguaaggugcugcaccuugaaggugaggucaacaaaaucaagagugcguugcuguccacaaauaaagcagugguaucucuaagcaacgggguuuccgugcucacuuucaagguccuggaccuuaaaaauuauauugauaagcaacuguugccaauccucaacaaacagucaugcaguauuagcaacaucgaaaccgugauagaguuucagcagaagaauaaccggcuguuagagauuacacgcgaguucucugugaaugccggagucaccacgccgguuuccacuuacaugcugacaaacucagaacuccuuagccugaucaaugacaugcccauuaccaacgaucaaaagaaauugaugaguaauaacgugcagaucguaagacagcagucuuauuccaucauguguauuauaaaggaagaggugcuagcuuacgucgugcaacugccucucuacggcguuaucgacacuccaugcuggaaacugcauacaagcccccuuuguaccacgaauaccaaggaaggcucgaacauuugccugacaaggacugaucgggggugguauugugacaaugccggaucuguguccuuuuucccucaggcagagaccugcaaaguccagucaaaccgcguguuuugugauacaaugaauaguuugacucucccaagcgagguaaaccugugcaauguugacaucuucaaccccaaguacgauugcaagauaaugaccuccaaaacagacgugucuagcucagucauuaccaguuuaggugcuaucguguccuguuauggcaagacuaaaugcacggccagcaacaagaaucgagggaucauuaaaacauuuucuaacggaugugauuacgucucaaauaagggcguggacaccguuaguguggguaacacucuguauuacguaaauaagcaagaagggaaaagccuauaugucaagggagagccuaucauuaacuucuacgacccacucguguucccguccgaugaauuugacgcgucuauaucgcagguuaaugagaaaaucaaccagagccuggccuucauuagaaaguccgaugaacuuuugcacaaugugaacgcaggcaaaucaaccacaaauaucaugaucaccacuauuauaaucgucauuaucgugauucugcucagucugaucgcuguaggccuucuguuguacugcaaggccaggucuacacccgugacgcucagcaaggaccagcuguccgggauaaacaauaucgcuuuuucaaacugaggacuaguacuggcugcaucucccuuuccucuguccuccauccuucucccaggauggugaagggggaccugguacccagugauccccaccccaggauccuaaaucaugacuuaccugcuaauaaaaacucauuggaaaagugagaagaucuaaaaaaaaaaaaaaaaaaaaaaaaaaaaaaaaaaaaaaaaaaaaaaaaaaaaaaaaaaaaaaaaugcaucccccccccccccccccccccccccccccccaaaggcucuuuucagagccaccagaauu

SEQ ID NO: 983 - RNA, 2127 nt, Artificial Sequence
  mRNA product Design b-5 comprising derived and/or modified sequence from HRSV(A2)__F0_DSCav1 (opt4)
gggagacuccugucgggcggaaguaggaggaguagaguuuaaaaacaguacucuuuuuccgguucgggacguaguugaagcaacgacaagccggauaaccgcucuugagacaggaagcuuaccauggagcugcugauccugaaggccaacgccaucaccaccauccugaccgccgugaccuucugcuucgccagcggccagaacaucaccgaggaguucuaccagagcaccugcagcgccgugagcaagggcuaccugagcgcccugagaaccggcugguacaccagcgugaucaccaucgagcugagcaacaucaaggagaacaagugcaacggcaccgacgccaaggugaagcugaucaagcaggagcuggacaaguacaagaacgccgugaccgagcugcagcugcugaugcagagcacccccgccaccaacaacagagccagaagagagcugcccagauucaugaacuacacccugaacaacgccaagaagaccaacgugacccugagcaagaagagaaagagaagauuccugggcuuccugcugggcgugggcagcgccaucgccagcggcguggccgugugcaaggugcugcaccuggagggcgaggugaacaagaucaagagcgcccugcugagcaccaacaaggccguggugagccugagcaacggcgugagcgugcugaccuucaaggugcuggaccugaagaacuacaucgacaagcagcugcugcccauccugaacaagcagagcugcagcaucagcaacaucgagaccgugaucgaguuccagcagaagaacaacagacugcuggagaucaccagagaguucagcgugaacgccggcgugaccacccccgugagcaccuacaugcugaccaacagcgagcugcugagccugaucaacgacaugcccaucaccaacgaccagaagaagcugaugagcaacaacgugcagaucgugagacagcagagcuacagcaucaugugcaucaucaaggaggaggugcuggccuacguggugcagcugccccuguacggcgugaucgacacccccugcuggaagcugcacaccagcccccugugcaccaccaacaccaaggagggcagcaacaucugccugaccagaaccgacagaggcugguacugcgacaacgccggcagcgugagcuucuucccccaggccgagaccugcaaggugcagagcaacagaguguucugcgacaccaugaacagccugacccugcccagcgaggugaaccugugcaacguggacaucuucaaccccaaguacgacugcaagaucaugaccagcaagaccgacgugagcagcagcgugaucaccagccugggcgccaucgugagcugcuacggcaagaccaagugcaccgccagcaacaagaacagaggcaucaucaagaccuucagcaacggcugcgacuacgugagcaacaagggcguggacaccgugagcgugggcaacacccuguacuacgugaacaagcaggagggcaagagccuguacgugaagggcgagcccaucaucaacuucuacgacccccugguguuccccagcgacgaguucgacgccagcaucagccaggugaacgagaagaucaaccagagccuggccuucaucagaaagagcgacgagcugcugcacaacgugaacgccggcaagagcaccaccaacaucaugaucaccaccaucaucaucgugaucaucgugauccugcugagccugaucgccgugggccugcugcuguacugcaaggccagaagcacccccgugacccugagcaaggaccagcugagcggcaucaacaacaucgccuucagcaacugaggacuaguacuggcugcaucucccuuuccucuguccuccauccuucucccaggauggugaagggggaccugguacccagugauccccaccccaggauccuaaaucaugacuuaccugcuaauaaaaacucauuggaaaagugagaagaucuaaaaaaaaaaaaaaaaaaaaaaaaaaaaaaaaaaaaaaaaaaaaaaaaaaaaaaaaaaaaaaaaugcaucccccccccccccccccccccccccccccccaaaggcucuuuucagagccaccagaauu

SEQ ID NO: 984 - RNA, 2127 nt, Artificial Sequence
  mRNA product Design b-5 comprising derived and/or modified sequence from HRSV(A2)__F0_DSCav1 (opt5)
gggagacuccugucgggcggaaguaggaggaguagaguuuaaaaacaguacucuuuuuccgguucgggacguaguugaagcaacgacaagccggauaaccgcucuugagacaggaagcuuaccauggagcugcucauccugaaggccaacgcuauuaccacaauccuuacggccgugaccuucugcuuugcgagcggccagaauauuacagaagaguucuaccaauccaccuguucugcugucagcaaaggguaucuguccgcccucagaacaggaugguacaccucuguuaucacaauugaacugagcaacaucaaggagaauaaaugcaacggcaccgacgccaaggugaaacuuaucaagcaggaacuggauaaguauaaaaaugcugugacggagcuccagcugcugaugcaguccacccccgccacaaacaaucgggcucgcagagagcucccucgguuuaugaacuacacccugaauaacgccaagaaaacaaaugucacccuuucuaagaaacgcaagagacgguuccugggguuucuccugggagugggcagcgcgauugccuccgggguugcuguguguaagguccuucaccuggaaggagaggugaacaaaaucaagagcgcccuccugucuacgaauaaagcuguugugucccugagcaacggcgucucugugcucacauucaaggugcuggaccuuaaaaauuauauugauaagcaacugcucccgauccugaacaaacaguccugcagcauuucuaacaucgaaaccgucauugaguuucagcagaagaauaaccgccuucuggagaucacaagagaauuuuccguuaaugccggcgugaccacccccgugagcacauacaugcucacgaacuccgagcugcugucucucaucaaugacaugccuauuaccaacgaucaaaagaaacugaugagcaauaacguccagaucgugcggcagcaguccuauagcauuauguguaucauuaaggaagagguucuugcguacgugguccaacugccccucuacggggugaucgacacaccuugcuggaaacugcauaccucuccccuuuguacaaccaauacgaaggaaggauccaacaucugccugacacgcaccgauagaggcugguauugugacaaugccgggagcguuucuuucuucccucaggcugagaccugcaaagugcagagcaaccgggucuuuugugauacaaugaacucccucacccugccgucugaggugaaucugugcaaugucgacauuuucaaccccaaguacgauugcaagaucaugacaagcaaaacggacguguccagcucuguuauuaccucccucggagccaucgugagcuguuauggcaagacaaaaugcaccgcuucuaacaagaaucgcgggauuaucaaaacauuuuccaacggaugugauuacgucagcaauaagggcguggacaccguuuccgugggcaacacgcuguauuacgucaauaagcaagaagggaaaucucuuuaugugaagggagagccuaucauuaacuucuacgacccccugguguucccuagcgaugaauuugacgccuccaucucucagguuaaugagaaaauuaaccagagccucgccuucaucagaaaguccgaugaacugcugcacaaugucaacgcuggcaaaagcaccacaaauauuaugaucaccacaauuaucaucgugauuaucgugauucuucucucucugaucgcggucgggcugcuccuguacugcaaggcccgguccacccccgugacgcuuagcaaggaccagcugucuggaauuaacaauaucgcuuuuuccaacugaggacuaguacuggcugcaucucccuuuccucuguccuccauccuucucccaggauggugaagggggaccugguacccagugauccccaccccaggauccuaaaucaugacuuaccugcuaauaaaaacucauuggaaaagugagaagaucuaaaaaaaaaaaaaaaaaaaaaaaaaaaaaaaaaaaaaaaaaaaaaaaaaaaaaaaaaaaaaaaaugcaucccccccccccccccccccccccccccccccaaaggcucuuuucagagccaccagaauu

SEQ ID NO: 985 - RNA, 2127 nt, Artificial Sequence
  mRNA product Design b-5 comprising derived and/or modified sequence from HRSV(A2)__F0_DSCav1 (opt6)
gggagacuccugucgggcggaaguaggaggaguagaguuuaaaaacaguacucuuuuuccgguucgggacguaguugaagcaacgacaagccggauaaccgcucuugagacaggaagcuuaccauggaauuauuaauccucaaagcgaacgcuauuacuaccauucuaacagcagucacauucugcuucgccucaggccaaaacauuacagaagaauuuuaccaaucaacaugcucugccguaucaaaaggcuaccuauccgcccuacgaacaggcugguacacaagcguaauaacaaucgaacuaucaaacauaaaagaaaacaaaugcaacgguacagacgccaaaguuaaacuaauaaaacaagaacucgauaaauacaaaaacgcaguaacagaauuacaacuacuaaugcaaucaacaccugcaacaaacaauagagccaggagagaauuaccucgauucaugaauuacacacucaauaacgcaaaaaaaaccaacguuacacuaucaaaaaaaagaaaacgacgauucuuaggauuccuacucggagucggaucagcaauagcaucuggcguugcaguaugcaaaguauuacacuuagaaggugaagucaauaaaauaaaaagcgcgcuacuaaguacaaacaaagcagucgucucccuaucaaacggagucucaguccuaacauucaaaguacucgaccuaaaaaauuacauagauaaacaacuacuuccaauauuaaacaaacaauccuguagcaucagcaauauagaaacaguaauagaauuucaacaaaaaaacaaccgauuauuagaaaucacucgagaauuuuccguaaacgccgggguaacaacuccagucucaaccuacaugcuaaccaauucagaacuauugagcuuaauaaacgacaugccaauaaccaacgaccaaaaaaaacuaaugucuaacaauguucaaaucgucagacaacaaaguuacaguauaauguguauaaucaaagaagaaguccuagcauacguaguccaacucccacuauauggaguuaucgacacaccauguuggaaauuacacaccucaccauuaugcacaaccaauacaaaagaaggaucaaacauaugccuuacacggacagaccgcggaugguauugugacaacgcuggcucagucuccuuuuucccacaagcagaaacaugcaaaguacaaucaaacagagucuuuugcgauaccaugaacucacuuacauuaccaagcgaaguaaaucuuuguaacgucgacaucuucaauccuaaauaugacugcaaaaucaugaccucaaaaacagacguuagcucuucaguaaucacuagcuuaggagcaaucguaucaugcuacggcaaaacaaaauguacagcaucaaauaaaaacagaggaaucauaaaaacauuuucaaacggaugcgauuauguaagcaacaaaggaguagauacuguaagcguaggaaacacauuguacuauguaaacaaacaagaaggaaaaucacucuauguaaaaggagaaccuauaaucaauuucuacgauccauuaguguucccaucagaugaauuugacgccucaauaucacaaguuaaugaaaaaauaaaucaaucgcuagcauucauacguaaaucagaugaauuacuacauaacguaaacgcaggcaaauccacaacaaauaucaugaucacaacaauuauaauaguaauaauaguaauacuacuaucacuaauagccguaggacuccuacuauacugcaaagcaagaucuacuccaguaacccucucaaaagaucaacuaagcggaauuaauaacaucgcauucagcaacuaaggacuaguacuggcugcaucucccuuuccucuguccuccauccuucucccaggauggugaagggggaccugguacccagugauccccaccccaggauccuaaaucaugacuuaccugcuaauaaaaacucauuggaaaagugagaagaucuaaaaaaaaaaaaaaaaaaaaaaaaaaaaaaaaaaaaaaaaaaaaaaaaaaaaaaaaaaaaaaaaugcaucccccccccccccccccccccccccccccccaaaggcucuuuucagagccaccagaauu

SEQ ID NO: 986 - RNA, 2127 nt, Artificial Sequence
  mRNA product Design b-5 comprising derived and/or modified sequence from HRSV(A2)__F0_DSCav1 (opt11)
gggagacuccugucgggcggaaguaggaggaguagaguuuaaaaacaguacucuuuuuccgguucgggacguaguugaagcaacgacaagccggauaaccgcucuugagacaggaagcuuaccauggaacuacuuauccucaaagccaacgccaucaccaccauccucacagcaguaaccuuuugcuucgccucaggccaaaauaucacagaagaauuuuaccagaguaccugcuccgccguauccaaaggauaccucagcgcgcuccgcaccggcugguacacuucaguaaucacaaucgaacuauccaacaucaaagaaaacaaaugcaacggcaccgacgcgaaagucaaacucaucaaacaagaacuagacaaauacaaaaaugccguaacagaacuacaacuguuaaugcagagcacacccgccaccaacaaccgcgcccgccgggaacucccccgauucaugaacuacacacucaacaacgccaaaaagacgaacgucacccucagcaagaaacgaaaacgcagauuccucgguuuccuacuaggcguaggcucagcaauagccuccggaguagccgucugcaaaguccugcacuuagaaggcgaagucaacaaaaucaaauccgcccuacucuccacgaacaaagccgucgucucccuguccaacggugucuccguuuuaaccuucaaaguucuggaccucaaaaacuacauagacaaacagcuucuccccauccucaacaaacaauccuguagcaucuccaacaucgaaaccgucauagaauuucaacagaaaaacaacagacugcucgaaaucacccgcgaguucuccgucaacgccggcgucacgacucccgucuccaccuauaugcucacgaacucggaacuccuuucccuaaucaacgacaugccgaucaccaacgaccaaaagaaacucaugucaaacaacguacaaauuguccgccaacaaucauacuccaucaugugcauaauuaaagaagaaguccucgcauacguaguccaacucccccucuacggcgucaucgacacccccugcuggaaacuccacaccuccccacucugcacaaccaacaccaaagaaggcucaaacauaugccuaacgcgcaccgaucgcgguugguacugcgacaacgccgguuccgucagcuucuucccccaagcagagacaugcaaaguccaaucaaaccgcgucuucugcgacaccaugaacucacuaacccuuccaagcgaagucaaccucugcaacguugacaucuucaaccccaaauacgacuguaaaaucaugaccuccaagaccgacguauccucuuccgucaucacaucccuaggcgcuaucguauccugcuaugguaaaaccaaaugcaccgccuccaacaaaaaccgcggcaucaucaagacauuuuccaacggcugcgacuacgugagcaacaaaggcgucgacaccgucuccguaggcaacacccucuacuauguaaacaaacaagagggcaaaucacucuacgucaaaggggaacccaucaucaacuucuacgacccgcucguauuccccagcgaugaguucgacgccuccaucucccaggucaacgaaaagauaaaccaaucacucgcauucauucguaaauccgacgaacuccuacacaacgugaaugcaggcaaaucgaccacuaacaucaugaucaccaccaucaucaucgucaucauagucauccuccugucccuuaucgccgucggucuuuuauuauacugcaaagcccgcagcacccccgucacccucucuaaggaccaacucagcggcaucaauaacaucgcauucucuaacuaaggacuaguacuggcugcaucucccuuuccucuguccuccauccuucucccaggauggugaagggggaccugguacccagugauccccaccccaggauccuaaaucaugacuuaccugcuaauaaaaacucauuggaaaagugagaagaucuaaaaaaaaaaaaaaaaaaaaaaaaaaaaaaaaaaaaaaaaaaaaaaaaaaaaaaaaaaaaaaaaugcaucccccccccccccccccccccccccccccccaaaggcucuuuucagagccaccagaauu

SEQ ID NO: 987 - RNA, 2033 nt, Artificial Sequence
  mRNA product Design c-1 comprising derived and/or modified sequence from HRSV(A2)__F0_DSCav1 (opt1)
gggagaguccgcucagccagguugcagaagcggcuuagcguguguccuaaucuucucucugcguguagguaggccugugccgcaaacaagcuuaccauggagcugcucauccugaaggccaacgccaucaccaccauccugacggcggugaccuucugcuucgccagcggccagaacaucaccgaggaguucuaccaguccacgugcagcgccgucuccaagggguaccucagcgcccugcggaccggcugguacaccuccgugaucaccaucgagcugagcaacaucaaggagaacaagugcaacgggaccgacgccaaggugaagcucaucaagcaggagcuggacaaguacaagaacgcggucacggagcugcagcuccugaugcaguccaccccggcaaccaacaaccgcgcccggcgcgagcugccccgguucaugaacuacacccucaacaacgccaagaagacgaacgugacccugagcaagaagcgcaagcggcgcuuccugggcuuccuccugggggugggcuccgccaucgcgagcggcgucgccgugugcaaggugcugcaccucgagggggaggucaacaagaucaagagcgcccugcuguccaccaacaaggccguggugagccucuccaacggcgucagcgugcugaccuucaaggugcuggaccucaagaacuacaucgacaagcagcugcugcccauccugaacaagcagagcugcuccaucagcaacaucgagacggugaucgaguuccagcagaagaacaaccggcuccuggagaucacccgcgaguucagcgugaacgccggggucaccacccccguguccacguacaugcugaccaacagcgagcuccugucccugaucaacgacaugccgaucaccaacgaccagaagaagcucaugagcaacaacgugcagaucguccggcagcaguccuacagcaucaugugcaucaucaaggaggaggugcuggcguacgugguccagcugccccucuacggcgugaucgacacccccugcuggaagcugcacacgagcccccugugcaccaccaacaccaaggagggguccaacaucugccucacgcgcaccgaccggggcugguacugcgacaacgccggcagcgucuccuucuucccgcaggccgagaccugcaaggugcagagcaaccgcguguucugcgacaccaugaacucccugacgcugcccagcgagguaaaccucugcaacgucgacaucuucaaccccaaguacgacugcaagaucaugaccuccaagaccgacgugagcuccagcgugaucaccucccugggggccaucgucagcugcuacggcaagacgaagugcaccgccagcaacaagaaccgggggaucaucaagaccuucuccaacggcugcgacuacgugagcaacaagggcguggacaccguguccgucgggaacacccuguacuacgugaacaagcaggagggcaagagccucuacgugaagggggagcccaucaucaacuucuacgacccgcuggucuuccccuccgacgaguucgacgcgagcaucucccaggugaacgagaagaucaaccagagccuggccuucauccgcaaguccgacgagcugcuccacaacgugaacgccggcaagagcacgaccaacaucaugaucaccaccaucaucaucgucaucaucgugauccugcugucccucaucgccguggggcugcugcucuacugcaaggcccggagcacgcccgucacccuguccaaggaccagcugagcggcaucaacaacaucgcguucuccaacugaggacuaguguccaccugucccuccugggcugcuggauugucucguuuuccugccaaauaaacaggaucagcgcuuuacagaucuaaaaaaaaaaaaaaaaaaaaaaaaaaaaaaaaaaaaaaaaaaaaaaaaaaaaaaaaaaaaaaaaugcaucccccccccccccccccccccccccccccccaaaggcucuuuucagagccaccagaauu

SEQ ID NO: 988 - RNA, 2033 nt, Artificial Sequence
  mRNA product Design c-1 comprising derived and/or modified sequence from HRSV(A2)__F0_DSCav1 (opt1)
gggagaguccgcucagccagguugcagaagcggcuuagcguguguccuaaucuucucucugcguguagguaggccugugccgcaaacaagcuuaccauggagcugcucauccugaaggccaacgccaucaccaccauccugacggcggugaccuucugcuucgccagcggccagaacaucaccgaggaguucuaccaguccacgugcagcgccgucuccaagggguaccucagcgcccugcgcaccggcugguacaccuccgugaucaccaucgagcugagcaacaucaaggagaacaagugcaacgggaccgacgccaaggugaagcucaucaagcaggagcuggacaaguacaagaacgcggucacggagcugcagcuccugaugcaguccacccccgccaccaacaaccgggcccgccgggagcugccgcgcuucaugaacuacacccucaacaacgccaagaagacgaacgugacccugagcaagaagcggaagcgccgguuccugggcuuccuccugggggugggcuccgcgaucgccagcggcgucgccgugugcaaggugcugcaccucgagggggaggucaacaagaucaaguccgcccugcugagcaccaacaaggccguggugucccucagcaacggcgucuccgugcugaccuucaaggugcuggaccucaagaacuacaucgacaagcagcugcugcccauccucaacaagcagagcugcuccaucagcaacaucgagacggucaucgaguuccagcagaagaacaaccgccugcuggagaucacccgggaguucuccgugaacgcgggggugaccacccccgucagcacguacaugcucaccaacagcgagcugcugucccucaucaacgacaugcccaucaccaacgaccagaagaagcugaugagcaacaacgugcagaucgugcgccagcaguccuacagcaucaugugcaucaucaaggaggagguccuggccuacguggugcagcucccgcuguacggcgucaucgacacccccugcuggaagcugcacacgagcccccucugcaccaccaacaccaaggaggggagcaacaucugccugacgcggaccgaccgcggcugguacugcgacaacgccggcuccgugagcuucuucccccaggccgagaccugcaagguccaguccaaccggguguucugcgacaccaugaacagccugacgcucccguccgaggugaaccugugcaacgucgacaucuucaaccccaaguacgacugcaagaucaugaccagcaagaccgacguguccagcuccgugaucaccagccugggggccaucgucuccugcuacggcaagacgaagugcaccgcgagcaacaagaaccgcgggaucaucaagaccuucuccaacggcugcgacuacgugagcaacaagggcguggacaccgucagcguggggaacacccucuacuacgugaacaagcaggagggcaagucccuguacgucaagggggagcccaucaucaacuucuacgacccccugguguucccgagcgacgaguucgacgccuccaucagccaggugaacgagaagaucaaccagucccucgccuucauccggaaguccgacgagcugcugcacaacgucaacgccggcaaguccacgaccaacaucaugaucaccaccaucaucaucgugaucaucgugauccugcucagccugaucgccgucgggcugcuccuguacugcaaggcgcgcuccacgcccgugacccugagcaaggaccagcucuccggcaucaacaacaucgccuucagcaacugaggacuaguguccaccugucccuccugggcugcuggauugucucguuuuccugccaaauaaacaggaucagcgcuuuacagaucuaaaaaaaaaaaaaaaaaaaaaaaaaaaaaaaaaaaaaaaaaaaaaaaaaaaaaaaaaaaaaaaaugcaucccccccccccccccccccccccccccccccaaaggcucuuuucagagccaccagaauu

SEQ ID NO: 989 - RNA, 2033 nt, Artificial Sequence
  mRNA product Design c-1 comprising derived and/or modified sequence from HRSV(A2)__F0_DSCav1 (opt2)
gggagaguccgcucagccagguugcagaagcggcuuagcguguguccuaaucuucucucugcguguagguaggccugugccgcaaacaagcuuaccauggagcuccucauccucaaggccaacgccaucaccaccauccucaccgccgucaccuucugcuucgccuccggccagaacaucaccgaggaguucuaccaguccaccugcuccgccgucuccaagggcuaccucuccgcccuccgcaccggcugguacaccuccgucaucaccaucgagcucuccaacaucaaggagaacaagugcaacggcaccgacgccaaggucaagcucaucaagcaggagcucgacaaguacaagaacgccgucaccgagcuccagcuccucaugcaguccacccccgccaccaacaaccgcgcccgccgcgagcucccccgcuucaugaacuacacccucaacaacgccaagaagaccaacgucacccucuccaagaagcgcaagcgccgcuuccucggcuuccuccucggcgucggcuccgccaucgccuccggcgucgccgucugcaagguccuccaccucgagggcgaggucaacaagaucaaguccgcccuccucuccaccaacaaggccgucgucucccucuccaacggcgucuccguccucaccuucaagguccucgaccucaagaacuacaucgacaagcagcuccuccccauccucaacaagcaguccugcuccaucuccaacaucgagaccgucaucgaguuccagcagaagaacaaccgccuccucgagaucacccgcgaguucuccgucaacgccggcgucaccacccccgucuccaccuacaugcucaccaacuccgagcuccucucccucaucaacgacaugcccaucaccaacgaccagaagaagcucauguccaacaacguccagaucguccgccagcaguccuacuccaucaugugcaucaucaaggaggagguccucgccuacgucguccagcucccccucuacggcgucaucgacacccccugcuggaagcuccacaccuccccccucugcaccaccaacaccaaggagggcuccaacaucugccucacccgcaccgaccgcggcugguacugcgacaacgccggcuccgucuccuucuucccccaggccgagaccugcaagguccaguccaaccgcgucuucugcgacaccaugaacucccucacccuccccuccgaggucaaccucugcaacgucgacaucuucaaccccaaguacgacugcaagaucaugaccuccaagaccgacgucuccuccuccgucaucaccucccucggcgccaucgucuccugcuacggcaagaccaagugcaccgccuccaacaagaaccgcggcaucaucaagaccuucuccaacggcugcgacuacgucuccaacaagggcgucgacaccgucuccgucggcaacacccucuacuacgucaacaagcaggagggcaagucccucuacgucaagggcgagcccaucaucaacuucuacgacccccucgucuuccccuccgacgaguucgacgccuccaucucccaggucaacgagaagaucaaccagucccucgccuucauccgcaaguccgacgagcuccuccacaacgucaacgccggcaaguccaccaccaacaucaugaucaccaccaucaucaucgucaucaucgucauccuccucucccucaucgccgucggccuccuccucuacugcaaggcccgcuccacccccgucacccucuccaaggaccagcucuccggcaucaacaacaucgccuucuccaacugaggacuaguguccaccugucccuccugggcugcuggauugucucguuuuccugccaaauaaacaggaucagcgcuuuacagaucuaaaaaaaaaaaaaaaaaaaaaaaaaaaaaaaaaaaaaaaaaaaaaaaaaaaaaaaaaaaaaaaaugcaucccccccccccccccccccccccccccccccaaaggcucuuuucagagccaccagaauu

SEQ ID NO: 990 - RNA, 2033 nt, Artificial Sequence
  mRNA product Design c-1 comprising derived and/or modified sequence from HRSV(A2)__F0_DSCav1 (opt3)
gggagaguccgcucagccagguugcagaagcggcuuagcguguguccuaaucuucucucugcguguagguaggccugugccgcaaacaagcuuaccauggagcugcucauccuuaaggccaacgcuauuaccacaauacugacugcagugacguucugcuuugccagcggccagaauaucaccgaagaguucuaccaauccacauguucugcggucucaaaaggguauuugagugcuuuaagaacuggaugguacaccagcguuauuacaaucgaacuguccaacauuaaggagaauaaaugcaacgguaccgacgccaaggugaaacuaaucaagcaggaacucgauaaguauaaaaaugcaguaacugagcugcagcuucugaugcagucuacacccgccaccaacaauagggcucggcgcgaguugccucgauuuaugaacuacacgcucaauaacgcaaagaaaacuaaugugacccugucgaagaaacguaagagaagguuccugggcuuucucuuaggggucggaucagccauagcuagcggcguggccguuuguaaggugcugcaccuugaaggugaggucaacaaaaucaagagugcguugcuguccacaaauaaagcagugguaucucuaagcaacgggguuuccgugcucacuuucaagguccuggaccuuaaaaauuauauugauaagcaacuguugccaauccucaacaaacagucaugcaguauuagcaacaucgaaaccgugauagaguuucagcagaagaauaaccggcuguuagagauuacacgcgaguucucugugaaugccggagucaccacgccgguuuccacuuacaugcugacaaacucagaacuccuuagccugaucaaugacaugcccauuaccaacgaucaaaagaaauugaugaguaauaacgugcagaucguaagacagcagucuuauuccaucauguguauuauaaaggaagaggugcuagcuuacgucgugcaacugccucucuacggcguuaucgacacuccaugcuggaaacugcauacaagcccccuuuguaccacgaauaccaaggaaggcucgaacauuugccugacaaggacugaucgggggugguauugugacaaugccggaucuguguccuuuuucccucaggcagagaccugcaaaguccagucaaaccgcguguuuugugauacaaugaauaguuugacucucccaagcgagguaaaccugugcaauguugacaucuucaaccccaaguacgauugcaagauaaugaccuccaaaacagacgugucuagcucagucauuaccaguuuaggugcuaucguguccuguuauggcaagacuaaaugcacggccagcaacaagaaucgagggaucauuaaaacauuuucuaacggaugugauuacgucucaaauaagggcguggacaccguuaguguggguaacacucuguauuacguaaauaagcaagaagggaaaagccuauaugucaagggagagccuaucauuaacuucuacgacccacucguguucccguccgaugaauuugacgcgucuauaucgcagguuaaugagaaaaucaaccagagccuggccuucauuagaaaguccgaugaacuuuugcacaaugugaacgcaggcaaaucaaccacaaauaucaugaucaccacuauuauaaucgucauuaucgugauucugcucagucugaucgcuguaggccuucuguuguacugcaaggccaggucuacacccgugacgcucagcaaggaccagcuguccgggauaaacaauaucgcuuuuucaaacugaggacuaguguccaccugucccuccugggcugcuggauugucucguuuuccugccaaauaaacaggaucagcgcuuuacagaucuaaaaaaaaaaaaaaaaaaaaaaaaaaaaaaaaaaaaaaaaaaaaaaaaaaaaaaaaaaaaaaaaugcaucccccccccccccccccccccccccccccccaaaggcucuuuucagagccaccagaauu

SEQ ID NO: 991 - RNA, 2033 nt, Artificial Sequence
  mRNA product Design c-1 comprising derived and/or modified sequence from HRSV(A2)__F0_DSCav1 (opt4)
gggagaguccgcucagccagguugcagaagcggcuuagcguguguccuaaucuucucucugcguguagguaggccugugccgcaaacaagcuuaccauggagcugcugauccugaaggccaacgccaucaccaccauccugaccgccgugaccuucugcuucgccagcggccagaacaucaccgaggaguucuaccagagcaccugcagcgccgugagcaagggcuaccugagcgcccugagaaccggcugguacaccagcgugaucaccaucgagcugagcaacaucaaggagaacaagugcaacggcaccgacgccaaggugaagcugaucaagcaggagcuggacaaguacaagaacgccgugaccgagcugcagcugcugaugcagagcacccccgccaccaacaacagagccagaagagagcugcccagauucaugaacuacacccugaacaacgccaagaagaccaacgugacccugagcaagaagagaaagagaagauuccugggcuuccugcugggcgugggcagcgccaucgccagcggcguggccgugugcaaggugcugcaccuggagggcgaggugaacaagaucaagagcgcccugcugagcaccaacaaggccguggugagccugagcaacggcgugagcgugcugaccuucaaggugcuggaccugaagaacuacaucgacaagcagcugcugcccauccugaacaagcagagcugcagcaucagcaacaucgagaccgugaucgaguuccagcagaagaacaacagacugcuggagaucaccagagaguucagcgugaacgccggcgugaccacccccgugagcaccuacaugcugaccaacagcgagcugcugagccugaucaacgacaugcccaucaccaacgaccagaagaagcugaugagcaacaacgugcagaucgugagacagcagagcuacagcaucaugugcaucaucaaggaggaggugcuggccuacguggugcagcugccccuguacggcgugaucgacacccccugcuggaagcugcacaccagcccccugugcaccaccaacaccaaggagggcagcaacaucugccugaccagaaccgacagaggcugguacugcgacaacgccggcagcgugagcuucuucccccaggccgagaccugcaaggugcagagcaacagaguguucugcgacaccaugaacagccugacccugcccagcgaggugaaccugugcaacguggacaucuucaaccccaaguacgacugcaagaucaugaccagcaagaccgacgugagcagcagcgugaucaccagccugggcgccaucgugagcugcuacggcaagaccaagugcaccgccagcaacaagaacagaggcaucaucaagaccuucagcaacggcugcgacuacgugagcaacaagggcguggacaccgugagcgugggcaacacccuguacuacgugaacaagcaggagggcaagagccuguacgugaagggcgagcccaucaucaacuucuacgacccccugguguuccccagcgacgaguucgacgccagcaucagccaggugaacgagaagaucaaccagagccuggccuucaucagaaagagcgacgagcugcugcacaacgugaacgccggcaagagcaccaccaacaucaugaucaccaccaucaucaucgugaucaucgugauccugcugagccugaucgccgugggccugcugcuguacugcaaggccagaagcacccccgugacccugagcaaggaccagcugagcggcaucaacaacaucgccuucagcaacugaggacuaguguccaccugucccuccugggcugcuggauugucucguuuuccugccaaauaaacaggaucagcgcuuuacagaucuaaaaaaaaaaaaaaaaaaaaaaaaaaaaaaaaaaaaaaaaaaaaaaaaaaaaaaaaaaaaaaaaugcaucccccccccccccccccccccccccccccccaaaggcucuuuucagagccaccagaauu

SEQ ID NO: 992 - RNA, 2033 nt, Artificial Sequence
  mRNA product Design c-1 comprising derived and/or modified sequence from HRSV(A2)__F0_DSCav1 (opt5)
gggagaguccgcucagccagguugcagaagcggcuuagcguguguccuaaucuucucucugcguguagguaggccugugccgcaaacaagcuuaccauggagcugcucauccugaaggccaacgcuauuaccacaauccuuacggccgugaccuucugcuuugcgagcggccagaauauuacagaagaguucuaccaauccaccuguucugcugucagcaaaggguaucuguccgcccucagaacaggaugguacaccucuguuaucacaauugaacugagcaacaucaaggagaauaaaugcaacggcaccgacgccaaggugaaacuuaucaagcaggaacuggauaaguauaaaaaugcugugacggagcuccagcugcugaugcaguccacccccgccacaaacaaucgggcucgcagagagcucccucgguuuaugaacuacacccugaauaacgccaagaaaacaaaugucacccuuucuaagaaacgcaagagacgguuccugggguuucuccugggagugggcagcgcgauugccuccgggguugcuguguguaagguccuucaccuggaaggagaggugaacaaaaucaagagcgcccuccugucuacgaauaaagcuguugugucccugagcaacggcgucucugugcucacauucaaggugcuggaccuuaaaaauuauauugauaagcaacugcucccgauccugaacaaacaguccugcagcauuucuaacaucgaaaccgucauugaguuucagcagaagaauaaccgccuucuggagaucacaagagaauuuuccguuaaugccggcgugaccacccccgugagcacauacaugcucacgaacuccgagcugcugucucucaucaaugacaugccuauuaccaacgaucaaaagaaacugaugagcaauaacguccagaucgugcggcagcaguccuauagcauuauguguaucauuaaggaagagguucuugcguacgugguccaacugccccucuacggggugaucgacacaccuugcuggaaacugcauaccucuccccuuuguacaaccaauacgaaggaaggauccaacaucugccugacacgcaccgauagaggcugguauugugacaaugccgggagcguuucuuucuucccucaggcugagaccugcaaagugcagagcaaccgggucuuuugugauacaaugaacucccucacccugccgucugaggugaaucugugcaaugucgacauuuucaaccccaaguacgauugcaagaucaugacaagcaaaacggacguguccagcucuguuauuaccucccucggagccaucgugagcuguuauggcaagacaaaaugcaccgcuucuaacaagaaucgcgggauuaucaaaacauuuuccaacggaugugauuacgucagcaauaagggcguggacaccguuuccgugggcaacacgcuguauuacgucaauaagcaagaagggaaaucucuuuaugugaagggagagccuaucauuaacuucuacgacccccugguguucccuagcgaugaauuugacgccuccaucucucagguuaaugagaaaauuaaccagagccucgccuucaucagaaaguccgaugaacugcugcacaaugucaacgcuggcaaaagcaccacaaauauuaugaucaccacaauuaucaucgugauuaucgugauucuucucucucugaucgcggucgggcugcuccuguacugcaaggcccgguccacccccgugacgcuuagcaaggaccagcugucuggaauuaacaauaucgcuuuuuccaacugaggacuaguguccaccugucccuccugggcugcuggauugucucguuuuccugccaaauaaacaggaucagcgcuuuacagaucuaaaaaaaaaaaaaaaaaaaaaaaaaaaaaaaaaaaaaaaaaaaaaaaaaaaaaaaaaaaaaaaaugcaucccccccccccccccccccccccccccccccaaaggcucuuuucagagccaccagaauu

SEQ ID NO: 993 - RNA, 2033 nt, Artificial Sequence
  mRNA product Design c-1 comprising derived and/or modified sequence from HRSV(A2)__F0_DSCav1 (opt6)
gggagaguccgcucagccagguugcagaagcggcuuagcguguguccuaaucuucucucugcguguagguaggccugugccgcaaacaagcuuaccauggaauuauuaauccucaaagcgaacgcuauuacuaccauucuaacagcagucacauucugcuucgccucaggccaaaacauuacagaagaauuuuaccaaucaacaugcucugccguaucaaaaggcuaccuauccgcccuacgaacaggcugguacacaagcguaauaacaaucgaacuaucaaacauaaaagaaaacaaaugcaacgguacagacgccaaaguuaaacuaauaaaacaagaacucgauaaauacaaaaacgcaguaacagaauuacaacuacuaaugcaaucaacaccugcaacaaacaauagagccaggagagaauuaccucgauucaugaauuacacacucaauaacgcaaaaaaaaccaacguuacacuaucaaaaaaaagaaaacgacgauucuuaggauuccuacucggagucggaucagcaauagcaucuggcguugcaguaugcaaaguauuacacuuagaaggugaagucaauaaaauaaaaagcgcgcuacuaaguacaaacaaagcagucgucucccuaucaaacggagucucaguccuaacauucaaaguacucgaccuaaaaaauuacauagauaaacaacuacuuccaauauuaaacaaacaauccuguagcaucagcaauauagaaacaguaauagaauuucaacaaaaaaacaaccgauuauuagaaaucacucgagaauuuuccguaaacgccgggguaacaacuccagucucaaccuacaugcuaaccaauucagaacuauugagcuuaauaaacgacaugccaauaaccaacgaccaaaaaaaacuaaugucuaacaauguucaaaucgucagacaacaaaguuacaguauaauguguauaaucaaagaagaaguccuagcauacguaguccaacucccacuauauggaguuaucgacacaccauguuggaaauuacacaccucaccauuaugcacaaccaauacaaaagaaggaucaaacauaugccuuacacggacagaccgcggaugguauugugacaacgcuggcucagucuccuuuuucccacaagcagaaacaugcaaaguacaaucaaacagagucuuuugcgauaccaugaacucacuuacauuaccaagcgaaguaaaucuuuguaacgucgacaucuucaauccuaaauaugacugcaaaaucaugaccucaaaaacagacguuagcucuucaguaaucacuagcuuaggagcaaucguaucaugcuacggcaaaacaaaauguacagcaucaaauaaaaacagaggaaucauaaaaacauuuucaaacggaugcgauuauguaagcaacaaaggaguagauacuguaagcguaggaaacacauuguacuauguaaacaaacaagaaggaaaaucacucuauguaaaaggagaaccuauaaucaauuucuacgauccauuaguguucccaucagaugaauuugacgccucaauaucacaaguuaaugaaaaaauaaaucaaucgcuagcauucauacguaaaucagaugaauuacuacauaacguaaacgcaggcaaauccacaacaaauaucaugaucacaacaauuauaauaguaauaauaguaauacuacuaucacuaauagccguaggacuccuacuauacugcaaagcaagaucuacuccaguaacccucucaaaagaucaacuaagcggaauuaauaacaucgcauucagcaacuaaggacuaguguccaccugucccuccugggcugcuggauugucucguuuuccugccaaauaaacaggaucagcgcuuuacagaucuaaaaaaaaaaaaaaaaaaaaaaaaaaaaaaaaaaaaaaaaaaaaaaaaaaaaaaaaaaaaaaaaugcaucccccccccccccccccccccccccccccccaaaggcucuuuucagagccaccagaauu

SEQ ID NO: 994 - RNA, 2033 nt, Artificial Sequence
  mRNA product Design c-1 comprising derived and/or modified sequence from HRSV(A2)__F0_DSCav1 (opt11)
gggagaguccgcucagccagguugcagaagcggcuuagcguguguccuaaucuucucucugcguguagguaggccugugccgcaaacaagcuuaccauggaacuacuuauccucaaagccaacgccaucaccaccauccucacagcaguaaccuuuugcuucgccucaggccaaaauaucacagaagaauuuuaccagaguaccugcuccgccguauccaaaggauaccucagcgcgcuccgcaccggcugguacacuucaguaaucacaaucgaacuauccaacaucaaagaaaacaaaugcaacggcaccgacgcgaaagucaaacucaucaaacaagaacuagacaaauacaaaaaugccguaacagaacuacaacuguuaaugcagagcacacccgccaccaacaaccgcgcccgccgggaacucccccgauucaugaacuacacacucaacaacgccaaaaagacgaacgucacccucagcaagaaacgaaaacgcagauuccucgguuuccuacuaggcguaggcucagcaauagccuccggaguagccgucugcaaaguccugcacuuagaaggcgaagucaacaaaaucaaauccgcccuacucuccacgaacaaagccgucgucucccuguccaacggugucuccguuuuaaccuucaaaguucuggaccucaaaaacuacauagacaaacagcuucuccccauccucaacaaacaauccuguagcaucuccaacaucgaaaccgucauagaauuucaacagaaaaacaacagacugcucgaaaucacccgcgaguucuccgucaacgccggcgucacgacucccgucuccaccuauaugcucacgaacucggaacuccuuucccuaaucaacgacaugccgaucaccaacgaccaaaagaaacucaugucaaacaacguacaaauuguccgccaacaaucauacuccaucaugugcauaauuaaagaagaaguccucgcauacguaguccaacucccccucuacggcgucaucgacacccccugcuggaaacuccacaccuccccacucugcacaaccaacaccaaagaaggcucaaacauaugccuaacgcgcaccgaucgcgguugguacugcgacaacgccgguuccgucagcuucuucccccaagcagagacaugcaaaguccaaucaaaccgcgucuucugcgacaccaugaacucacuaacccuuccaagcgaagucaaccucugcaacguugacaucuucaaccccaaauacgacuguaaaaucaugaccuccaagaccgacguauccucuuccgucaucacaucccuaggcgcuaucguauccugcuaugguaaaaccaaaugcaccgccuccaacaaaaaccgcggcaucaucaagacauuuuccaacggcugcgacuacgugagcaacaaaggcgucgacaccgucuccguaggcaacacccucuacuauguaaacaaacaagagggcaaaucacucuacgucaaaggggaacccaucaucaacuucuacgacccgcucguauuccccagcgaugaguucgacgccuccaucucccaggucaacgaaaagauaaaccaaucacucgcauucauucguaaauccgacgaacuccuacacaacgugaaugcaggcaaaucgaccacuaacaucaugaucaccaccaucaucaucgucaucauagucauccuccugucccuuaucgccgucggucuuuuauuauacugcaaagcccgcagcacccccgucacccucucuaaggaccaacucagcggcaucaauaacaucgcauucucuaacuaaggacuaguguccaccugucccuccugggcugcuggauugucucguuuuccugccaaauaaacaggaucagcgcuuuacagaucuaaaaaaaaaaaaaaaaaaaaaaaaaaaaaaaaaaaaaaaaaaaaaaaaaaaaaaaaaaaaaaaaugcaucccccccccccccccccccccccccccccccaaaggcucuuuucagagccaccagaauu

SEQ ID NO: 995 - RNA, 2123 nt, Artificial Sequence
  mRNA product Design c-2 comprising derived and/or modified sequence from HRSV(A2)__F0_DSCav1 (opt1)
gggagacuccugucgggcggaaguaggaggaguagaguuuaaaaacaguacucuuuuuccgguucgggacguaguugaagcaacgacaagccggauaaccgcucuugagacaggaagcuuaccauggagcugcucauccugaaggccaacgccaucaccaccauccugacggcggugaccuucugcuucgccagcggccagaacaucaccgaggaguucuaccaguccacgugcagcgccgucuccaagggguaccucagcgcccugcggaccggcugguacaccuccgugaucaccaucgagcugagcaacaucaaggagaacaagugcaacgggaccgacgccaaggugaagcucaucaagcaggagcuggacaaguacaagaacgcggucacggagcugcagcuccugaugcaguccaccccggcaaccaacaaccgcgcccggcgcgagcugccccgguucaugaacuacacccucaacaacgccaagaagacgaacgugacccugagcaagaagcgcaagcggcgcuuccugggcuuccuccugggggugggcuccgccaucgcgagcggcgucgccgugugcaaggugcugcaccucgagggggaggucaacaagaucaagagcgcccugcuguccaccaacaaggccguggugagccucuccaacggcgucagcgugcugaccuucaaggugcuggaccucaagaacuacaucgacaagcagcugcugcccauccugaacaagcagagcugcuccaucagcaacaucgagacggugaucgaguuccagcagaagaacaaccggcuccuggagaucacccgcgaguucagcgugaacgccggggucaccacccccguguccacguacaugcugaccaacagcgagcuccugucccugaucaacgacaugccgaucaccaacgaccagaagaagcucaugagcaacaacgugcagaucguccggcagcaguccuacagcaucaugugcaucaucaaggaggaggugcuggcguacgugguccagcugccccucuacggcgugaucgacacccccugcuggaagcugcacacgagcccccugugcaccaccaacaccaaggagggguccaacaucugccucacgcgcaccgaccggggcugguacugcgacaacgccggcagcgucuccuucuucccgcaggccgagaccugcaaggugcagagcaaccgcguguucugcgacaccaugaacucccugacgcugcccagcgagguaaaccucugcaacgucgacaucuucaaccccaaguacgacugcaagaucaugaccuccaagaccgacgugagcuccagcgugaucaccucccugggggccaucgucagcugcuacggcaagacgaagugcaccgccagcaacaagaaccgggggaucaucaagaccuucuccaacggcugcgacuacgugagcaacaagggcguggacaccguguccgucgggaacacccuguacuacgugaacaagcaggagggcaagagccucuacgugaagggggagcccaucaucaacuucuacgacccgcuggucuuccccuccgacgaguucgacgcgagcaucucccaggugaacgagaagaucaaccagagccuggccuucauccgcaaguccgacgagcugcuccacaacgugaacgccggcaagagcacgaccaacaucaugaucaccaccaucaucaucgucaucaucgugauccugcugucccucaucgccguggggcugcugcucuacugcaaggcccggagcacgcccgucacccuguccaaggaccagcugagcggcaucaacaacaucgcguucuccaacugaggacuaguggaagcauuuuccuggcugauuaaaagaaauuacucagcuauggucaucuguuccuguuagaaggcuaugcagcauauuauauacuaugcgcauguuaugaaaugcauaauaaaaaauuuuaaaaaaucuaaaagaucuaaaaaaaaaaaaaaaaaaaaaaaaaaaaaaaaaaaaaaaaaaaaaaaaaaaaaaaaaaaaaaaaugcaucccccccccccccccccccccccccccccccaaaggcucuuuucagagccaccagaauu

SEQ ID NO: 996 - RNA, 2123 nt, Artificial Sequence
  mRNA product Design c-2 comprising derived and/or modified sequence from HRSV(A2)__F0_DSCav1 (opt1)
gggagacuccugucgggcggaaguaggaggaguagaguuuaaaaacaguacucuuuuuccgguucgggacguaguugaagcaacgacaagccggauaaccgcucuugagacaggaagcuuaccauggagcugcucauccugaaggccaacgccaucaccaccauccugacggcggugaccuucugcuucgccagcggccagaacaucaccgaggaguucuaccaguccacgugcagcgccgucuccaagggguaccucagcgcccugcgcaccggcugguacaccuccgugaucaccaucgagcugagcaacaucaaggagaacaagugcaacgggaccgacgccaaggugaagcucaucaagcaggagcuggacaaguacaagaacgcggucacggagcugcagcuccugaugcaguccacccccgccaccaacaaccgggcccgccgggagcugccgcgcuucaugaacuacacccucaacaacgccaagaagacgaacgugacccugagcaagaagcggaagcgccgguuccugggcuuccuccugggggugggcuccgcgaucgccagcggcgucgccgugugcaaggugcugcaccucgagggggaggucaacaagaucaaguccgcccugcugagcaccaacaaggccguggugucccucagcaacggcgucuccgugcugaccuucaaggugcuggaccucaagaacuacaucgacaagcagcugcugcccauccucaacaagcagagcugcuccaucagcaacaucgagacggucaucgaguuccagcagaagaacaaccgccugcuggagaucacccgggaguucuccgugaacgcgggggugaccacccccgucagcacguacaugcucaccaacagcgagcugcugucccucaucaacgacaugcccaucaccaacgaccagaagaagcugaugagcaacaacgugcagaucgugcgccagcaguccuacagcaucaugugcaucaucaaggaggagguccuggccuacguggugcagcucccgcuguacggcgucaucgacacccccugcuggaagcugcacacgagcccccucugcaccaccaacaccaaggaggggagcaacaucugccugacgcggaccgaccgcggcugguacugcgacaacgccggcuccgugagcuucuucccccaggccgagaccugcaagguccaguccaaccggguguucugcgacaccaugaacagccugacgcucccguccgaggugaaccugugcaacgucgacaucuucaaccccaaguacgacugcaagaucaugaccagcaagaccgacguguccagcuccgugaucaccagccugggggccaucgucuccugcuacggcaagacgaagugcaccgcgagcaacaagaaccgcgggaucaucaagaccuucuccaacggcugcgacuacgugagcaacaagggcguggacaccgucagcguggggaacacccucuacuacgugaacaagcaggagggcaagucccuguacgucaagggggagcccaucaucaacuucuacgacccccugguguucccgagcgacgaguucgacgccuccaucagccaggugaacgagaagaucaaccagucccucgccuucauccggaaguccgacgagcugcugcacaacgucaacgccggcaaguccacgaccaacaucaugaucaccaccaucaucaucgugaucaucgugauccugcucagccugaucgccgucgggcugcuccuguacugcaaggcgcgcuccacgcccgugacccugagcaaggaccagcucuccggcaucaacaacaucgccuucagcaacugaggacuaguggaagcauuuuccuggcugauuaaaagaaauuacucagcuauggucaucuguuccuguuagaaggcuaugcagcauauuauauacuaugcgcauguuaugaaaugcauaauaaaaaauuuuaaaaaaucuaaaagaucuaaaaaaaaaaaaaaaaaaaaaaaaaaaaaaaaaaaaaaaaaaaaaaaaaaaaaaaaaaaaaaaaugcaucccccccccccccccccccccccccccccccaaaggcucuuuucagagccaccagaauu

SEQ ID NO: 997 - RNA, 2123 nt, Artificial Sequence
  mRNA product Design c-2 comprising derived and/or modified sequence from HRSV(A2)__F0_DSCav1 (opt2)
gggagacuccugucgggcggaaguaggaggaguagaguuuaaaaacaguacucuuuuuccgguucgggacguaguugaagcaacgacaagccggauaaccgcucuugagacaggaagcuuaccauggagcuccucauccucaaggccaacgccaucaccaccauccucaccgccgucaccuucugcuucgccuccggccagaacaucaccgaggaguucuaccaguccaccugcuccgccgucuccaagggcuaccucuccgcccuccgcaccggcugguacaccuccgucaucaccaucgagcucuccaacaucaaggagaacaagugcaacggcaccgacgccaaggucaagcucaucaagcaggagcucgacaaguacaagaacgccgucaccgagcuccagcuccucaugcaguccacccccgccaccaacaaccgcgcccgccgcgagcucccccgcuucaugaacuacacccucaacaacgccaagaagaccaacgucacccucuccaagaagcgcaagcgccgcuuccucggcuuccuccucggcgucggcuccgccaucgccuccggcgucgccgucugcaagguccuccaccucgagggcgaggucaacaagaucaaguccgcccuccucuccaccaacaaggccgucgucucccucuccaacggcgucuccguccucaccuucaagguccucgaccucaagaacuacaucgacaagcagcuccuccccauccucaacaagcaguccugcuccaucuccaacaucgagaccgucaucgaguuccagcagaagaacaaccgccuccucgagaucacccgcgaguucuccgucaacgccggcgucaccacccccgucuccaccuacaugcucaccaacuccgagcuccucucccucaucaacgacaugcccaucaccaacgaccagaagaagcucauguccaacaacguccagaucguccgccagcaguccuacuccaucaugugcaucaucaaggaggagguccucgccuacgucguccagcucccccucuacggcgucaucgacacccccugcuggaagcuccacaccuccccccucugcaccaccaacaccaaggagggcuccaacaucugccucacccgcaccgaccgcggcugguacugcgacaacgccggcuccgucuccuucuucccccaggccgagaccugcaagguccaguccaaccgcgucuucugcgacaccaugaacucccucacccuccccuccgaggucaaccucugcaacgucgacaucuucaaccccaaguacgacugcaagaucaugaccuccaagaccgacgucuccuccuccgucaucaccucccucggcgccaucgucuccugcuacggcaagaccaagugcaccgccuccaacaagaaccgcggcaucaucaagaccuucuccaacggcugcgacuacgucuccaacaagggcgucgacaccgucuccgucggcaacacccucuacuacgucaacaagcaggagggcaagucccucuacgucaagggcgagcccaucaucaacuucuacgacccccucgucuuccccuccgacgaguucgacgccuccaucucccaggucaacgagaagaucaaccagucccucgccuucauccgcaaguccgacgagcuccuccacaacgucaacgccggcaaguccaccaccaacaucaugaucaccaccaucaucaucgucaucaucgucauccuccucucccucaucgccgucggccuccuccucuacugcaaggcccgcuccacccccgucacccucuccaaggaccagcucuccggcaucaacaacaucgccuucuccaacugaggacuaguggaagcauuuuccuggcugauuaaaagaaauuacucagcuauggucaucuguuccuguuagaaggcuaugcagcauauuauauacuaugcgcauguuaugaaaugcauaauaaaaaauuuuaaaaaaucuaaaagaucuaaaaaaaaaaaaaaaaaaaaaaaaaaaaaaaaaaaaaaaaaaaaaaaaaaaaaaaaaaaaaaaaugcaucccccccccccccccccccccccccccccccaaaggcucuuuucagagccaccagaauu

SEQ ID NO: 998 - RNA, 2123 nt, Artificial Sequence
  mRNA product Design c-2 comprising derived and/or modified sequence from HRSV(A2)__F0_DSCav1 (opt3)
gggagacuccugucgggcggaaguaggaggaguagaguuuaaaaacaguacucuuuuuccgguucgggacguaguugaagcaacgacaagccggauaaccgcucuugagacaggaagcuuaccauggagcugcucauccuuaaggccaacgcuauuaccacaauacugacugcagugacguucugcuuugccagcggccagaauaucaccgaagaguucuaccaauccacauguucugcggucucaaaaggguauuugagugcuuuaagaacuggaugguacaccagcguuauuacaaucgaacuguccaacauuaaggagaauaaaugcaacgguaccgacgccaaggugaaacuaaucaagcaggaacucgauaaguauaaaaaugcaguaacugagcugcagcuucugaugcagucuacacccgccaccaacaauagggcucggcgcgaguugccucgauuuaugaacuacacgcucaauaacgcaaagaaaacuaaugugacccugucgaagaaacguaagagaagguuccugggcuuucucuuaggggucggaucagccauagcuagcggcguggccguuuguaaggugcugcaccuugaaggugaggucaacaaaaucaagagugcguugcuguccacaaauaaagcagugguaucucuaagcaacgggguuuccgugcucacuuucaagguccuggaccuuaaaaauuauauugauaagcaacuguugccaauccucaacaaacagucaugcaguauuagcaacaucgaaaccgugauagaguuucagcagaagaauaaccggcuguuagagauuacacgcgaguucucugugaaugccggagucaccacgccgguuuccacuuacaugcugacaaacucagaacuccuuagccugaucaaugacaugcccauuaccaacgaucaaaagaaauugaugaguaauaacgugcagaucguaagacagcagucuuauuccaucauguguauuauaaaggaagaggugcuagcuuacgucgugcaacugccucucuacggcguuaucgacacuccaugcuggaaacugcauacaagcccccuuuguaccacgaauaccaaggaaggcucgaacauuugccugacaaggacugaucgggggugguauugugacaaugccggaucuguguccuuuuucccucaggcagagaccugcaaaguccagucaaaccgcguguuuugugauacaaugaauaguuugacucucccaagcgagguaaaccugugcaauguugacaucuucaaccccaaguacgauugcaagauaaugaccuccaaaacagacgugucuagcucagucauuaccaguuuaggugcuaucguguccuguuauggcaagacuaaaugcacggccagcaacaagaaucgagggaucauuaaaacauuuucuaacggaugugauuacgucucaaauaagggcguggacaccguuaguguggguaacacucuguauuacguaaauaagcaagaagggaaaagccuauaugucaagggagagccuaucauuaacuucuacgacccacucguguucccguccgaugaauuugacgcgucuauaucgcagguuaaugagaaaaucaaccagagccuggccuucauuagaaaguccgaugaacuuuugcacaaugugaacgcaggcaaaucaaccacaaauaucaugaucaccacuauuauaaucgucauuaucgugauucugcucagucugaucgcuguaggccuucuguuguacugcaaggccaggucuacacccgugacgcucagcaaggaccagcuguccgggauaaacaauaucgcuuuuucaaacugaggacuaguggaagcauuuuccuggcugauuaaaagaaauuacucagcuauggucaucuguuccuguuagaaggcuaugcagcauauuauauacuaugcgcauguuaugaaaugcauaauaaaaaauuuuaaaaaaucuaaaagaucuaaaaaaaaaaaaaaaaaaaaaaaaaaaaaaaaaaaaaaaaaaaaaaaaaaaaaaaaaaaaaaaaugcaucccccccccccccccccccccccccccccccaaaggcucuuuucagagccaccagaauu

SEQ ID NO: 999 - RNA, 2123 nt, Artificial Sequence
  mRNA product Design c-2 comprising derived and/or modified sequence from HRSV(A2)__F0_DSCav1 (opt4)
gggagacuccugucgggcggaaguaggaggaguagaguuuaaaaacaguacucuuuuuccgguucgggacguaguugaagcaacgacaagccggauaaccgcucuugagacaggaagcuuaccauggagcugcugauccugaaggccaacgccaucaccaccauccugaccgccgugaccuucugcuucgccagcggccagaacaucaccgaggaguucuaccagagcaccugcagcgccgugagcaagggcuaccugagcgcccugagaaccggcugguacaccagcgugaucaccaucgagcugagcaacaucaaggagaacaagugcaacggcaccgacgccaaggugaagcugaucaagcaggagcuggacaaguacaagaacgccgugaccgagcugcagcugcugaugcagagcacccccgccaccaacaacagagccagaagagagcugcccagauucaugaacuacacccugaacaacgccaagaagaccaacgugacccugagcaagaagagaaagagaagauuccugggcuuccugcugggcgugggcagcgccaucgccagcggcguggccgugugcaaggugcugcaccuggagggcgaggugaacaagaucaagagcgcccugcugagcaccaacaaggccguggugagccugagcaacggcgugagcgugcugaccuucaaggugcuggaccugaagaacuacaucgacaagcagcugcugcccauccugaacaagcagagcugcagcaucagcaacaucgagaccgugaucgaguuccagcagaagaacaacagacugcuggagaucaccagagaguucagcgugaacgccggcgugaccacccccgugagcaccuacaugcugaccaacagcgagcugcugagccugaucaacgacaugcccaucaccaacgaccagaagaagcugaugagcaacaacgugcagaucgugagacagcagagcuacagcaucaugugcaucaucaaggaggaggugcuggccuacguggugcagcugccccuguacggcgugaucgacacccccugcuggaagcugcacaccagcccccugugcaccaccaacaccaaggagggcagcaacaucugccugaccagaaccgacagaggcugguacugcgacaacgccggcagcgugagcuucuucccccaggccgagaccugcaaggugcagagcaacagaguguucugcgacaccaugaacagccugacccugcccagcgaggugaaccugugcaacguggacaucuucaaccccaaguacgacugcaagaucaugaccagcaagaccgacgugagcagcagcgugaucaccagccugggcgccaucgugagcugcuacggcaagaccaagugcaccgccagcaacaagaacagaggcaucaucaagaccuucagcaacggcugcgacuacgugagcaacaagggcguggacaccgugagcgugggcaacacccuguacuacgugaacaagcaggagggcaagagccuguacgugaagggcgagcccaucaucaacuucuacgacccccugguguuccccagcgacgaguucgacgccagcaucagccaggugaacgagaagaucaaccagagccuggccuucaucagaaagagcgacgagcugcugcacaacgugaacgccggcaagagcaccaccaacaucaugaucaccaccaucaucaucgugaucaucgugauccugcugagccugaucgccgugggccugcugcuguacugcaaggccagaagcacccccgugacccugagcaaggaccagcugagcggcaucaacaacaucgccuucagcaacugaggacuaguggaagcauuuuccuggcugauuaaaagaaauuacucagcuauggucaucuguuccuguuagaaggcuaugcagcauauuauauacuaugcgcauguuaugaaaugcauaauaaaaaauuuuaaaaaaucuaaaagaucuaaaaaaaaaaaaaaaaaaaaaaaaaaaaaaaaaaaaaaaaaaaaaaaaaaaaaaaaaaaaaaaaugcaucccccccccccccccccccccccccccccccaaaggcucuuuucagagccaccagaauu

SEQ ID NO: 1000 - RNA, 2123 nt, Artificial Sequence
  mRNA product Design c-2 comprising derived and/or modified sequence from HRSV(A2)__F0_DSCav1 (opt5)
gggagacuccugucgggcggaaguaggaggaguagaguuuaaaaacaguacucuuuuuccgguucgggacguaguugaagcaacgacaagccggauaaccgcucuugagacaggaagcuuaccauggagcugcucauccugaaggccaacgcuauuaccacaauccuuacggccgugaccuucugcuuugcgagcggccagaauauuacagaagaguucuaccaauccaccuguucugcugucagcaaaggguaucuguccgcccucagaacaggaugguacaccucuguuaucacaauugaacugagcaacaucaaggagaauaaaugcaacggcaccgacgccaaggugaaacuuaucaagcaggaacuggauaaguauaaaaaugcugugacggagcuccagcugcugaugcaguccacccccgccacaaacaaucgggcucgcagagagcucccucgguuuaugaacuacacccugaauaacgccaagaaaacaaaugucacccuuucuaagaaacgcaagagacgguuccugggguuucuccugggagugggcagcgcgauugccuccgggguugcuguguguaagguccuucaccuggaaggagaggugaacaaaaucaagagcgcccuccugucuacgaauaaagcuguugugucccugagcaacggcgucucugugcucacauucaaggugcuggaccuuaaaaauuauauugauaagcaacugcucccgauccugaacaaacaguccugcagcauuucuaacaucgaaaccgucauugaguuucagcagaagaauaaccgccuucuggagaucacaagagaauuuuccguuaaugccggcgugaccacccccgugagcacauacaugcucacgaacuccgagcugcugucucucaucaaugacaugccuauuaccaacgaucaaaagaaacugaugagcaauaacguccagaucgugcggcagcaguccuauagcauuauguguaucauuaaggaagagguucuugcguacgugguccaacugccccucuacggggugaucgacacaccuugcuggaaacugcauaccucuccccuuuguacaaccaauacgaaggaaggauccaacaucugccugacacgcaccgauagaggcugguauugugacaaugccgggagcguuucuuucuucccucaggcugagaccugcaaagugcagagcaaccgggucuuuugugauacaaugaacucccucacccugccgucugaggugaaucugugcaaugucgacauuuucaaccccaaguacgauugcaagaucaugacaagcaaaacggacguguccagcucuguuauuaccucccucggagccaucgugagcuguuauggcaagacaaaaugcaccgcuucuaacaagaaucgcgggauuaucaaaacauuuuccaacggaugugauuacgucagcaauaagggcguggacaccguuuccgugggcaacacgcuguauuacgucaauaagcaagaagggaaaucucuuuaugugaagggagagccuaucauuaacuucuacgacccccugguguucccuagcgaugaauuugacgccuccaucucucagguuaaugagaaaauuaaccagagccucgccuucaucagaaaguccgaugaacugcugcacaaugucaacgcuggcaaaagcaccacaaauauuaugaucaccacaauuaucaucgugauuaucgugauucuucucucucugaucgcggucgggcugcuccuguacugcaaggcccgguccacccccgugacgcuuagcaaggaccagcugucuggaauuaacaauaucgcuuuuuccaacugaggacuaguggaagcauuuuccuggcugauuaaaagaaauuacucagcuauggucaucuguuccuguuagaaggcuaugcagcauauuauauacuaugcgcauguuaugaaaugcauaauaaaaaauuuuaaaaaaucuaaaagaucuaaaaaaaaaaaaaaaaaaaaaaaaaaaaaaaaaaaaaaaaaaaaaaaaaaaaaaaaaaaaaaaaugcaucccccccccccccccccccccccccccccccaaaggcucuuuucagagccaccagaauu

SEQ ID NO: 1001 - RNA, 2123 nt, Artificial Sequence
  mRNA product Design c-2 comprising derived and/or modified sequence from HRSV(A2)__F0_DSCav1 (opt6)
gggagacuccugucgggcggaaguaggaggaguagaguuuaaaaacaguacucuuuuuccgguucgggacguaguugaagcaacgacaagccggauaaccgcucuugagacaggaagcuuaccauggaauuauuaauccucaaagcgaacgcuauuacuaccauucuaacagcagucacauucugcuucgccucaggccaaaacauuacagaagaauuuuaccaaucaacaugcucugccguaucaaaaggcuaccuauccgcccuacgaacaggcugguacacaagcguaauaacaaucgaacuaucaaacauaaaagaaaacaaaugcaacgguacagacgccaaaguuaaacuaauaaaacaagaacucgauaaauacaaaaacgcaguaacagaauuacaacuacuaaugcaaucaacaccugcaacaaacaauagagccaggagagaauuaccucgauucaugaauuacacacucaauaacgcaaaaaaaaccaacguuacacuaucaaaaaaaagaaaacgacgauucuuaggauuccuacucggagucggaucagcaauagcaucuggcguugcaguaugcaaaguauuacacuuagaaggugaagucaauaaaauaaaaagcgcgcuacuaaguacaaacaaagcagucgucucccuaucaaacggagucucaguccuaacauucaaaguacucgaccuaaaaaauuacauagauaaacaacuacuuccaauauuaaacaaacaauccuguagcaucagcaauauagaaacaguaauagaauuucaacaaaaaaacaaccgauuauuagaaaucacucgagaauuuuccguaaacgccgggguaacaacuccagucucaaccuacaugcuaaccaauucagaacuauugagcuuaauaaacgacaugccaauaaccaacgaccaaaaaaaacuaaugucuaacaauguucaaaucgucagacaacaaaguuacaguauaauguguauaaucaaagaagaaguccuagcauacguaguccaacucccacuauauggaguuaucgacacaccauguuggaaauuacacaccucaccauuaugcacaaccaauacaaaagaaggaucaaacauaugccuuacacggacagaccgcggaugguauugugacaacgcuggcucagucuccuuuuucccacaagcagaaacaugcaaaguacaaucaaacagagucuuuugcgauaccaugaacucacuuacauuaccaagcgaaguaaaucuuuguaacgucgacaucuucaauccuaaauaugacugcaaaaucaugaccucaaaaacagacguuagcucuucaguaaucacuagcuuaggagcaaucguaucaugcuacggcaaaacaaaauguacagcaucaaauaaaaacagaggaaucauaaaaacauuuucaaacggaugcgauuauguaagcaacaaaggaguagauacuguaagcguaggaaacacauuguacuauguaaacaaacaagaaggaaaaucacucuauguaaaaggagaaccuauaaucaauuucuacgauccauuaguguucccaucagaugaauuugacgccucaauaucacaaguuaaugaaaaaauaaaucaaucgcuagcauucauacguaaaucagaugaauuacuacauaacguaaacgcaggcaaauccacaacaaauaucaugaucacaacaauuauaauaguaauaauaguaauacuacuaucacuaauagccguaggacuccuacuauacugcaaagcaagaucuacuccaguaacccucucaaaagaucaacuaagcggaauuaauaacaucgcauucagcaacuaaggacuaguggaagcauuuuccuggcugauuaaaagaaauuacucagcuauggucaucuguuccuguuagaaggcuaugcagcauauuauauacuaugcgcauguuaugaaaugcauaauaaaaaauuuuaaaaaaucuaaaagaucuaaaaaaaaaaaaaaaaaaaaaaaaaaaaaaaaaaaaaaaaaaaaaaaaaaaaaaaaaaaaaaaaugcaucccccccccccccccccccccccccccccccaaaggcucuuuucagagccaccagaauu

SEQ ID NO: 1002 - RNA, 2123 nt, Artificial Sequence
  mRNA product Design c-2 comprising derived and/or modified sequence from HRSV(A2)__F0_DSCav1 (opt11)
gggagacuccugucgggcggaaguaggaggaguagaguuuaaaaacaguacucuuuuuccgguucgggacguaguugaagcaacgacaagccggauaaccgcucuugagacaggaagcuuaccauggaacuacuuauccucaaagccaacgccaucaccaccauccucacagcaguaaccuuuugcuucgccucaggccaaaauaucacagaagaauuuuaccagaguaccugcuccgccguauccaaaggauaccucagcgcgcuccgcaccggcugguacacuucaguaaucacaaucgaacuauccaacaucaaagaaaacaaaugcaacggcaccgacgcgaaagucaaacucaucaaacaagaacuagacaaauacaaaaaugccguaacagaacuacaacuguuaaugcagagcacacccgccaccaacaaccgcgcccgccgggaacucccccgauucaugaacuacacacucaacaacgccaaaaagacgaacgucacccucagcaagaaacgaaaacgcagauuccucgguuuccuacuaggcguaggcucagcaauagccuccggaguagccgucugcaaaguccugcacuuagaaggcgaagucaacaaaaucaaauccgcccuacucuccacgaacaaagccgucgucucccuguccaacggugucuccguuuuaaccuucaaaguucuggaccucaaaaacuacauagacaaacagcuucuccccauccucaacaaacaauccuguagcaucuccaacaucgaaaccgucauagaauuucaacagaaaaacaacagacugcucgaaaucacccgcgaguucuccgucaacgccggcgucacgacucccgucuccaccuauaugcucacgaacucggaacuccuuucccuaaucaacgacaugccgaucaccaacgaccaaaagaaacucaugucaaacaacguacaaauuguccgccaacaaucauacuccaucaugugcauaauuaaagaagaaguccucgcauacguaguccaacucccccucuacggcgucaucgacacccccugcuggaaacuccacaccuccccacucugcacaaccaacaccaaagaaggcucaaacauaugccuaacgcgcaccgaucgcgguugguacugcgacaacgccgguuccgucagcuucuucccccaagcagagacaugcaaaguccaaucaaaccgcgucuucugcgacaccaugaacucacuaacccuuccaagcgaagucaaccucugcaacguugacaucuucaaccccaaauacgacuguaaaaucaugaccuccaagaccgacguauccucuuccgucaucacaucccuaggcgcuaucguauccugcuaugguaaaaccaaaugcaccgccuccaacaaaaaccgcggcaucaucaagacauuuuccaacggcugcgacuacgugagcaacaaaggcgucgacaccgucuccguaggcaacacccucuacuauguaaacaaacaagagggcaaaucacucuacgucaaaggggaacccaucaucaacuucuacgacccgcucguauuccccagcgaugaguucgacgccuccaucucccaggucaacgaaaagauaaaccaaucacucgcauucauucguaaauccgacgaacuccuacacaacgugaaugcaggcaaaucgaccacuaacaucaugaucaccaccaucaucaucgucaucauagucauccuccugucccuuaucgccgucggucuuuuauuauacugcaaagcccgcagcacccccgucacccucucuaaggaccaacucagcggcaucaauaacaucgcauucucuaacuaaggacuaguggaagcauuuuccuggcugauuaaaagaaauuacucagcuauggucaucuguuccuguuagaaggcuaugcagcauauuauauacuaugcgcauguuaugaaaugcauaauaaaaaauuuuaaaaaaucuaaaagaucuaaaaaaaaaaaaaaaaaaaaaaaaaaaaaaaaaaaaaaaaaaaaaaaaaaaaaaaaaaaaaaaaugcaucccccccccccccccccccccccccccccccaaaggcucuuuucagagccaccagaauu

SEQ ID NO: 1003 - RNA, 2100 nt, Artificial Sequence
  mRNA product Design c-3 comprising derived and/or modified sequence from HRSV(A2)__F0_DSCav1 (opt1)
gggagaguccgcucagccagguugcagaagcggcuuagcguguguccuaaucuucucucugcguguagguaggccugugccgcaaacaagcuuaccauggagcugcucauccugaaggccaacgccaucaccaccauccugacggcggugaccuucugcuucgccagcggccagaacaucaccgaggaguucuaccaguccacgugcagcgccgucuccaagggguaccucagcgcccugcggaccggcugguacaccuccgugaucaccaucgagcugagcaacaucaaggagaacaagugcaacgggaccgacgccaaggugaagcucaucaagcaggagcuggacaaguacaagaacgcggucacggagcugcagcuccugaugcaguccaccccggcaaccaacaaccgcgcccggcgcgagcugccccgguucaugaacuacacccucaacaacgccaagaagacgaacgugacccugagcaagaagcgcaagcggcgcuuccugggcuuccuccugggggugggcuccgccaucgcgagcggcgucgccgugugcaaggugcugcaccucgagggggaggucaacaagaucaagagcgcccugcuguccaccaacaaggccguggugagccucuccaacggcgucagcgugcugaccuucaaggugcuggaccucaagaacuacaucgacaagcagcugcugcccauccugaacaagcagagcugcuccaucagcaacaucgagacggugaucgaguuccagcagaagaacaaccggcuccuggagaucacccgcgaguucagcgugaacgccggggucaccacccccguguccacguacaugcugaccaacagcgagcuccugucccugaucaacgacaugccgaucaccaacgaccagaagaagcucaugagcaacaacgugcagaucguccggcagcaguccuacagcaucaugugcaucaucaaggaggaggugcuggcguacgugguccagcugccccucuacggcgugaucgacacccccugcuggaagcugcacacgagcccccugugcaccaccaacaccaaggagggguccaacaucugccucacgcgcaccgaccggggcugguacugcgacaacgccggcagcgucuccuucuucccgcaggccgagaccugcaaggugcagagcaaccgcguguucugcgacaccaugaacucccugacgcugcccagcgagguaaaccucugcaacgucgacaucuucaaccccaaguacgacugcaagaucaugaccuccaagaccgacgugagcuccagcgugaucaccucccugggggccaucgucagcugcuacggcaagacgaagugcaccgccagcaacaagaaccgggggaucaucaagaccuucuccaacggcugcgacuacgugagcaacaagggcguggacaccguguccgucgggaacacccuguacuacgugaacaagcaggagggcaagagccucuacgugaagggggagcccaucaucaacuucuacgacccgcuggucuuccccuccgacgaguucgacgcgagcaucucccaggugaacgagaagaucaaccagagccuggccuucauccgcaaguccgacgagcugcuccacaacgugaacgccggcaagagcacgaccaacaucaugaucaccaccaucaucaucgucaucaucgugauccugcugucccucaucgccguggggcugcugcucuacugcaaggcccggagcacgcccgucacccuguccaaggaccagcugagcggcaucaacaacaucgcguucuccaacugaggacuaguacuggcugcaucucccuuuccucuguccuccauccuucucccaggauggugaagggggaccugguacccagugauccccaccccaggauccuaaaucaugacuuaccugcuaauaaaaacucauuggaaaagugagaagaucuaaaaaaaaaaaaaaaaaaaaaaaaaaaaaaaaaaaaaaaaaaaaaaaaaaaaaaaaaaaaaaaaugcaucccccccccccccccccccccccccccccccaaaggcucuuuucagagccaccagaauu

SEQ ID NO: 1004 - RNA, 2100 nt, Artificial Sequence
  mRNA product Design c-3 comprising derived and/or modified sequence from HRSV(A2)__F0_DSCav1 (opt1)
gggagaguccgcucagccagguugcagaagcggcuuagcguguguccuaaucuucucucugcguguagguaggccugugccgcaaacaagcuuaccauggagcugcucauccugaaggccaacgccaucaccaccauccugacggcggugaccuucugcuucgccagcggccagaacaucaccgaggaguucuaccaguccacgugcagcgccgucuccaagggguaccucagcgcccugcgcaccggcugguacaccuccgugaucaccaucgagcugagcaacaucaaggagaacaagugcaacgggaccgacgccaaggugaagcucaucaagcaggagcuggacaaguacaagaacgcggucacggagcugcagcuccugaugcaguccacccccgccaccaacaaccgggcccgccgggagcugccgcgcuucaugaacuacacccucaacaacgccaagaagacgaacgugacccugagcaagaagcggaagcgccgguuccugggcuuccuccugggggugggcuccgcgaucgccagcggcgucgccgugugcaaggugcugcaccucgagggggaggucaacaagaucaaguccgcccugcugagcaccaacaaggccguggugucccucagcaacggcgucuccgugcugaccuucaaggugcuggaccucaagaacuacaucgacaagcagcugcugcccauccucaacaagcagagcugcuccaucagcaacaucgagacggucaucgaguuccagcagaagaacaaccgccugcuggagaucacccgggaguucuccgugaacgcgggggugaccacccccgucagcacguacaugcucaccaacagcgagcugcugucccucaucaacgacaugcccaucaccaacgaccagaagaagcugaugagcaacaacgugcagaucgugcgccagcaguccuacagcaucaugugcaucaucaaggaggagguccuggccuacguggugcagcucccgcuguacggcgucaucgacacccccugcuggaagcugcacacgagcccccucugcaccaccaacaccaaggaggggagcaacaucugccugacgcggaccgaccgcggcugguacugcgacaacgccggcuccgugagcuucuucccccaggccgagaccugcaagguccaguccaaccggguguucugcgacaccaugaacagccugacgcucccguccgaggugaaccugugcaacgucgacaucuucaaccccaaguacgacugcaagaucaugaccagcaagaccgacguguccagcuccgugaucaccagccugggggccaucgucuccugcuacggcaagacgaagugcaccgcgagcaacaagaaccgcgggaucaucaagaccuucuccaacggcugcgacuacgugagcaacaagggcguggacaccgucagcguggggaacacccucuacuacgugaacaagcaggagggcaagucccuguacgucaagggggagcccaucaucaacuucuacgacccccugguguucccgagcgacgaguucgacgccuccaucagccaggugaacgagaagaucaaccagucccucgccuucauccggaaguccgacgagcugcugcacaacgucaacgccggcaaguccacgaccaacaucaugaucaccaccaucaucaucgugaucaucgugauccugcucagccugaucgccgucgggcugcuccuguacugcaaggcgcgcuccacgcccgugacccugagcaaggaccagcucuccggcaucaacaacaucgccuucagcaacugaggacuaguacuggcugcaucucccuuuccucuguccuccauccuucucccaggauggugaagggggaccugguacccagugauccccaccccaggauccuaaaucaugacuuaccugcuaauaaaaacucauuggaaaagugagaagaucuaaaaaaaaaaaaaaaaaaaaaaaaaaaaaaaaaaaaaaaaaaaaaaaaaaaaaaaaaaaaaaaaugcaucccccccccccccccccccccccccccccccaaaggcucuuuucagagccaccagaauu

SEQ ID NO: 1005 - RNA, 2100 nt, Artificial Sequence
  mRNA product Design c-3 comprising derived and/or modified sequence from HRSV(A2)__F0_DSCav1 (opt2)
gggagaguccgcucagccagguugcagaagcggcuuagcguguguccuaaucuucucucugcguguagguaggccugugccgcaaacaagcuuaccauggagcuccucauccucaaggccaacgccaucaccaccauccucaccgccgucaccuucugcuucgccuccggccagaacaucaccgaggaguucuaccaguccaccugcuccgccgucuccaagggcuaccucuccgcccuccgcaccggcugguacaccuccgucaucaccaucgagcucuccaacaucaaggagaacaagugcaacggcaccgacgccaaggucaagcucaucaagcaggagcucgacaaguacaagaacgccgucaccgagcuccagcuccucaugcaguccacccccgccaccaacaaccgcgcccgccgcgagcucccccgcuucaugaacuacacccucaacaacgccaagaagaccaacgucacccucuccaagaagcgcaagcgccgcuuccucggcuuccuccucggcgucggcuccgccaucgccuccggcgucgccgucugcaagguccuccaccucgagggcgaggucaacaagaucaaguccgcccuccucuccaccaacaaggccgucgucucccucuccaacggcgucuccguccucaccuucaagguccucgaccucaagaacuacaucgacaagcagcuccuccccauccucaacaagcaguccugcuccaucuccaacaucgagaccgucaucgaguuccagcagaagaacaaccgccuccucgagaucacccgcgaguucuccgucaacgccggcgucaccacccccgucuccaccuacaugcucaccaacuccgagcuccucucccucaucaacgacaugcccaucaccaacgaccagaagaagcucauguccaacaacguccagaucguccgccagcaguccuacuccaucaugugcaucaucaaggaggagguccucgccuacgucguccagcucccccucuacggcgucaucgacacccccugcuggaagcuccacaccuccccccucugcaccaccaacaccaaggagggcuccaacaucugccucacccgcaccgaccgcggcugguacugcgacaacgccggcuccgucuccuucuucccccaggccgagaccugcaagguccaguccaaccgcgucuucugcgacaccaugaacucccucacccuccccuccgaggucaaccucugcaacgucgacaucuucaaccccaaguacgacugcaagaucaugaccuccaagaccgacgucuccuccuccgucaucaccucccucggcgccaucgucuccugcuacggcaagaccaagugcaccgccuccaacaagaaccgcggcaucaucaagaccuucuccaacggcugcgacuacgucuccaacaagggcgucgacaccgucuccgucggcaacacccucuacuacgucaacaagcaggagggcaagucccucuacgucaagggcgagcccaucaucaacuucuacgacccccucgucuuccccuccgacgaguucgacgccuccaucucccaggucaacgagaagaucaaccagucccucgccuucauccgcaaguccgacgagcuccuccacaacgucaacgccggcaaguccaccaccaacaucaugaucaccaccaucaucaucgucaucaucgucauccuccucucccucaucgccgucggccuccuccucuacugcaaggcccgcuccacccccgucacccucuccaaggaccagcucuccggcaucaacaacaucgccuucuccaacugaggacuaguacuggcugcaucucccuuuccucuguccuccauccuucucccaggauggugaagggggaccugguacccagugauccccaccccaggauccuaaaucaugacuuaccugcuaauaaaaacucauuggaaaagugagaagaucuaaaaaaaaaaaaaaaaaaaaaaaaaaaaaaaaaaaaaaaaaaaaaaaaaaaaaaaaaaaaaaaaugcaucccccccccccccccccccccccccccccccaaaggcucuuuucagagccaccagaauu

SEQ ID NO: 1006 - RNA, 2100 nt, Artificial Sequence
  mRNA product Design c-3 comprising derived and/or modified sequence from HRSV(A2)__F0_DSCav1 (opt3)
gggagaguccgcucagccagguugcagaagcggcuuagcguguguccuaaucuucucucugcguguagguaggccugugccgcaaacaagcuuaccauggagcugcucauccuuaaggccaacgcuauuaccacaauacugacugcagugacguucugcuuugccagcggccagaauaucaccgaagaguucuaccaauccacauguucugcggucucaaaaggguauuugagugcuuuaagaacuggaugguacaccagcguuauuacaaucgaacuguccaacauuaaggagaauaaaugcaacgguaccgacgccaaggugaaacuaaucaagcaggaacucgauaaguauaaaaaugcaguaacugagcugcagcuucugaugcagucuacacccgccaccaacaauagggcucggcgcgaguugccucgauuuaugaacuacacgcucaauaacgcaaagaaaacuaaugugacccugucgaagaaacguaagagaagguuccugggcuuucucuuaggggucggaucagccauagcuagcggcguggccguuuguaaggugcugcaccuugaaggugaggucaacaaaaucaagagugcguugcuguccacaaauaaagcagugguaucucuaagcaacgggguuuccgugcucacuuucaagguccuggaccuuaaaaauuauauugauaagcaacuguugccaauccucaacaaacagucaugcaguauuagcaacaucgaaaccgugauagaguuucagcagaagaauaaccggcuguuagagauuacacgcgaguucucugugaaugccggagucaccacgccgguuuccacuuacaugcugacaaacucagaacuccuuagccugaucaaugacaugcccauuaccaacgaucaaaagaaauugaugaguaauaacgugcagaucguaagacagcagucuuauuccaucauguguauuauaaaggaagaggugcuagcuuacgucgugcaacugccucucuacggcguuaucgacacuccaugcuggaaacugcauacaagcccccuuuguaccacgaauaccaaggaaggcucgaacauuugccugacaaggacugaucgggggugguauugugacaaugccggaucuguguccuuuuucccucaggcagagaccugcaaaguccagucaaaccgcguguuuugugauacaaugaauaguuugacucucccaagcgagguaaaccugugcaauguugacaucuucaaccccaaguacgauugcaagauaaugaccuccaaaacagacgugucuagcucagucauuaccaguuuaggugcuaucguguccuguuauggcaagacuaaaugcacggccagcaacaagaaucgagggaucauuaaaacauuuucuaacggaugugauuacgucucaaauaagggcguggacaccguuaguguggguaacacucuguauuacguaaauaagcaagaagggaaaagccuauaugucaagggagagccuaucauuaacuucuacgacccacucguguucccguccgaugaauuugacgcgucuauaucgcagguuaaugagaaaaucaaccagagccuggccuucauuagaaaguccgaugaacuuuugcacaaugugaacgcaggcaaaucaaccacaaauaucaugaucaccacuauuauaaucgucauuaucgugauucugcucagucugaucgcuguaggccuucuguuguacugcaaggccaggucuacacccgugacgcucagcaaggaccagcuguccgggauaaacaauaucgcuuuuucaaacugaggacuaguacuggcugcaucucccuuuccucuguccuccauccuucucccaggauggugaagggggaccugguacccagugauccccaccccaggauccuaaaucaugacuuaccugcuaauaaaaacucauuggaaaagugagaagaucuaaaaaaaaaaaaaaaaaaaaaaaaaaaaaaaaaaaaaaaaaaaaaaaaaaaaaaaaaaaaaaaaugcaucccccccccccccccccccccccccccccccaaaggcucuuuucagagccaccagaauu

SEQ ID NO: 1007 - RNA, 2100 nt, Artificial Sequence
  mRNA product Design c-3 comprising derived and/or modified sequence from HRSV(A2)__F0_DSCav1 (opt4)
gggagaguccgcucagccagguugcagaagcggcuuagcguguguccuaaucuucucucugcguguagguaggccugugccgcaaacaagcuuaccauggagcugcugauccugaaggccaacgccaucaccaccauccugaccgccgugaccuucugcuucgccagcggccagaacaucaccgaggaguucuaccagagcaccugcagcgccgugagcaagggcuaccugagcgcccugagaaccggcugguacaccagcgugaucaccaucgagcugagcaacaucaaggagaacaagugcaacggcaccgacgccaaggugaagcugaucaagcaggagcuggacaaguacaagaacgccgugaccgagcugcagcugcugaugcagagcacccccgccaccaacaacagagccagaagagagcugcccagauucaugaacuacacccugaacaacgccaagaagaccaacgugacccugagcaagaagagaaagagaagauuccugggcuuccugcugggcgugggcagcgccaucgccagcggcguggccgugugcaaggugcugcaccuggagggcgaggugaacaagaucaagagcgcccugcugagcaccaacaaggccguggugagccugagcaacggcgugagcgugcugaccuucaaggugcuggaccugaagaacuacaucgacaagcagcugcugcccauccugaacaagcagagcugcagcaucagcaacaucgagaccgugaucgaguuccagcagaagaacaacagacugcuggagaucaccagagaguucagcgugaacgccggcgugaccacccccgugagcaccuacaugcugaccaacagcgagcugcugagccugaucaacgacaugcccaucaccaacgaccagaagaagcugaugagcaacaacgugcagaucgugagacagcagagcuacagcaucaugugcaucaucaaggaggaggugcuggccuacguggugcagcugccccuguacggcgugaucgacacccccugcuggaagcugcacaccagcccccugugcaccaccaacaccaaggagggcagcaacaucugccugaccagaaccgacagaggcugguacugcgacaacgccggcagcgugagcuucuucccccaggccgagaccugcaaggugcagagcaacagaguguucugcgacaccaugaacagccugacccugcccagcgaggugaaccugugcaacguggacaucuucaaccccaaguacgacugcaagaucaugaccagcaagaccgacgugagcagcagcgugaucaccagccugggcgccaucgugagcugcuacggcaagaccaagugcaccgccagcaacaagaacagaggcaucaucaagaccuucagcaacggcugcgacuacgugagcaacaagggcguggacaccgugagcgugggcaacacccuguacuacgugaacaagcaggagggcaagagccuguacgugaagggcgagcccaucaucaacuucuacgacccccugguguuccccagcgacgaguucgacgccagcaucagccaggugaacgagaagaucaaccagagccuggccuucaucagaaagagcgacgagcugcugcacaacgugaacgccggcaagagcaccaccaacaucaugaucaccaccaucaucaucgugaucaucgugauccugcugagccugaucgccgugggccugcugcuguacugcaaggccagaagcacccccgugacccugagcaaggaccagcugagcggcaucaacaacaucgccuucagcaacugaggacuaguacuggcugcaucucccuuuccucuguccuccauccuucucccaggauggugaagggggaccugguacccagugauccccaccccaggauccuaaaucaugacuuaccugcuaauaaaaacucauuggaaaagugagaagaucuaaaaaaaaaaaaaaaaaaaaaaaaaaaaaaaaaaaaaaaaaaaaaaaaaaaaaaaaaaaaaaaaugcaucccccccccccccccccccccccccccccccaaaggcucuuuucagagccaccagaauu

SEQ ID NO: 1008 - RNA, 2100 nt, Artificial Sequence
  mRNA product Design c-3 comprising derived and/or modified sequence from HRSV(A2)__F0_DSCav1 (opt5)
gggagaguccgcucagccagguugcagaagcggcuuagcguguguccuaaucuucucucugcguguagguaggccugugccgcaaacaagcuuaccauggagcugcucauccugaaggccaacgcuauuaccacaauccuuacggccgugaccuucugcuuugcgagcggccagaauauuacagaagaguucuaccaauccaccuguucugcugucagcaaaggguaucuguccgcccucagaacaggaugguacaccucuguuaucacaauugaacugagcaacaucaaggagaauaaaugcaacggcaccgacgccaaggugaaacuuaucaagcaggaacuggauaaguauaaaaaugcugugacggagcuccagcugcugaugcaguccacccccgccacaaacaaucgggcucgcagagagcucccucgguuuaugaacuacacccugaauaacgccaagaaaacaaaugucacccuuucuaagaaacgcaagagacgguuccugggguuucuccugggagugggcagcgcgauugccuccgggguugcuguguguaagguccuucaccuggaaggagaggugaacaaaaucaagagcgcccuccugucuacgaauaaagcuguugugucccugagcaacggcgucucugugcucacauucaaggugcuggaccuuaaaaauuauauugauaagcaacugcucccgauccugaacaaacaguccugcagcauuucuaacaucgaaaccgucauugaguuucagcagaagaauaaccgccuucuggagaucacaagagaauuuuccguuaaugccggcgugaccacccccgugagcacauacaugcucacgaacuccgagcugcugucucucaucaaugacaugccuauuaccaacgaucaaaagaaacugaugagcaauaacguccagaucgugcggcagcaguccuauagcauuauguguaucauuaaggaagagguucuugcguacgugguccaacugccccucuacggggugaucgacacaccuugcuggaaacugcauaccucuccccuuuguacaaccaauacgaaggaaggauccaacaucugccugacacgcaccgauagaggcugguauugugacaaugccgggagcguuucuuucuucccucaggcugagaccugcaaagugcagagcaaccgggucuuuugugauacaaugaacucccucacccugccgucugaggugaaucugugcaaugucgacauuuucaaccccaaguacgauugcaagaucaugacaagcaaaacggacguguccagcucuguuauuaccucccucggagccaucgugagcuguuauggcaagacaaaaugcaccgcuucuaacaagaaucgcgggauuaucaaaacauuuuccaacggaugugauuacgucagcaauaagggcguggacaccguuuccgugggcaacacgcuguauuacgucaauaagcaagaagggaaaucucuuuaugugaagggagagccuaucauuaacuucuacgacccccugguguucccuagcgaugaauuugacgccuccaucucucagguuaaugagaaaauuaaccagagccucgccuucaucagaaaguccgaugaacugcugcacaaugucaacgcuggcaaaagcaccacaaauauuaugaucaccacaauuaucaucgugauuaucgugauucuucucucucugaucgcggucgggcugcuccuguacugcaaggcccgguccacccccgugacgcuuagcaaggaccagcugucuggaauuaacaauaucgcuuuuuccaacugaggacuaguacuggcugcaucucccuuuccucuguccuccauccuucucccaggauggugaagggggaccugguacccagugauccccaccccaggauccuaaaucaugacuuaccugcuaauaaaaacucauuggaaaagugagaagaucuaaaaaaaaaaaaaaaaaaaaaaaaaaaaaaaaaaaaaaaaaaaaaaaaaaaaaaaaaaaaaaaaugcaucccccccccccccccccccccccccccccccaaaggcucuuuucagagccaccagaauu

SEQ ID NO: 1009 - RNA, 2100 nt, Artificial Sequence
  mRNA product Design c-3 comprising derived and/or modified sequence from HRSV(A2)__F0_DSCav1 (opt6)
gggagaguccgcucagccagguugcagaagcggcuuagcguguguccuaaucuucucucugcguguagguaggccugugccgcaaacaagcuuaccauggaauuauuaauccucaaagcgaacgcuauuacuaccauucuaacagcagucacauucugcuucgccucaggccaaaacauuacagaagaauuuuaccaaucaacaugcucugccguaucaaaaggcuaccuauccgcccuacgaacaggcugguacacaagcguaauaacaaucgaacuaucaaacauaaaagaaaacaaaugcaacgguacagacgccaaaguuaaacuaauaaaacaagaacucgauaaauacaaaaacgcaguaacagaauuacaacuacuaaugcaaucaacaccugcaacaaacaauagagccaggagagaauuaccucgauucaugaauuacacacucaauaacgcaaaaaaaaccaacguuacacuaucaaaaaaaagaaaacgacgauucuuaggauuccuacucggagucggaucagcaauagcaucuggcguugcaguaugcaaaguauuacacuuagaaggugaagucaauaaaauaaaaagcgcgcuacuaaguacaaacaaagcagucgucucccuaucaaacggagucucaguccuaacauucaaaguacucgaccuaaaaaauuacauagauaaacaacuacuuccaauauuaaacaaacaauccuguagcaucagcaauauagaaacaguaauagaauuucaacaaaaaaacaaccgauuauuagaaaucacucgagaauuuuccguaaacgccgggguaacaacuccagucucaaccuacaugcuaaccaauucagaacuauugagcuuaauaaacgacaugccaauaaccaacgaccaaaaaaaacuaaugucuaacaauguucaaaucgucagacaacaaaguuacaguauaauguguauaaucaaagaagaaguccuagcauacguaguccaacucccacuauauggaguuaucgacacaccauguuggaaauuacacaccucaccauuaugcacaaccaauacaaaagaaggaucaaacauaugccuuacacggacagaccgcggaugguauugugacaacgcuggcucagucuccuuuuucccacaagcagaaacaugcaaaguacaaucaaacagagucuuuugcgauaccaugaacucacuuacauuaccaagcgaaguaaaucuuuguaacgucgacaucuucaauccuaaauaugacugcaaaaucaugaccucaaaaacagacguuagcucuucaguaaucacuagcuuaggagcaaucguaucaugcuacggcaaaacaaaauguacagcaucaaauaaaaacagaggaaucauaaaaacauuuucaaacggaugcgauuauguaagcaacaaaggaguagauacuguaagcguaggaaacacauuguacuauguaaacaaacaagaaggaaaaucacucuauguaaaaggagaaccuauaaucaauuucuacgauccauuaguguucccaucagaugaauuugacgccucaauaucacaaguuaaugaaaaaauaaaucaaucgcuagcauucauacguaaaucagaugaauuacuacauaacguaaacgcaggcaaauccacaacaaauaucaugaucacaacaauuauaauaguaauaauaguaauacuacuaucacuaauagccguaggacuccuacuauacugcaaagcaagaucuacuccaguaacccucucaaaagaucaacuaagcggaauuaauaacaucgcauucagcaacuaaggacuaguacuggcugcaucucccuuuccucuguccuccauccuucucccaggauggugaagggggaccugguacccagugauccccaccccaggauccuaaaucaugacuuaccugcuaauaaaaacucauuggaaaagugagaagaucuaaaaaaaaaaaaaaaaaaaaaaaaaaaaaaaaaaaaaaaaaaaaaaaaaaaaaaaaaaaaaaaaugcaucccccccccccccccccccccccccccccccaaaggcucuuuucagagccaccagaauu

SEQ ID NO: 1010 - RNA, 2100 nt, Artificial Sequence
  mRNA product Design c-3 comprising derived and/or modified sequence from HRSV(A2)__F0_DSCav1 (opt11)
gggagaguccgcucagccagguugcagaagcggcuuagcguguguccuaaucuucucucugcguguagguaggccugugccgcaaacaagcuuaccauggaacuacuuauccucaaagccaacgccaucaccaccauccucacagcaguaaccuuuugcuucgccucaggccaaaauaucacagaagaauuuuaccagaguaccugcuccgccguauccaaaggauaccucagcgcgcuccgcaccggcugguacacuucaguaaucacaaucgaacuauccaacaucaaagaaaacaaaugcaacggcaccgacgcgaaagucaaacucaucaaacaagaacuagacaaauacaaaaaugccguaacagaacuacaacuguuaaugcagagcacacccgccaccaacaaccgcgcccgccgggaacucccccgauucaugaacuacacacucaacaacgccaaaaagacgaacgucacccucagcaagaaacgaaaacgcagauuccucgguuuccuacuaggcguaggcucagcaauagccuccggaguagccgucugcaaaguccugcacuuagaaggcgaagucaacaaaaucaaauccgcccuacucuccacgaacaaagccgucgucucccuguccaacggugucuccguuuuaaccuucaaaguucuggaccucaaaaacuacauagacaaacagcuucuccccauccucaacaaacaauccuguagcaucuccaacaucgaaaccgucauagaauuucaacagaaaaacaacagacugcucgaaaucacccgcgaguucuccgucaacgccggcgucacgacucccgucuccaccuauaugcucacgaacucggaacuccuuucccuaaucaacgacaugccgaucaccaacgaccaaaagaaacucaugucaaacaacguacaaauuguccgccaacaaucauacuccaucaugugcauaauuaaagaagaaguccucgcauacguaguccaacucccccucuacggcgucaucgacacccccugcuggaaacuccacaccuccccacucugcacaaccaacaccaaagaaggcucaaacauaugccuaacgcgcaccgaucgcgguugguacugcgacaacgccgguuccgucagcuucuucccccaagcagagacaugcaaaguccaaucaaaccgcgucuucugcgacaccaugaacucacuaacccuuccaagcgaagucaaccucugcaacguugacaucuucaaccccaaauacgacuguaaaaucaugaccuccaagaccgacguauccucuuccgucaucacaucccuaggcgcuaucguauccugcuaugguaaaaccaaaugcaccgccuccaacaaaaaccgcggcaucaucaagacauuuuccaacggcugcgacuacgugagcaacaaaggcgucgacaccgucuccguaggcaacacccucuacuauguaaacaaacaagagggcaaaucacucuacgucaaaggggaacccaucaucaacuucuacgacccgcucguauuccccagcgaugaguucgacgccuccaucucccaggucaacgaaaagauaaaccaaucacucgcauucauucguaaauccgacgaacuccuacacaacgugaaugcaggcaaaucgaccacuaacaucaugaucaccaccaucaucaucgucaucauagucauccuccugucccuuaucgccgucggucuuuuauuauacugcaaagcccgcagcacccccgucacccucucuaaggaccaacucagcggcaucaauaacaucgcauucucuaacuaaggacuaguacuggcugcaucucccuuuccucuguccuccauccuucucccaggauggugaagggggaccugguacccagugauccccaccccaggauccuaaaucaugacuuaccugcuaauaaaaacucauuggaaaagugagaagaucuaaaaaaaaaaaaaaaaaaaaaaaaaaaaaaaaaaaaaaaaaaaaaaaaaaaaaaaaaaaaaaaaugcaucccccccccccccccccccccccccccccccaaaggcucuuuucagagccaccagaauu

SEQ ID NO: 1011 - RNA, 2096 nt, Artificial Sequence
  mRNA product Design c-4 comprising derived and/or modified sequence from HRSV(A2)__F0_DSCav1 (opt1)
gggagaguccgcucagccagguugcagaagcggcuuagcguguguccuaaucuucucucugcguguagguaggccugugccgcaaacaagcuuaccauggagcugcucauccugaaggccaacgccaucaccaccauccugacggcggugaccuucugcuucgccagcggccagaacaucaccgaggaguucuaccaguccacgugcagcgccgucuccaagggguaccucagcgcccugcggaccggcugguacaccuccgugaucaccaucgagcugagcaacaucaaggagaacaagugcaacgggaccgacgccaaggugaagcucaucaagcaggagcuggacaaguacaagaacgcggucacggagcugcagcuccugaugcaguccaccccggcaaccaacaaccgcgcccggcgcgagcugccccgguucaugaacuacacccucaacaacgccaagaagacgaacgugacccugagcaagaagcgcaagcggcgcuuccugggcuuccuccugggggugggcuccgccaucgcgagcggcgucgccgugugcaaggugcugcaccucgagggggaggucaacaagaucaagagcgcccugcuguccaccaacaaggccguggugagccucuccaacggcgucagcgugcugaccuucaaggugcuggaccucaagaacuacaucgacaagcagcugcugcccauccugaacaagcagagcugcuccaucagcaacaucgagacggugaucgaguuccagcagaagaacaaccggcuccuggagaucacccgcgaguucagcgugaacgccggggucaccacccccguguccacguacaugcugaccaacagcgagcuccugucccugaucaacgacaugccgaucaccaacgaccagaagaagcucaugagcaacaacgugcagaucguccggcagcaguccuacagcaucaugugcaucaucaaggaggaggugcuggcguacgugguccagcugccccucuacggcgugaucgacacccccugcuggaagcugcacacgagcccccugugcaccaccaacaccaaggagggguccaacaucugccucacgcgcaccgaccggggcugguacugcgacaacgccggcagcgucuccuucuucccgcaggccgagaccugcaaggugcagagcaaccgcguguucugcgacaccaugaacucccugacgcugcccagcgagguaaaccucugcaacgucgacaucuucaaccccaaguacgacugcaagaucaugaccuccaagaccgacgugagcuccagcgugaucaccucccugggggccaucgucagcugcuacggcaagacgaagugcaccgccagcaacaagaaccgggggaucaucaagaccuucuccaacggcugcgacuacgugagcaacaagggcguggacaccguguccgucgggaacacccuguacuacgugaacaagcaggagggcaagagccucuacgugaagggggagcccaucaucaacuucuacgacccgcuggucuuccccuccgacgaguucgacgcgagcaucucccaggugaacgagaagaucaaccagagccuggccuucauccgcaaguccgacgagcugcuccacaacgugaacgccggcaagagcacgaccaacaucaugaucaccaccaucaucaucgucaucaucgugauccugcugucccucaucgccguggggcugcugcucuacugcaaggcccggagcacgcccgucacccuguccaaggaccagcugagcggcaucaacaacaucgcguucuccaacugaggacuaguggaagcauuuuccuggcugauuaaaagaaauuacucagcuauggucaucuguuccuguuagaaggcuaugcagcauauuauauacuaugcgcauguuaugaaaugcauaauaaaaaauuuuaaaaaaucuaaaagaucuaaaaaaaaaaaaaaaaaaaaaaaaaaaaaaaaaaaaaaaaaaaaaaaaaaaaaaaaaaaaaaaaugcaucccccccccccccccccccccccccccccccaaaggcucuuuucagagccaccagaauu

SEQ ID NO: 1012 - RNA, 2096 nt, Artificial Sequence
  mRNA product Design c-4 comprising derived and/or modified sequence from HRSV(A2)__F0_DSCav1 (opt1)
gggagaguccgcucagccagguugcagaagcggcuuagcguguguccuaaucuucucucugcguguagguaggccugugccgcaaacaagcuuaccauggagcugcucauccugaaggccaacgccaucaccaccauccugacggcggugaccuucugcuucgccagcggccagaacaucaccgaggaguucuaccaguccacgugcagcgccgucuccaagggguaccucagcgcccugcgcaccggcugguacaccuccgugaucaccaucgagcugagcaacaucaaggagaacaagugcaacgggaccgacgccaaggugaagcucaucaagcaggagcuggacaaguacaagaacgcggucacggagcugcagcuccugaugcaguccacccccgccaccaacaaccgggcccgccgggagcugccgcgcuucaugaacuacacccucaacaacgccaagaagacgaacgugacccugagcaagaagcggaagcgccgguuccugggcuuccuccugggggugggcuccgcgaucgccagcggcgucgccgugugcaaggugcugcaccucgagggggaggucaacaagaucaaguccgcccugcugagcaccaacaaggccguggugucccucagcaacggcgucuccgugcugaccuucaaggugcuggaccucaagaacuacaucgacaagcagcugcugcccauccucaacaagcagagcugcuccaucagcaacaucgagacggucaucgaguuccagcagaagaacaaccgccugcuggagaucacccgggaguucuccgugaacgcgggggugaccacccccgucagcacguacaugcucaccaacagcgagcugcugucccucaucaacgacaugcccaucaccaacgaccagaagaagcugaugagcaacaacgugcagaucgugcgccagcaguccuacagcaucaugugcaucaucaaggaggagguccuggccuacguggugcagcucccgcuguacggcgucaucgacacccccugcuggaagcugcacacgagcccccucugcaccaccaacaccaaggaggggagcaacaucugccugacgcggaccgaccgcggcugguacugcgacaacgccggcuccgugagcuucuucccccaggccgagaccugcaagguccaguccaaccggguguucugcgacaccaugaacagccugacgcucccguccgaggugaaccugugcaacgucgacaucuucaaccccaaguacgacugcaagaucaugaccagcaagaccgacguguccagcuccgugaucaccagccugggggccaucgucuccugcuacggcaagacgaagugcaccgcgagcaacaagaaccgcgggaucaucaagaccuucuccaacggcugcgacuacgugagcaacaagggcguggacaccgucagcguggggaacacccucuacuacgugaacaagcaggagggcaagucccuguacgucaagggggagcccaucaucaacuucuacgacccccugguguucccgagcgacgaguucgacgccuccaucagccaggugaacgagaagaucaaccagucccucgccuucauccggaaguccgacgagcugcugcacaacgucaacgccggcaaguccacgaccaacaucaugaucaccaccaucaucaucgugaucaucgugauccugcucagccugaucgccgucgggcugcuccuguacugcaaggcgcgcuccacgcccgugacccugagcaaggaccagcucuccggcaucaacaacaucgccuucagcaacugaggacuaguggaagcauuuuccuggcugauuaaaagaaauuacucagcuauggucaucuguuccuguuagaaggcuaugcagcauauuauauacuaugcgcauguuaugaaaugcauaauaaaaaauuuuaaaaaaucuaaaagaucuaaaaaaaaaaaaaaaaaaaaaaaaaaaaaaaaaaaaaaaaaaaaaaaaaaaaaaaaaaaaaaaaugcaucccccccccccccccccccccccccccccccaaaggcucuuuucagagccaccagaauu

SEQ ID NO: 1013 - RNA, 2096 nt, Artificial Sequence
  mRNA product Design c-4 comprising derived and/or modified sequence from HRSV(A2)__F0_DSCav1 (opt2)
gggagaguccgcucagccagguugcagaagcggcuuagcguguguccuaaucuucucucugcguguagguaggccugugccgcaaacaagcuuaccauggagcuccucauccucaaggccaacgccaucaccaccauccucaccgccgucaccuucugcuucgccuccggccagaacaucaccgaggaguucuaccaguccaccugcuccgccgucuccaagggcuaccucuccgcccuccgcaccggcugguacaccuccgucaucaccaucgagcucuccaacaucaaggagaacaagugcaacggcaccgacgccaaggucaagcucaucaagcaggagcucgacaaguacaagaacgccgucaccgagcuccagcuccucaugcaguccacccccgccaccaacaaccgcgcccgccgcgagcucccccgcuucaugaacuacacccucaacaacgccaagaagaccaacgucacccucuccaagaagcgcaagcgccgcuuccucggcuuccuccucggcgucggcuccgccaucgccuccggcgucgccgucugcaagguccuccaccucgagggcgaggucaacaagaucaaguccgcccuccucuccaccaacaaggccgucgucucccucuccaacggcgucuccguccucaccuucaagguccucgaccucaagaacuacaucgacaagcagcuccuccccauccucaacaagcaguccugcuccaucuccaacaucgagaccgucaucgaguuccagcagaagaacaaccgccuccucgagaucacccgcgaguucuccgucaacgccggcgucaccacccccgucuccaccuacaugcucaccaacuccgagcuccucucccucaucaacgacaugcccaucaccaacgaccagaagaagcucauguccaacaacguccagaucguccgccagcaguccuacuccaucaugugcaucaucaaggaggagguccucgccuacgucguccagcucccccucuacggcgucaucgacacccccugcuggaagcuccacaccuccccccucugcaccaccaacaccaaggagggcuccaacaucugccucacccgcaccgaccgcggcugguacugcgacaacgccggcuccgucuccuucuucccccaggccgagaccugcaagguccaguccaaccgcgucuucugcgacaccaugaacucccucacccuccccuccgaggucaaccucugcaacgucgacaucuucaaccccaaguacgacugcaagaucaugaccuccaagaccgacgucuccuccuccgucaucaccucccucggcgccaucgucuccugcuacggcaagaccaagugcaccgccuccaacaagaaccgcggcaucaucaagaccuucuccaacggcugcgacuacgucuccaacaagggcgucgacaccgucuccgucggcaacacccucuacuacgucaacaagcaggagggcaagucccucuacgucaagggcgagcccaucaucaacuucuacgacccccucgucuuccccuccgacgaguucgacgccuccaucucccaggucaacgagaagaucaaccagucccucgccuucauccgcaaguccgacgagcuccuccacaacgucaacgccggcaaguccaccaccaacaucaugaucaccaccaucaucaucgucaucaucgucauccuccucucccucaucgccgucggccuccuccucuacugcaaggcccgcuccacccccgucacccucuccaaggaccagcucuccggcaucaacaacaucgccuucuccaacugaggacuaguggaagcauuuuccuggcugauuaaaagaaauuacucagcuauggucaucuguuccuguuagaaggcuaugcagcauauuauauacuaugcgcauguuaugaaaugcauaauaaaaaauuuuaaaaaaucuaaaagaucuaaaaaaaaaaaaaaaaaaaaaaaaaaaaaaaaaaaaaaaaaaaaaaaaaaaaaaaaaaaaaaaaugcaucccccccccccccccccccccccccccccccaaaggcucuuuucagagccaccagaauu

SEQ ID NO: 1014 - RNA, 2096 nt, Artificial Sequence
  mRNA product Design c-4 comprising derived and/or modified sequence from HRSV(A2)__F0_DSCav1 (opt3)
gggagaguccgcucagccagguugcagaagcggcuuagcguguguccuaaucuucucucugcguguagguaggccugugccgcaaacaagcuuaccauggagcugcucauccuuaaggccaacgcuauuaccacaauacugacugcagugacguucugcuuugccagcggccagaauaucaccgaagaguucuaccaauccacauguucugcggucucaaaaggguauuugagugcuuuaagaacuggaugguacaccagcguuauuacaaucgaacuguccaacauuaaggagaauaaaugcaacgguaccgacgccaaggugaaacuaaucaagcaggaacucgauaaguauaaaaaugcaguaacugagcugcagcuucugaugcagucuacacccgccaccaacaauagggcucggcgcgaguugccucgauuuaugaacuacacgcucaauaacgcaaagaaaacuaaugugacccugucgaagaaacguaagagaagguuccugggcuuucucuuaggggucggaucagccauagcuagcggcguggccguuuguaaggugcugcaccuugaaggugaggucaacaaaaucaagagugcguugcuguccacaaauaaagcagugguaucucuaagcaacgggguuuccgugcucacuuucaagguccuggaccuuaaaaauuauauugauaagcaacuguugccaauccucaacaaacagucaugcaguauuagcaacaucgaaaccgugauagaguuucagcagaagaauaaccggcuguuagagauuacacgcgaguucucugugaaugccggagucaccacgccgguuuccacuuacaugcugacaaacucagaacuccuuagccugaucaaugacaugcccauuaccaacgaucaaaagaaauugaugaguaauaacgugcagaucguaagacagcagucuuauuccaucauguguauuauaaaggaagaggugcuagcuuacgucgugcaacugccucucuacggcguuaucgacacuccaugcuggaaacugcauacaagcccccuuuguaccacgaauaccaaggaaggcucgaacauuugccugacaaggacugaucgggggugguauugugacaaugccggaucuguguccuuuuucccucaggcagagaccugcaaaguccagucaaaccgcguguuuugugauacaaugaauaguuugacucucccaagcgagguaaaccugugcaauguugacaucuucaaccccaaguacgauugcaagauaaugaccuccaaaacagacgugucuagcucagucauuaccaguuuaggugcuaucguguccuguuauggcaagacuaaaugcacggccagcaacaagaaucgagggaucauuaaaacauuuucuaacggaugugauuacgucucaaauaagggcguggacaccguuaguguggguaacacucuguauuacguaaauaagcaagaagggaaaagccuauaugucaagggagagccuaucauuaacuucuacgacccacucguguucccguccgaugaauuugacgcgucuauaucgcagguuaaugagaaaaucaaccagagccuggccuucauuagaaaguccgaugaacuuuugcacaaugugaacgcaggcaaaucaaccacaaauaucaugaucaccacuauuauaaucgucauuaucgugauucugcucagucugaucgcuguaggccuucuguuguacugcaaggccaggucuacacccgugacgcucagcaaggaccagcuguccgggauaaacaauaucgcuuuuucaaacugaggacuaguggaagcauuuuccuggcugauuaaaagaaauuacucagcuauggucaucuguuccuguuagaaggcuaugcagcauauuauauacuaugcgcauguuaugaaaugcauaauaaaaaauuuuaaaaaaucuaaaagaucuaaaaaaaaaaaaaaaaaaaaaaaaaaaaaaaaaaaaaaaaaaaaaaaaaaaaaaaaaaaaaaaaugcaucccccccccccccccccccccccccccccccaaaggcucuuuucagagccaccagaauu

SEQ ID NO: 1015 - RNA, 2096 nt, Artificial Sequence
  mRNA product Design c-4 comprising derived and/or modified sequence from HRSV(A2)__F0_DSCav1 (opt4)
gggagaguccgcucagccagguugcagaagcggcuuagcguguguccuaaucuucucucugcguguagguaggccugugccgcaaacaagcuuaccauggagcugcugauccugaaggccaacgccaucaccaccauccugaccgccgugaccuucugcuucgccagcggccagaacaucaccgaggaguucuaccagagcaccugcagcgccgugagcaagggcuaccugagcgcccugagaaccggcugguacaccagcgugaucaccaucgagcugagcaacaucaaggagaacaagugcaacggcaccgacgccaaggugaagcugaucaagcaggagcuggacaaguacaagaacgccgugaccgagcugcagcugcugaugcagagcacccccgccaccaacaacagagccagaagagagcugcccagauucaugaacuacacccugaacaacgccaagaagaccaacgugacccugagcaagaagagaaagagaagauuccugggcuuccugcugggcgugggcagcgccaucgccagcggcguggccgugugcaaggugcugcaccuggagggcgaggugaacaagaucaagagcgcccugcugagcaccaacaaggccguggugagccugagcaacggcgugagcgugcugaccuucaaggugcuggaccugaagaacuacaucgacaagcagcugcugcccauccugaacaagcagagcugcagcaucagcaacaucgagaccgugaucgaguuccagcagaagaacaacagacugcuggagaucaccagagaguucagcgugaacgccggcgugaccacccccgugagcaccuacaugcugaccaacagcgagcugcugagccugaucaacgacaugcccaucaccaacgaccagaagaagcugaugagcaacaacgugcagaucgugagacagcagagcuacagcaucaugugcaucaucaaggaggaggugcuggccuacguggugcagcugccccuguacggcgugaucgacacccccugcuggaagcugcacaccagcccccugugcaccaccaacaccaaggagggcagcaacaucugccugaccagaaccgacagaggcugguacugcgacaacgccggcagcgugagcuucuucccccaggccgagaccugcaaggugcagagcaacagaguguucugcgacaccaugaacagccugacccugcccagcgaggugaaccugugcaacguggacaucuucaaccccaaguacgacugcaagaucaugaccagcaagaccgacgugagcagcagcgugaucaccagccugggcgccaucgugagcugcuacggcaagaccaagugcaccgccagcaacaagaacagaggcaucaucaagaccuucagcaacggcugcgacuacgugagcaacaagggcguggacaccgugagcgugggcaacacccuguacuacgugaacaagcaggagggcaagagccuguacgugaagggcgagcccaucaucaacuucuacgacccccugguguuccccagcgacgaguucgacgccagcaucagccaggugaacgagaagaucaaccagagccuggccuucaucagaaagagcgacgagcugcugcacaacgugaacgccggcaagagcaccaccaacaucaugaucaccaccaucaucaucgugaucaucgugauccugcugagccugaucgccgugggccugcugcuguacugcaaggccagaagcacccccgugacccugagcaaggaccagcugagcggcaucaacaacaucgccuucagcaacugaggacuaguggaagcauuuuccuggcugauuaaaagaaauuacucagcuauggucaucuguuccuguuagaaggcuaugcagcauauuauauacuaugcgcauguuaugaaaugcauaauaaaaaauuuuaaaaaaucuaaaagaucuaaaaaaaaaaaaaaaaaaaaaaaaaaaaaaaaaaaaaaaaaaaaaaaaaaaaaaaaaaaaaaaaugcaucccccccccccccccccccccccccccccccaaaggcucuuuucagagccaccagaauu

SEQ ID NO: 1016 - RNA, 2096 nt, Artificial Sequence
  mRNA product Design c-4 comprising derived and/or modified sequence from HRSV(A2)__F0_DSCav1 (opt5)
gggagaguccgcucagccagguugcagaagcggcuuagcguguguccuaaucuucucucugcguguagguaggccugugccgcaaacaagcuuaccauggagcugcucauccugaaggccaacgcuauuaccacaauccuuacggccgugaccuucugcuuugcgagcggccagaauauuacagaagaguucuaccaauccaccuguucugcugucagcaaaggguaucuguccgcccucagaacaggaugguacaccucuguuaucacaauugaacugagcaacaucaaggagaauaaaugcaacggcaccgacgccaaggugaaacuuaucaagcaggaacuggauaaguauaaaaaugcugugacggagcuccagcugcugaugcaguccacccccgccacaaacaaucgggcucgcagagagcucccucgguuuaugaacuacacccugaauaacgccaagaaaacaaaugucacccuuucuaagaaacgcaagagacgguuccugggguuucuccugggagugggcagcgcgauugccuccgggguugcuguguguaagguccuucaccuggaaggagaggugaacaaaaucaagagcgcccuccugucuacgaauaaagcuguugugucccugagcaacggcgucucugugcucacauucaaggugcuggaccuuaaaaauuauauugauaagcaacugcucccgauccugaacaaacaguccugcagcauuucuaacaucgaaaccgucauugaguuucagcagaagaauaaccgccuucuggagaucacaagagaauuuuccguuaaugccggcgugaccacccccgugagcacauacaugcucacgaacuccgagcugcugucucucaucaaugacaugccuauuaccaacgaucaaaagaaacugaugagcaauaacguccagaucgugcggcagcaguccuauagcauuauguguaucauuaaggaagagguucuugcguacgugguccaacugccccucuacggggugaucgacacaccuugcuggaaacugcauaccucuccccuuuguacaaccaauacgaaggaaggauccaacaucugccugacacgcaccgauagaggcugguauugugacaaugccgggagcguuucuuucuucccucaggcugagaccugcaaagugcagagcaaccgggucuuuugugauacaaugaacucccucacccugccgucugaggugaaucugugcaaugucgacauuuucaaccccaaguacgauugcaagaucaugacaagcaaaacggacguguccagcucuguuauuaccucccucggagccaucgugagcuguuauggcaagacaaaaugcaccgcuucuaacaagaaucgcgggauuaucaaaacauuuuccaacggaugugauuacgucagcaauaagggcguggacaccguuuccgugggcaacacgcuguauuacgucaauaagcaagaagggaaaucucuuuaugugaagggagagccuaucauuaacuucuacgacccccugguguucccuagcgaugaauuugacgccuccaucucucagguuaaugagaaaauuaaccagagccucgccuucaucagaaaguccgaugaacugcugcacaaugucaacgcuggcaaaagcaccacaaauauuaugaucaccacaauuaucaucgugauuaucgugauucuucucucucugaucgcggucgggcugcuccuguacugcaaggcccgguccacccccgugacgcuuagcaaggaccagcugucuggaauuaacaauaucgcuuuuuccaacugaggacuaguggaagcauuuuccuggcugauuaaaagaaauuacucagcuauggucaucuguuccuguuagaaggcuaugcagcauauuauauacuaugcgcauguuaugaaaugcauaauaaaaaauuuuaaaaaaucuaaaagaucuaaaaaaaaaaaaaaaaaaaaaaaaaaaaaaaaaaaaaaaaaaaaaaaaaaaaaaaaaaaaaaaaugcaucccccccccccccccccccccccccccccccaaaggcucuuuucagagccaccagaauu

SEQ ID NO: 1017 - RNA, 2096 nt, Artificial Sequence
  mRNA product Design c-4 comprising derived and/or modified sequence from HRSV(A2)__F0_DSCav1 (opt6)
gggagaguccgcucagccagguugcagaagcggcuuagcguguguccuaaucuucucucugcguguagguaggccugugccgcaaacaagcuuaccauggaauuauuaauccucaaagcgaacgcuauuacuaccauucuaacagcagucacauucugcuucgccucaggccaaaacauuacagaagaauuuuaccaaucaacaugcucugccguaucaaaaggcuaccuauccgcccuacgaacaggcugguacacaagcguaauaacaaucgaacuaucaaacauaaaagaaaacaaaugcaacgguacagacgccaaaguuaaacuaauaaaacaagaacucgauaaauacaaaaacgcaguaacagaauuacaacuacuaaugcaaucaacaccugcaacaaacaauagagccaggagagaauuaccucgauucaugaauuacacacucaauaacgcaaaaaaaaccaacguuacacuaucaaaaaaaagaaaacgacgauucuuaggauuccuacucggagucggaucagcaauagcaucuggcguugcaguaugcaaaguauuacacuuagaaggugaagucaauaaaauaaaaagcgcgcuacuaaguacaaacaaagcagucgucucccuaucaaacggagucucaguccuaacauucaaaguacucgaccuaaaaaauuacauagauaaacaacuacuuccaauauuaaacaaacaauccuguagcaucagcaauauagaaacaguaauagaauuucaacaaaaaaacaaccgauuauuagaaaucacucgagaauuuuccguaaacgccgggguaacaacuccagucucaaccuacaugcuaaccaauucagaacuauugagcuuaauaaacgacaugccaauaaccaacgaccaaaaaaaacuaaugucuaacaauguucaaaucgucagacaacaaaguuacaguauaauguguauaaucaaagaagaaguccuagcauacguaguccaacucccacuauauggaguuaucgacacaccauguuggaaauuacacaccucaccauuaugcacaaccaauacaaaagaaggaucaaacauaugccuuacacggacagaccgcggaugguauugugacaacgcuggcucagucuccuuuuucccacaagcagaaacaugcaaaguacaaucaaacagagucuuuugcgauaccaugaacucacuuacauuaccaagcgaaguaaaucuuuguaacgucgacaucuucaauccuaaauaugacugcaaaaucaugaccucaaaaacagacguuagcucuucaguaaucacuagcuuaggagcaaucguaucaugcuacggcaaaacaaaauguacagcaucaaauaaaaacagaggaaucauaaaaacauuuucaaacggaugcgauuauguaagcaacaaaggaguagauacuguaagcguaggaaacacauuguacuauguaaacaaacaagaaggaaaaucacucuauguaaaaggagaaccuauaaucaauuucuacgauccauuaguguucccaucagaugaauuugacgccucaauaucacaaguuaaugaaaaaauaaaucaaucgcuagcauucauacguaaaucagaugaauuacuacauaacguaaacgcaggcaaauccacaacaaauaucaugaucacaacaauuauaauaguaauaauaguaauacuacuaucacuaauagccguaggacuccuacuauacugcaaagcaagaucuacuccaguaacccucucaaaagaucaacuaagcggaauuaauaacaucgcauucagcaacuaaggacuaguggaagcauuuuccuggcugauuaaaagaaauuacucagcuauggucaucuguuccuguuagaaggcuaugcagcauauuauauacuaugcgcauguuaugaaaugcauaauaaaaaauuuuaaaaaaucuaaaagaucuaaaaaaaaaaaaaaaaaaaaaaaaaaaaaaaaaaaaaaaaaaaaaaaaaaaaaaaaaaaaaaaaugcaucccccccccccccccccccccccccccccccaaaggcucuuuucagagccaccagaauu

SEQ ID NO: 1018 - RNA, 2096 nt, Artificial Sequence
  mRNA product Design c-4 comprising derived and/or modified sequence from HRSV(A2)__F0_DSCav1 (opt11)
gggagaguccgcucagccagguugcagaagcggcuuagcguguguccuaaucuucucucugcguguagguaggccugugccgcaaacaagcuuaccauggaacuacuuauccucaaagccaacgccaucaccaccauccucacagcaguaaccuuuugcuucgccucaggccaaaauaucacagaagaauuuuaccagaguaccugcuccgccguauccaaaggauaccucagcgcgcuccgcaccggcugguacacuucaguaaucacaaucgaacuauccaacaucaaagaaaacaaaugcaacggcaccgacgcgaaagucaaacucaucaaacaagaacuagacaaauacaaaaaugccguaacagaacuacaacuguuaaugcagagcacacccgccaccaacaaccgcgcccgccgggaacucccccgauucaugaacuacacacucaacaacgccaaaaagacgaacgucacccucagcaagaaacgaaaacgcagauuccucgguuuccuacuaggcguaggcucagcaauagccuccggaguagccgucugcaaaguccugcacuuagaaggcgaagucaacaaaaucaaauccgcccuacucuccacgaacaaagccgucgucucccuguccaacggugucuccguuuuaaccuucaaaguucuggaccucaaaaacuacauagacaaacagcuucuccccauccucaacaaacaauccuguagcaucuccaacaucgaaaccgucauagaauuucaacagaaaaacaacagacugcucgaaaucacccgcgaguucuccgucaacgccggcgucacgacucccgucuccaccuauaugcucacgaacucggaacuccuuucccuaaucaacgacaugccgaucaccaacgaccaaaagaaacucaugucaaacaacguacaaauuguccgccaacaaucauacuccaucaugugcauaauuaaagaagaaguccucgcauacguaguccaacucccccucuacggcgucaucgacacccccugcuggaaacuccacaccuccccacucugcacaaccaacaccaaagaaggcucaaacauaugccuaacgcgcaccgaucgcgguugguacugcgacaacgccgguuccgucagcuucuucccccaagcagagacaugcaaaguccaaucaaaccgcgucuucugcgacaccaugaacucacuaacccuuccaagcgaagucaaccucugcaacguugacaucuucaaccccaaauacgacuguaaaaucaugaccuccaagaccgacguauccucuuccgucaucacaucccuaggcgcuaucguauccugcuaugguaaaaccaaaugcaccgccuccaacaaaaaccgcggcaucaucaagacauuuuccaacggcugcgacuacgugagcaacaaaggcgucgacaccgucuccguaggcaacacccucuacuauguaaacaaacaagagggcaaaucacucuacgucaaaggggaacccaucaucaacuucuacgacccgcucguauuccccagcgaugaguucgacgccuccaucucccaggucaacgaaaagauaaaccaaucacucgcauucauucguaaauccgacgaacuccuacacaacgugaaugcaggcaaaucgaccacuaacaucaugaucaccaccaucaucaucgucaucauagucauccuccugucccuuaucgccgucggucuuuuauuauacugcaaagcccgcagcacccccgucacccucucuaaggaccaacucagcggcaucaauaacaucgcauucucuaacuaaggacuaguggaagcauuuuccuggcugauuaaaagaaauuacucagcuauggucaucuguuccuguuagaaggcuaugcagcauauuauauacuaugcgcauguuaugaaaugcauaauaaaaaauuuuaaaaaaucuaaaagaucuaaaaaaaaaaaaaaaaaaaaaaaaaaaaaaaaaaaaaaaaaaaaaaaaaaaaaaaaaaaaaaaaugcaucccccccccccccccccccccccccccccccaaaggcucuuuucagagccaccagaauu

SEQ ID NO: 1019 - RNA, 2014 nt, Artificial Sequence
  mRNA product Design c-5 comprising derived and/or modified sequence from HRSV(A2)__F0_DSCav1 (opt1)
gggagagcggcucggccauuuugucccagucaguccggaggcugcggcugcagaaguaccgccugcggaguaacugcaaagaagcuuaccauggagcugcucauccugaaggccaacgccaucaccaccauccugacggcggugaccuucugcuucgccagcggccagaacaucaccgaggaguucuaccaguccacgugcagcgccgucuccaagggguaccucagcgcccugcggaccggcugguacaccuccgugaucaccaucgagcugagcaacaucaaggagaacaagugcaacgggaccgacgccaaggugaagcucaucaagcaggagcuggacaaguacaagaacgcggucacggagcugcagcuccugaugcaguccaccccggcaaccaacaaccgcgcccggcgcgagcugccccgguucaugaacuacacccucaacaacgccaagaagacgaacgugacccugagcaagaagcgcaagcggcgcuuccugggcuuccuccugggggugggcuccgccaucgcgagcggcgucgccgugugcaaggugcugcaccucgagggggaggucaacaagaucaagagcgcccugcuguccaccaacaaggccguggugagccucuccaacggcgucagcgugcugaccuucaaggugcuggaccucaagaacuacaucgacaagcagcugcugcccauccugaacaagcagagcugcuccaucagcaacaucgagacggugaucgaguuccagcagaagaacaaccggcuccuggagaucacccgcgaguucagcgugaacgccggggucaccacccccguguccacguacaugcugaccaacagcgagcuccugucccugaucaacgacaugccgaucaccaacgaccagaagaagcucaugagcaacaacgugcagaucguccggcagcaguccuacagcaucaugugcaucaucaaggaggaggugcuggcguacgugguccagcugccccucuacggcgugaucgacacccccugcuggaagcugcacacgagcccccugugcaccaccaacaccaaggagggguccaacaucugccucacgcgcaccgaccggggcugguacugcgacaacgccggcagcgucuccuucuucccgcaggccgagaccugcaaggugcagagcaaccgcguguucugcgacaccaugaacucccugacgcugcccagcgagguaaaccucugcaacgucgacaucuucaaccccaaguacgacugcaagaucaugaccuccaagaccgacgugagcuccagcgugaucaccucccugggggccaucgucagcugcuacggcaagacgaagugcaccgccagcaacaagaaccgggggaucaucaagaccuucuccaacggcugcgacuacgugagcaacaagggcguggacaccguguccgucgggaacacccuguacuacgugaacaagcaggagggcaagagccucuacgugaagggggagcccaucaucaacuucuacgacccgcuggucuuccccuccgacgaguucgacgcgagcaucucccaggugaacgagaagaucaaccagagccuggccuucauccgcaaguccgacgagcugcuccacaacgugaacgccggcaagagcacgaccaacaucaugaucaccaccaucaucaucgucaucaucgugauccugcugucccucaucgccguggggcugcugcucuacugcaaggcccggagcacgcccgucacccuguccaaggaccagcugagcggcaucaacaacaucgcguucuccaacugaggacuagucccuguucccagagcccacuuuuuuuucuuuuuuugaaauaaaauagccugucuuucagaucuaaaaaaaaaaaaaaaaaaaaaaaaaaaaaaaaaaaaaaaaaaaaaaaaaaaaaaaaaaaaaaaaugcaucccccccccccccccccccccccccccccccaaaggcucuuuucagagccaccagaauu

SEQ ID NO: 1020 - RNA, 2014 nt, Artificial Sequence
  mRNA product Design c-5 comprising derived and/or modified sequence from HRSV(A2)__F0_DSCav1 (opt1)
gggagagcggcucggccauuuugucccagucaguccggaggcugcggcugcagaaguaccgccugcggaguaacugcaaagaagcuuaccauggagcugcucauccugaaggccaacgccaucaccaccauccugacggcggugaccuucugcuucgccagcggccagaacaucaccgaggaguucuaccaguccacgugcagcgccgucuccaagggguaccucagcgcccugcgcaccggcugguacaccuccgugaucaccaucgagcugagcaacaucaaggagaacaagugcaacgggaccgacgccaaggugaagcucaucaagcaggagcuggacaaguacaagaacgcggucacggagcugcagcuccugaugcaguccacccccgccaccaacaaccgggcccgccgggagcugccgcgcuucaugaacuacacccucaacaacgccaagaagacgaacgugacccugagcaagaagcggaagcgccgguuccugggcuuccuccugggggugggcuccgcgaucgccagcggcgucgccgugugcaaggugcugcaccucgagggggaggucaacaagaucaaguccgcccugcugagcaccaacaaggccguggugucccucagcaacggcgucuccgugcugaccuucaaggugcuggaccucaagaacuacaucgacaagcagcugcugcccauccucaacaagcagagcugcuccaucagcaacaucgagacggucaucgaguuccagcagaagaacaaccgccugcuggagaucacccgggaguucuccgugaacgcgggggugaccacccccgucagcacguacaugcucaccaacagcgagcugcugucccucaucaacgacaugcccaucaccaacgaccagaagaagcugaugagcaacaacgugcagaucgugcgccagcaguccuacagcaucaugugcaucaucaaggaggagguccuggccuacguggugcagcucccgcuguacggcgucaucgacacccccugcuggaagcugcacacgagcccccucugcaccaccaacaccaaggaggggagcaacaucugccugacgcggaccgaccgcggcugguacugcgacaacgccggcuccgugagcuucuucccccaggccgagaccugcaagguccaguccaaccggguguucugcgacaccaugaacagccugacgcucccguccgaggugaaccugugcaacgucgacaucuucaaccccaaguacgacugcaagaucaugaccagcaagaccgacguguccagcuccgugaucaccagccugggggccaucgucuccugcuacggcaagacgaagugcaccgcgagcaacaagaaccgcgggaucaucaagaccuucuccaacggcugcgacuacgugagcaacaagggcguggacaccgucagcguggggaacacccucuacuacgugaacaagcaggagggcaagucccuguacgucaagggggagcccaucaucaacuucuacgacccccugguguucccgagcgacgaguucgacgccuccaucagccaggugaacgagaagaucaaccagucccucgccuucauccggaaguccgacgagcugcugcacaacgucaacgccggcaaguccacgaccaacaucaugaucaccaccaucaucaucgugaucaucgugauccugcucagccugaucgccgucgggcugcuccuguacugcaaggcgcgcuccacgcccgugacccugagcaaggaccagcucuccggcaucaacaacaucgccuucagcaacugaggacuagucccuguucccagagcccacuuuuuuuucuuuuuuugaaauaaaauagccugucuuucagaucuaaaaaaaaaaaaaaaaaaaaaaaaaaaaaaaaaaaaaaaaaaaaaaaaaaaaaaaaaaaaaaaaugcaucccccccccccccccccccccccccccccccaaaggcucuuuucagagccaccagaauu

SEQ ID NO: 1021 - RNA, 2014 nt, Artificial Sequence
  mRNA product Design c-5 comprising derived and/or modified sequence from HRSV(A2)__F0_DSCav1 (opt2)
gggagagcggcucggccauuuugucccagucaguccggaggcugcggcugcagaaguaccgccugcggaguaacugcaaagaagcuuaccauggagcuccucauccucaaggccaacgccaucaccaccauccucaccgccgucaccuucugcuucgccuccggccagaacaucaccgaggaguucuaccaguccaccugcuccgccgucuccaagggcuaccucuccgcccuccgcaccggcugguacaccuccgucaucaccaucgagcucuccaacaucaaggagaacaagugcaacggcaccgacgccaaggucaagcucaucaagcaggagcucgacaaguacaagaacgccgucaccgagcuccagcuccucaugcaguccacccccgccaccaacaaccgcgcccgccgcgagcucccccgcuucaugaacuacacccucaacaacgccaagaagaccaacgucacccucuccaagaagcgcaagcgccgcuuccucggcuuccuccucggcgucggcuccgccaucgccuccggcgucgccgucugcaagguccuccaccucgagggcgaggucaacaagaucaaguccgcccuccucuccaccaacaaggccgucgucucccucuccaacggcgucuccguccucaccuucaagguccucgaccucaagaacuacaucgacaagcagcuccuccccauccucaacaagcaguccugcuccaucuccaacaucgagaccgucaucgaguuccagcagaagaacaaccgccuccucgagaucacccgcgaguucuccgucaacgccggcgucaccacccccgucuccaccuacaugcucaccaacuccgagcuccucucccucaucaacgacaugcccaucaccaacgaccagaagaagcucauguccaacaacguccagaucguccgccagcaguccuacuccaucaugugcaucaucaaggaggagguccucgccuacgucguccagcucccccucuacggcgucaucgacacccccugcuggaagcuccacaccuccccccucugcaccaccaacaccaaggagggcuccaacaucugccucacccgcaccgaccgcggcugguacugcgacaacgccggcuccgucuccuucuucccccaggccgagaccugcaagguccaguccaaccgcgucuucugcgacaccaugaacucccucacccuccccuccgaggucaaccucugcaacgucgacaucuucaaccccaaguacgacugcaagaucaugaccuccaagaccgacgucuccuccuccgucaucaccucccucggcgccaucgucuccugcuacggcaagaccaagugcaccgccuccaacaagaaccgcggcaucaucaagaccuucuccaacggcugcgacuacgucuccaacaagggcgucgacaccgucuccgucggcaacacccucuacuacgucaacaagcaggagggcaagucccucuacgucaagggcgagcccaucaucaacuucuacgacccccucgucuuccccuccgacgaguucgacgccuccaucucccaggucaacgagaagaucaaccagucccucgccuucauccgcaaguccgacgagcuccuccacaacgucaacgccggcaaguccaccaccaacaucaugaucaccaccaucaucaucgucaucaucgucauccuccucucccucaucgccgucggccuccuccucuacugcaaggcccgcuccacccccgucacccucuccaaggaccagcucuccggcaucaacaacaucgccuucuccaacugaggacuagucccuguucccagagcccacuuuuuuuucuuuuuuugaaauaaaauagccugucuuucagaucuaaaaaaaaaaaaaaaaaaaaaaaaaaaaaaaaaaaaaaaaaaaaaaaaaaaaaaaaaaaaaaaaugcaucccccccccccccccccccccccccccccccaaaggcucuuuucagagccaccagaauu

SEQ ID NO: 1022 - RNA, 2014 nt, Artificial Sequence
  mRNA product Design c-5 comprising derived and/or modified sequence from HRSV(A2)__F0_DSCav1 (opt3)
gggagagcggcucggccauuuugucccagucaguccggaggcugcggcugcagaaguaccgccugcggaguaacugcaaagaagcuuaccauggagcugcucauccuuaaggccaacgcuauuaccacaauacugacugcagugacguucugcuuugccagcggccagaauaucaccgaagaguucuaccaauccacauguucugcggucucaaaaggguauuugagugcuuuaagaacuggaugguacaccagcguuauuacaaucgaacuguccaacauuaaggagaauaaaugcaacgguaccgacgccaaggugaaacuaaucaagcaggaacucgauaaguauaaaaaugcaguaacugagcugcagcuucugaugcagucuacacccgccaccaacaauagggcucggcgcgaguugccucgauuuaugaacuacacgcucaauaacgcaaagaaaacuaaugugacccugucgaagaaacguaagagaagguuccugggcuuucucuuaggggucggaucagccauagcuagcggcguggccguuuguaaggugcugcaccuugaaggugaggucaacaaaaucaagagugcguugcuguccacaaauaaagcagugguaucucuaagcaacgggguuuccgugcucacuuucaagguccuggaccuuaaaaauuauauugauaagcaacuguugccaauccucaacaaacagucaugcaguauuagcaacaucgaaaccgugauagaguuucagcagaagaauaaccggcuguuagagauuacacgcgaguucucugugaaugccggagucaccacgccgguuuccacuuacaugcugacaaacucagaacuccuuagccugaucaaugacaugcccauuaccaacgaucaaaagaaauugaugaguaauaacgugcagaucguaagacagcagucuuauuccaucauguguauuauaaaggaagaggugcuagcuuacgucgugcaacugccucucuacggcguuaucgacacuccaugcuggaaacugcauacaagcccccuuuguaccacgaauaccaaggaaggcucgaacauuugccugacaaggacugaucgggggugguauugugacaaugccggaucuguguccuuuuucccucaggcagagaccugcaaaguccagucaaaccgcguguuuugugauacaaugaauaguuugacucucccaagcgagguaaaccugugcaauguugacaucuucaaccccaaguacgauugcaagauaaugaccuccaaaacagacgugucuagcucagucauuaccaguuuaggugcuaucguguccuguuauggcaagacuaaaugcacggccagcaacaagaaucgagggaucauuaaaacauuuucuaacggaugugauuacgucucaaauaagggcguggacaccguuaguguggguaacacucuguauuacguaaauaagcaagaagggaaaagccuauaugucaagggagagccuaucauuaacuucuacgacccacucguguucccguccgaugaauuugacgcgucuauaucgcagguuaaugagaaaaucaaccagagccuggccuucauuagaaaguccgaugaacuuuugcacaaugugaacgcaggcaaaucaaccacaaauaucaugaucaccacuauuauaaucgucauuaucgugauucugcucagucugaucgcuguaggccuucuguuguacugcaaggccaggucuacacccgugacgcucagcaaggaccagcuguccgggauaaacaauaucgcuuuuucaaacugaggacuagucccuguucccagagcccacuuuuuuuucuuuuuuugaaauaaaauagccugucuuucagaucuaaaaaaaaaaaaaaaaaaaaaaaaaaaaaaaaaaaaaaaaaaaaaaaaaaaaaaaaaaaaaaaaugcaucccccccccccccccccccccccccccccccaaaggcucuuuucagagccaccagaauu

SEQ ID NO: 1023 - RNA, 2014 nt, Artificial Sequence
  mRNA product Design c-5 comprising derived and/or modified sequence from HRSV(A2)__F0_DSCav1 (opt4)
gggagagcggcucggccauuuugucccagucaguccggaggcugcggcugcagaaguaccgccugcggaguaacugcaaagaagcuuaccauggagcugcugauccugaaggccaacgccaucaccaccauccugaccgccgugaccuucugcuucgccagcggccagaacaucaccgaggaguucuaccagagcaccugcagcgccgugagcaagggcuaccugagcgcccugagaaccggcugguacaccagcgugaucaccaucgagcugagcaacaucaaggagaacaagugcaacggcaccgacgccaaggugaagcugaucaagcaggagcuggacaaguacaagaacgccgugaccgagcugcagcugcugaugcagagcacccccgccaccaacaacagagccagaagagagcugcccagauucaugaacuacacccugaacaacgccaagaagaccaacgugacccugagcaagaagagaaagagaagauuccugggcuuccugcugggcgugggcagcgccaucgccagcggcguggccgugugcaaggugcugcaccuggagggcgaggugaacaagaucaagagcgcccugcugagcaccaacaaggccguggugagccugagcaacggcgugagcgugcugaccuucaaggugcuggaccugaagaacuacaucgacaagcagcugcugcccauccugaacaagcagagcugcagcaucagcaacaucgagaccgugaucgaguuccagcagaagaacaacagacugcuggagaucaccagagaguucagcgugaacgccggcgugaccacccccgugagcaccuacaugcugaccaacagcgagcugcugagccugaucaacgacaugcccaucaccaacgaccagaagaagcugaugagcaacaacgugcagaucgugagacagcagagcuacagcaucaugugcaucaucaaggaggaggugcuggccuacguggugcagcugccccuguacggcgugaucgacacccccugcuggaagcugcacaccagcccccugugcaccaccaacaccaaggagggcagcaacaucugccugaccagaaccgacagaggcugguacugcgacaacgccggcagcgugagcuucuucccccaggccgagaccugcaaggugcagagcaacagaguguucugcgacaccaugaacagccugacccugcccagcgaggugaaccugugcaacguggacaucuucaaccccaaguacgacugcaagaucaugaccagcaagaccgacgugagcagcagcgugaucaccagccugggcgccaucgugagcugcuacggcaagaccaagugcaccgccagcaacaagaacagaggcaucaucaagaccuucagcaacggcugcgacuacgugagcaacaagggcguggacaccgugagcgugggcaacacccuguacuacgugaacaagcaggagggcaagagccuguacgugaagggcgagcccaucaucaacuucuacgacccccugguguuccccagcgacgaguucgacgccagcaucagccaggugaacgagaagaucaaccagagccuggccuucaucagaaagagcgacgagcugcugcacaacgugaacgccggcaagagcaccaccaacaucaugaucaccaccaucaucaucgugaucaucgugauccugcugagccugaucgccgugggccugcugcuguacugcaaggccagaagcacccccgugacccugagcaaggaccagcugagcggcaucaacaacaucgccuucagcaacugaggacuagucccuguucccagagcccacuuuuuuuucuuuuuuugaaauaaaauagccugucuuucagaucuaaaaaaaaaaaaaaaaaaaaaaaaaaaaaaaaaaaaaaaaaaaaaaaaaaaaaaaaaaaaaaaaugcaucccccccccccccccccccccccccccccccaaaggcucuuuucagagccaccagaauu

SEQ ID NO: 1024 - RNA, 2014 nt, Artificial Sequence
  mRNA product Design c-5 comprising derived and/or modified sequence from HRSV(A2)__F0_DSCav1 (opt5)
gggagagcggcucggccauuuugucccagucaguccggaggcugcggcugcagaaguaccgccugcggaguaacugcaaagaagcuuaccauggagcugcucauccugaaggccaacgcuauuaccacaauccuuacggccgugaccuucugcuuugcgagcggccagaauauuacagaagaguucuaccaauccaccuguucugcugucagcaaaggguaucuguccgcccucagaacaggaugguacaccucuguuaucacaauugaacugagcaacaucaaggagaauaaaugcaacggcaccgacgccaaggugaaacuuaucaagcaggaacuggauaaguauaaaaaugcugugacggagcuccagcugcugaugcaguccacccccgccacaaacaaucgggcucgcagagagcucccucgguuuaugaacuacacccugaauaacgccaagaaaacaaaugucacccuuucuaagaaacgcaagagacgguuccugggguuucuccugggagugggcagcgcgauugccuccgggguugcuguguguaagguccuucaccuggaaggagaggugaacaaaaucaagagcgcccuccugucuacgaauaaagcuguugugucccugagcaacggcgucucugugcucacauucaaggugcuggaccuuaaaaauuauauugauaagcaacugcucccgauccugaacaaacaguccugcagcauuucuaacaucgaaaccgucauugaguuucagcagaagaauaaccgccuucuggagaucacaagagaauuuuccguuaaugccggcgugaccacccccgugagcacauacaugcucacgaacuccgagcugcugucucucaucaaugacaugccuauuaccaacgaucaaaagaaacugaugagcaauaacguccagaucgugcggcagcaguccuauagcauuauguguaucauuaaggaagagguucuugcguacgugguccaacugccccucuacggggugaucgacacaccuugcuggaaacugcauaccucuccccuuuguacaaccaauacgaaggaaggauccaacaucugccugacacgcaccgauagaggcugguauugugacaaugccgggagcguuucuuucuucccucaggcugagaccugcaaagugcagagcaaccgggucuuuugugauacaaugaacucccucacccugccgucugaggugaaucugugcaaugucgacauuuucaaccccaaguacgauugcaagaucaugacaagcaaaacggacguguccagcucuguuauuaccucccucggagccaucgugagcuguuauggcaagacaaaaugcaccgcuucuaacaagaaucgcgggauuaucaaaacauuuuccaacggaugugauuacgucagcaauaagggcguggacaccguuuccgugggcaacacgcuguauuacgucaauaagcaagaagggaaaucucuuuaugugaagggagagccuaucauuaacuucuacgacccccugguguucccuagcgaugaauuugacgccuccaucucucagguuaaugagaaaauuaaccagagccucgccuucaucagaaaguccgaugaacugcugcacaaugucaacgcuggcaaaagcaccacaaauauuaugaucaccacaauuaucaucgugauuaucgugauucuucucucucugaucgcggucgggcugcuccuguacugcaaggcccgguccacccccgugacgcuuagcaaggaccagcugucuggaauuaacaauaucgcuuuuuccaacugaggacuagucccuguucccagagcccacuuuuuuuucuuuuuuugaaauaaaauagccugucuuucagaucuaaaaaaaaaaaaaaaaaaaaaaaaaaaaaaaaaaaaaaaaaaaaaaaaaaaaaaaaaaaaaaaaugcaucccccccccccccccccccccccccccccccaaaggcucuuuucagagccaccagaauu

SEQ ID NO: 1025 - RNA, 2014 nt, Artificial Sequence
  mRNA product Design c-5 comprising derived and/or modified sequence from HRSV(A2)__F0_DSCav1 (opt6)
gggagagcggcucggccauuuugucccagucaguccggaggcugcggcugcagaaguaccgccugcggaguaacugcaaagaagcuuaccauggaauuauuaauccucaaagcgaacgcuauuacuaccauucuaacagcagucacauucugcuucgccucaggccaaaacauuacagaagaauuuuaccaaucaacaugcucugccguaucaaaaggcuaccuauccgcccuacgaacaggcugguacacaagcguaauaacaaucgaacuaucaaacauaaaagaaaacaaaugcaacgguacagacgccaaaguuaaacuaauaaaacaagaacucgauaaauacaaaaacgcaguaacagaauuacaacuacuaaugcaaucaacaccugcaacaaacaauagagccaggagagaauuaccucgauucaugaauuacacacucaauaacgcaaaaaaaaccaacguuacacuaucaaaaaaaagaaaacgacgauucuuaggauuccuacucggagucggaucagcaauagcaucuggcguugcaguaugcaaaguauuacacuuagaaggugaagucaauaaaauaaaaagcgcgcuacuaaguacaaacaaagcagucgucucccuaucaaacggagucucaguccuaacauucaaaguacucgaccuaaaaaauuacauagauaaacaacuacuuccaauauuaaacaaacaauccuguagcaucagcaauauagaaacaguaauagaauuucaacaaaaaaacaaccgauuauuagaaaucacucgagaauuuuccguaaacgccgggguaacaacuccagucucaaccuacaugcuaaccaauucagaacuauugagcuuaauaaacgacaugccaauaaccaacgaccaaaaaaaacuaaugucuaacaauguucaaaucgucagacaacaaaguuacaguauaauguguauaaucaaagaagaaguccuagcauacguaguccaacucccacuauauggaguuaucgacacaccauguuggaaauuacacaccucaccauuaugcacaaccaauacaaaagaaggaucaaacauaugccuuacacggacagaccgcggaugguauugugacaacgcuggcucagucuccuuuuucccacaagcagaaacaugcaaaguacaaucaaacagagucuuuugcgauaccaugaacucacuuacauuaccaagcgaaguaaaucuuuguaacgucgacaucuucaauccuaaauaugacugcaaaaucaugaccucaaaaacagacguuagcucuucaguaaucacuagcuuaggagcaaucguaucaugcuacggcaaaacaaaauguacagcaucaaauaaaaacagaggaaucauaaaaacauuuucaaacggaugcgauuauguaagcaacaaaggaguagauacuguaagcguaggaaacacauuguacuauguaaacaaacaagaaggaaaaucacucuauguaaaaggagaaccuauaaucaauuucuacgauccauuaguguucccaucagaugaauuugacgccucaauaucacaaguuaaugaaaaaauaaaucaaucgcuagcauucauacguaaaucagaugaauuacuacauaacguaaacgcaggcaaauccacaacaaauaucaugaucacaacaauuauaauaguaauaauaguaauacuacuaucacuaauagccguaggacuccuacuauacugcaaagcaagaucuacuccaguaacccucucaaaagaucaacuaagcggaauuaauaacaucgcauucagcaacuaaggacuagucccuguucccagagcccacuuuuuuuucuuuuuuugaaauaaaauagccugucuuucagaucuaaaaaaaaaaaaaaaaaaaaaaaaaaaaaaaaaaaaaaaaaaaaaaaaaaaaaaaaaaaaaaaaugcaucccccccccccccccccccccccccccccccaaaggcucuuuucagagccaccagaauu

SEQ ID NO: 1026 - RNA, 2014 nt, Artificial Sequence
  mRNA product Design c-5 comprising derived and/or modified sequence from HRSV(A2)__F0_DSCav1 (opt11)
gggagagcggcucggccauuuugucccagucaguccggaggcugcggcugcagaaguaccgccugcggaguaacugcaaagaagcuuaccauggaacuacuuauccucaaagccaacgccaucaccaccauccucacagcaguaaccuuuugcuucgccucaggccaaaauaucacagaagaauuuuaccagaguaccugcuccgccguauccaaaggauaccucagcgcgcuccgcaccggcugguacacuucaguaaucacaaucgaacuauccaacaucaaagaaaacaaaugcaacggcaccgacgcgaaagucaaacucaucaaacaagaacuagacaaauacaaaaaugccguaacagaacuacaacuguuaaugcagagcacacccgccaccaacaaccgcgcccgccgggaacucccccgauucaugaacuacacacucaacaacgccaaaaagacgaacgucacccucagcaagaaacgaaaacgcagauuccucgguuuccuacuaggcguaggcucagcaauagccuccggaguagccgucugcaaaguccugcacuuagaaggcgaagucaacaaaaucaaauccgcccuacucuccacgaacaaagccgucgucucccuguccaacggugucuccguuuuaaccuucaaaguucuggaccucaaaaacuacauagacaaacagcuucuccccauccucaacaaacaauccuguagcaucuccaacaucgaaaccgucauagaauuucaacagaaaaacaacagacugcucgaaaucacccgcgaguucuccgucaacgccggcgucacgacucccgucuccaccuauaugcucacgaacucggaacuccuuucccuaaucaacgacaugccgaucaccaacgaccaaaagaaacucaugucaaacaacguacaaauuguccgccaacaaucauacuccaucaugugcauaauuaaagaagaaguccucgcauacguaguccaacucccccucuacggcgucaucgacacccccugcuggaaacuccacaccuccccacucugcacaaccaacaccaaagaaggcucaaacauaugccuaacgcgcaccgaucgcgguugguacugcgacaacgccgguuccgucagcuucuucccccaagcagagacaugcaaaguccaaucaaaccgcgucuucugcgacaccaugaacucacuaacccuuccaagcgaagucaaccucugcaacguugacaucuucaaccccaaauacgacuguaaaaucaugaccuccaagaccgacguauccucuuccgucaucacaucccuaggcgcuaucguauccugcuaugguaaaaccaaaugcaccgccuccaacaaaaaccgcggcaucaucaagacauuuuccaacggcugcgacuacgugagcaacaaaggcgucgacaccgucuccguaggcaacacccucuacuauguaaacaaacaagagggcaaaucacucuacgucaaaggggaacccaucaucaacuucuacgacccgcucguauuccccagcgaugaguucgacgccuccaucucccaggucaacgaaaagauaaaccaaucacucgcauucauucguaaauccgacgaacuccuacacaacgugaaugcaggcaaaucgaccacuaacaucaugaucaccaccaucaucaucgucaucauagucauccuccugucccuuaucgccgucggucuuuuauuauacugcaaagcccgcagcacccccgucacccucucuaaggaccaacucagcggcaucaauaacaucgcauucucuaacuaaggacuagucccuguucccagagcccacuuuuuuuucuuuuuuugaaauaaaauagccugucuuucagaucuaaaaaaaaaaaaaaaaaaaaaaaaaaaaaaaaaaaaaaaaaaaaaaaaaaaaaaaaaaaaaaaaugcaucccccccccccccccccccccccccccccccaaaggcucuuuucagagccaccagaauu

SEQ ID NO: 1027 - RNA, 2023 nt, Artificial Sequence
  mRNA product Design d-1 comprising derived and/or modified sequence from HRSV(A2)__F0_DSCav1 (opt1)
gggagacccgugacccggaaguuguacggcuacgcgacuuucccucccacaaacccucgcgcccuuccuuuccuacuugggcccggcagaaagcuuaccauggagcugcucauccugaaggccaacgccaucaccaccauccugacggcggugaccuucugcuucgccagcggccagaacaucaccgaggaguucuaccaguccacgugcagcgccgucuccaagggguaccucagcgcccugcggaccggcugguacaccuccgugaucaccaucgagcugagcaacaucaaggagaacaagugcaacgggaccgacgccaaggugaagcucaucaagcaggagcuggacaaguacaagaacgcggucacggagcugcagcuccugaugcaguccaccccggcaaccaacaaccgcgcccggcgcgagcugccccgguucaugaacuacacccucaacaacgccaagaagacgaacgugacccugagcaagaagcgcaagcggcgcuuccugggcuuccuccugggggugggcuccgccaucgcgagcggcgucgccgugugcaaggugcugcaccucgagggggaggucaacaagaucaagagcgcccugcuguccaccaacaaggccguggugagccucuccaacggcgucagcgugcugaccuucaaggugcuggaccucaagaacuacaucgacaagcagcugcugcccauccugaacaagcagagcugcuccaucagcaacaucgagacggugaucgaguuccagcagaagaacaaccggcuccuggagaucacccgcgaguucagcgugaacgccggggucaccacccccguguccacguacaugcugaccaacagcgagcuccugucccugaucaacgacaugccgaucaccaacgaccagaagaagcucaugagcaacaacgugcagaucguccggcagcaguccuacagcaucaugugcaucaucaaggaggaggugcuggcguacgugguccagcugccccucuacggcgugaucgacacccccugcuggaagcugcacacgagcccccugugcaccaccaacaccaaggagggguccaacaucugccucacgcgcaccgaccggggcugguacugcgacaacgccggcagcgucuccuucuucccgcaggccgagaccugcaaggugcagagcaaccgcguguucugcgacaccaugaacucccugacgcugcccagcgagguaaaccucugcaacgucgacaucuucaaccccaaguacgacugcaagaucaugaccuccaagaccgacgugagcuccagcgugaucaccucccugggggccaucgucagcugcuacggcaagacgaagugcaccgccagcaacaagaaccgggggaucaucaagaccuucuccaacggcugcgacuacgugagcaacaagggcguggacaccguguccgucgggaacacccuguacuacgugaacaagcaggagggcaagagccucuacgugaagggggagcccaucaucaacuucuacgacccgcuggucuuccccuccgacgaguucgacgcgagcaucucccaggugaacgagaagaucaaccagagccuggccuucauccgcaaguccgacgagcugcuccacaacgugaacgccggcaagagcacgaccaacaucaugaucaccaccaucaucaucgucaucaucgugauccugcugucccucaucgccguggggcugcugcucuacugcaaggcccggagcacgcccgucacccuguccaaggaccagcugagcggcaucaacaacaucgcguucuccaacugaggacuagucccuguucccagagcccacuuuuuuuucuuuuuuugaaauaaaauagccugucuuucagaucuaaaaaaaaaaaaaaaaaaaaaaaaaaaaaaaaaaaaaaaaaaaaaaaaaaaaaaaaaaaaaaaaugcaucccccccccccccccccccccccccccccccaaaggcucuuuucagagccaccagaauu

SEQ ID NO: 1028 - RNA, 2023 nt, Artificial Sequence
  mRNA product Design d-1 comprising derived and/or modified sequence from HRSV(A2)__F0_DSCav1 (opt1)
gggagacccgugacccggaaguuguacggcuacgcgacuuucccucccacaaacccucgcgcccuuccuuuccuacuugggcccggcagaaagcuuaccauggagcugcucauccugaaggccaacgccaucaccaccauccugacggcggugaccuucugcuucgccagcggccagaacaucaccgaggaguucuaccaguccacgugcagcgccgucuccaagggguaccucagcgcccugcgcaccggcugguacaccuccgugaucaccaucgagcugagcaacaucaaggagaacaagugcaacgggaccgacgccaaggugaagcucaucaagcaggagcuggacaaguacaagaacgcggucacggagcugcagcuccugaugcaguccacccccgccaccaacaaccgggcccgccgggagcugccgcgcuucaugaacuacacccucaacaacgccaagaagacgaacgugacccugagcaagaagcggaagcgccgguuccugggcuuccuccugggggugggcuccgcgaucgccagcggcgucgccgugugcaaggugcugcaccucgagggggaggucaacaagaucaaguccgcccugcugagcaccaacaaggccguggugucccucagcaacggcgucuccgugcugaccuucaaggugcuggaccucaagaacuacaucgacaagcagcugcugcccauccucaacaagcagagcugcuccaucagcaacaucgagacggucaucgaguuccagcagaagaacaaccgccugcuggagaucacccgggaguucuccgugaacgcgggggugaccacccccgucagcacguacaugcucaccaacagcgagcugcugucccucaucaacgacaugcccaucaccaacgaccagaagaagcugaugagcaacaacgugcagaucgugcgccagcaguccuacagcaucaugugcaucaucaaggaggagguccuggccuacguggugcagcucccgcuguacggcgucaucgacacccccugcuggaagcugcacacgagcccccucugcaccaccaacaccaaggaggggagcaacaucugccugacgcggaccgaccgcggcugguacugcgacaacgccggcuccgugagcuucuucccccaggccgagaccugcaagguccaguccaaccggguguucugcgacaccaugaacagccugacgcucccguccgaggugaaccugugcaacgucgacaucuucaaccccaaguacgacugcaagaucaugaccagcaagaccgacguguccagcuccgugaucaccagccugggggccaucgucuccugcuacggcaagacgaagugcaccgcgagcaacaagaaccgcgggaucaucaagaccuucuccaacggcugcgacuacgugagcaacaagggcguggacaccgucagcguggggaacacccucuacuacgugaacaagcaggagggcaagucccuguacgucaagggggagcccaucaucaacuucuacgacccccugguguucccgagcgacgaguucgacgccuccaucagccaggugaacgagaagaucaaccagucccucgccuucauccggaaguccgacgagcugcugcacaacgucaacgccggcaaguccacgaccaacaucaugaucaccaccaucaucaucgugaucaucgugauccugcucagccugaucgccgucgggcugcuccuguacugcaaggcgcgcuccacgcccgugacccugagcaaggaccagcucuccggcaucaacaacaucgccuucagcaacugaggacuagucccuguucccagagcccacuuuuuuuucuuuuuuugaaauaaaauagccugucuuucagaucuaaaaaaaaaaaaaaaaaaaaaaaaaaaaaaaaaaaaaaaaaaaaaaaaaaaaaaaaaaaaaaaaugcaucccccccccccccccccccccccccccccccaaaggcucuuuucagagccaccagaauu

SEQ ID NO: 1029 - RNA, 2023 nt, Artificial Sequence
  mRNA product Design d-1 comprising derived and/or modified sequence from HRSV(A2)__F0_DSCav1 (opt2)
gggagacccgugacccggaaguuguacggcuacgcgacuuucccucccacaaacccucgcgcccuuccuuuccuacuugggcccggcagaaagcuuaccauggagcuccucauccucaaggccaacgccaucaccaccauccucaccgccgucaccuucugcuucgccuccggccagaacaucaccgaggaguucuaccaguccaccugcuccgccgucuccaagggcuaccucuccgcccuccgcaccggcugguacaccuccgucaucaccaucgagcucuccaacaucaaggagaacaagugcaacggcaccgacgccaaggucaagcucaucaagcaggagcucgacaaguacaagaacgccgucaccgagcuccagcuccucaugcaguccacccccgccaccaacaaccgcgcccgccgcgagcucccccgcuucaugaacuacacccucaacaacgccaagaagaccaacgucacccucuccaagaagcgcaagcgccgcuuccucggcuuccuccucggcgucggcuccgccaucgccuccggcgucgccgucugcaagguccuccaccucgagggcgaggucaacaagaucaaguccgcccuccucuccaccaacaaggccgucgucucccucuccaacggcgucuccguccucaccuucaagguccucgaccucaagaacuacaucgacaagcagcuccuccccauccucaacaagcaguccugcuccaucuccaacaucgagaccgucaucgaguuccagcagaagaacaaccgccuccucgagaucacccgcgaguucuccgucaacgccggcgucaccacccccgucuccaccuacaugcucaccaacuccgagcuccucucccucaucaacgacaugcccaucaccaacgaccagaagaagcucauguccaacaacguccagaucguccgccagcaguccuacuccaucaugugcaucaucaaggaggagguccucgccuacgucguccagcucccccucuacggcgucaucgacacccccugcuggaagcuccacaccuccccccucugcaccaccaacaccaaggagggcuccaacaucugccucacccgcaccgaccgcggcugguacugcgacaacgccggcuccgucuccuucuucccccaggccgagaccugcaagguccaguccaaccgcgucuucugcgacaccaugaacucccucacccuccccuccgaggucaaccucugcaacgucgacaucuucaaccccaaguacgacugcaagaucaugaccuccaagaccgacgucuccuccuccgucaucaccucccucggcgccaucgucuccugcuacggcaagaccaagugcaccgccuccaacaagaaccgcggcaucaucaagaccuucuccaacggcugcgacuacgucuccaacaagggcgucgacaccgucuccgucggcaacacccucuacuacgucaacaagcaggagggcaagucccucuacgucaagggcgagcccaucaucaacuucuacgacccccucgucuuccccuccgacgaguucgacgccuccaucucccaggucaacgagaagaucaaccagucccucgccuucauccgcaaguccgacgagcuccuccacaacgucaacgccggcaaguccaccaccaacaucaugaucaccaccaucaucaucgucaucaucgucauccuccucucccucaucgccgucggccuccuccucuacugcaaggcccgcuccacccccgucacccucuccaaggaccagcucuccggcaucaacaacaucgccuucuccaacugaggacuagucccuguucccagagcccacuuuuuuuucuuuuuuugaaauaaaauagccugucuuucagaucuaaaaaaaaaaaaaaaaaaaaaaaaaaaaaaaaaaaaaaaaaaaaaaaaaaaaaaaaaaaaaaaaugcaucccccccccccccccccccccccccccccccaaaggcucuuuucagagccaccagaauu

SEQ ID NO: 1030 - RNA, 2023 nt, Artificial Sequence
  mRNA product Design d-1 comprising derived and/or modified sequence from HRSV(A2)__F0_DSCav1 (opt3)
gggagacccgugacccggaaguuguacggcuacgcgacuuucccucccacaaacccucgcgcccuuccuuuccuacuugggcccggcagaaagcuuaccauggagcugcucauccuuaaggccaacgcuauuaccacaauacugacugcagugacguucugcuuugccagcggccagaauaucaccgaagaguucuaccaauccacauguucugcggucucaaaaggguauuugagugcuuuaagaacuggaugguacaccagcguuauuacaaucgaacuguccaacauuaaggagaauaaaugcaacgguaccgacgccaaggugaaacuaaucaagcaggaacucgauaaguauaaaaaugcaguaacugagcugcagcuucugaugcagucuacacccgccaccaacaauagggcucggcgcgaguugccucgauuuaugaacuacacgcucaauaacgcaaagaaaacuaaugugacccugucgaagaaacguaagagaagguuccugggcuuucucuuaggggucggaucagccauagcuagcggcguggccguuuguaaggugcugcaccuugaaggugaggucaacaaaaucaagagugcguugcuguccacaaauaaagcagugguaucucuaagcaacgggguuuccgugcucacuuucaagguccuggaccuuaaaaauuauauugauaagcaacuguugccaauccucaacaaacagucaugcaguauuagcaacaucgaaaccgugauagaguuucagcagaagaauaaccggcuguuagagauuacacgcgaguucucugugaaugccggagucaccacgccgguuuccacuuacaugcugacaaacucagaacuccuuagccugaucaaugacaugcccauuaccaacgaucaaaagaaauugaugaguaauaacgugcagaucguaagacagcagucuuauuccaucauguguauuauaaaggaagaggugcuagcuuacgucgugcaacugccucucuacggcguuaucgacacuccaugcuggaaacugcauacaagcccccuuuguaccacgaauaccaaggaaggcucgaacauuugccugacaaggacugaucgggggugguauugugacaaugccggaucuguguccuuuuucccucaggcagagaccugcaaaguccagucaaaccgcguguuuugugauacaaugaauaguuugacucucccaagcgagguaaaccugugcaauguugacaucuucaaccccaaguacgauugcaagauaaugaccuccaaaacagacgugucuagcucagucauuaccaguuuaggugcuaucguguccuguuauggcaagacuaaaugcacggccagcaacaagaaucgagggaucauuaaaacauuuucuaacggaugugauuacgucucaaauaagggcguggacaccguuaguguggguaacacucuguauuacguaaauaagcaagaagggaaaagccuauaugucaagggagagccuaucauuaacuucuacgacccacucguguucccguccgaugaauuugacgcgucuauaucgcagguuaaugagaaaaucaaccagagccuggccuucauuagaaaguccgaugaacuuuugcacaaugugaacgcaggcaaaucaaccacaaauaucaugaucaccacuauuauaaucgucauuaucgugauucugcucagucugaucgcuguaggccuucuguuguacugcaaggccaggucuacacccgugacgcucagcaaggaccagcuguccgggauaaacaauaucgcuuuuucaaacugaggacuagucccuguucccagagcccacuuuuuuuucuuuuuuugaaauaaaauagccugucuuucagaucuaaaaaaaaaaaaaaaaaaaaaaaaaaaaaaaaaaaaaaaaaaaaaaaaaaaaaaaaaaaaaaaaugcaucccccccccccccccccccccccccccccccaaaggcucuuuucagagccaccagaauu

SEQ ID NO: 1031 - RNA, 2023 nt, Artificial Sequence
  mRNA product Design d-1 comprising derived and/or modified sequence from HRSV(A2)__F0_DSCav1 (opt4)
gggagacccgugacccggaaguuguacggcuacgcgacuuucccucccacaaacccucgcgcccuuccuuuccuacuugggcccggcagaaagcuuaccauggagcugcugauccugaaggccaacgccaucaccaccauccugaccgccgugaccuucugcuucgccagcggccagaacaucaccgaggaguucuaccagagcaccugcagcgccgugagcaagggcuaccugagcgcccugagaaccggcugguacaccagcgugaucaccaucgagcugagcaacaucaaggagaacaagugcaacggcaccgacgccaaggugaagcugaucaagcaggagcuggacaaguacaagaacgccgugaccgagcugcagcugcugaugcagagcacccccgccaccaacaacagagccagaagagagcugcccagauucaugaacuacacccugaacaacgccaagaagaccaacgugacccugagcaagaagagaaagagaagauuccugggcuuccugcugggcgugggcagcgccaucgccagcggcguggccgugugcaaggugcugcaccuggagggcgaggugaacaagaucaagagcgcccugcugagcaccaacaaggccguggugagccugagcaacggcgugagcgugcugaccuucaaggugcuggaccugaagaacuacaucgacaagcagcugcugcccauccugaacaagcagagcugcagcaucagcaacaucgagaccgugaucgaguuccagcagaagaacaacagacugcuggagaucaccagagaguucagcgugaacgccggcgugaccacccccgugagcaccuacaugcugaccaacagcgagcugcugagccugaucaacgacaugcccaucaccaacgaccagaagaagcugaugagcaacaacgugcagaucgugagacagcagagcuacagcaucaugugcaucaucaaggaggaggugcuggccuacguggugcagcugccccuguacggcgugaucgacacccccugcuggaagcugcacaccagcccccugugcaccaccaacaccaaggagggcagcaacaucugccugaccagaaccgacagaggcugguacugcgacaacgccggcagcgugagcuucuucccccaggccgagaccugcaaggugcagagcaacagaguguucugcgacaccaugaacagccugacccugcccagcgaggugaaccugugcaacguggacaucuucaaccccaaguacgacugcaagaucaugaccagcaagaccgacgugagcagcagcgugaucaccagccugggcgccaucgugagcugcuacggcaagaccaagugcaccgccagcaacaagaacagaggcaucaucaagaccuucagcaacggcugcgacuacgugagcaacaagggcguggacaccgugagcgugggcaacacccuguacuacgugaacaagcaggagggcaagagccuguacgugaagggcgagcccaucaucaacuucuacgacccccugguguuccccagcgacgaguucgacgccagcaucagccaggugaacgagaagaucaaccagagccuggccuucaucagaaagagcgacgagcugcugcacaacgugaacgccggcaagagcaccaccaacaucaugaucaccaccaucaucaucgugaucaucgugauccugcugagccugaucgccgugggccugcugcuguacugcaaggccagaagcacccccgugacccugagcaaggaccagcugagcggcaucaacaacaucgccuucagcaacugaggacuagucccuguucccagagcccacuuuuuuuucuuuuuuugaaauaaaauagccugucuuucagaucuaaaaaaaaaaaaaaaaaaaaaaaaaaaaaaaaaaaaaaaaaaaaaaaaaaaaaaaaaaaaaaaaugcaucccccccccccccccccccccccccccccccaaaggcucuuuucagagccaccagaauu

SEQ ID NO: 1032 - RNA, 2023 nt, Artificial Sequence
  mRNA product Design d-1 comprising derived and/or modified sequence from HRSV(A2)__F0_DSCav1 (opt5)
gggagacccgugacccggaaguuguacggcuacgcgacuuucccucccacaaacccucgcgcccuuccuuuccuacuugggcccggcagaaagcuuaccauggagcugcucauccugaaggccaacgcuauuaccacaauccuuacggccgugaccuucugcuuugcgagcggccagaauauuacagaagaguucuaccaauccaccuguucugcugucagcaaaggguaucuguccgcccucagaacaggaugguacaccucuguuaucacaauugaacugagcaacaucaaggagaauaaaugcaacggcaccgacgccaaggugaaacuuaucaagcaggaacuggauaaguauaaaaaugcugugacggagcuccagcugcugaugcaguccacccccgccacaaacaaucgggcucgcagagagcucccucgguuuaugaacuacacccugaauaacgccaagaaaacaaaugucacccuuucuaagaaacgcaagagacgguuccugggguuucuccugggagugggcagcgcgauugccuccgggguugcuguguguaagguccuucaccuggaaggagaggugaacaaaaucaagagcgcccuccugucuacgaauaaagcuguugugucccugagcaacggcgucucugugcucacauucaaggugcuggaccuuaaaaauuauauugauaagcaacugcucccgauccugaacaaacaguccugcagcauuucuaacaucgaaaccgucauugaguuucagcagaagaauaaccgccuucuggagaucacaagagaauuuuccguuaaugccggcgugaccacccccgugagcacauacaugcucacgaacuccgagcugcugucucucaucaaugacaugccuauuaccaacgaucaaaagaaacugaugagcaauaacguccagaucgugcggcagcaguccuauagcauuauguguaucauuaaggaagagguucuugcguacgugguccaacugccccucuacggggugaucgacacaccuugcuggaaacugcauaccucuccccuuuguacaaccaauacgaaggaaggauccaacaucugccugacacgcaccgauagaggcugguauugugacaaugccgggagcguuucuuucuucccucaggcugagaccugcaaagugcagagcaaccgggucuuuugugauacaaugaacucccucacccugccgucugaggugaaucugugcaaugucgacauuuucaaccccaaguacgauugcaagaucaugacaagcaaaacggacguguccagcucuguuauuaccucccucggagccaucgugagcuguuauggcaagacaaaaugcaccgcuucuaacaagaaucgcgggauuaucaaaacauuuuccaacggaugugauuacgucagcaauaagggcguggacaccguuuccgugggcaacacgcuguauuacgucaauaagcaagaagggaaaucucuuuaugugaagggagagccuaucauuaacuucuacgacccccugguguucccuagcgaugaauuugacgccuccaucucucagguuaaugagaaaauuaaccagagccucgccuucaucagaaaguccgaugaacugcugcacaaugucaacgcuggcaaaagcaccacaaauauuaugaucaccacaauuaucaucgugauuaucgugauucuucucucucugaucgcggucgggcugcuccuguacugcaaggcccgguccacccccgugacgcuuagcaaggaccagcugucuggaauuaacaauaucgcuuuuuccaacugaggacuagucccuguucccagagcccacuuuuuuuucuuuuuuugaaauaaaauagccugucuuucagaucuaaaaaaaaaaaaaaaaaaaaaaaaaaaaaaaaaaaaaaaaaaaaaaaaaaaaaaaaaaaaaaaaugcaucccccccccccccccccccccccccccccccaaaggcucuuuucagagccaccagaauu

SEQ ID NO: 1033 - RNA, 2023 nt, Artificial Sequence
  mRNA product Design d-1 comprising derived and/or modified sequence from HRSV(A2)__F0_DSCav1 (opt6)
gggagacccgugacccggaaguuguacggcuacgcgacuuucccucccacaaacccucgcgcccuuccuuuccuacuugggcccggcagaaagcuuaccauggaauuauuaauccucaaagcgaacgcuauuacuaccauucuaacagcagucacauucugcuucgccucaggccaaaacauuacagaagaauuuuaccaaucaacaugcucugccguaucaaaaggcuaccuauccgcccuacgaacaggcugguacacaagcguaauaacaaucgaacuaucaaacauaaaagaaaacaaaugcaacgguacagacgccaaaguuaaacuaauaaaacaagaacucgauaaauacaaaaacgcaguaacagaauuacaacuacuaaugcaaucaacaccugcaacaaacaauagagccaggagagaauuaccucgauucaugaauuacacacucaauaacgcaaaaaaaaccaacguuacacuaucaaaaaaaagaaaacgacgauucuuaggauuccuacucggagucggaucagcaauagcaucuggcguugcaguaugcaaaguauuacacuuagaaggugaagucaauaaaauaaaaagcgcgcuacuaaguacaaacaaagcagucgucucccuaucaaacggagucucaguccuaacauucaaaguacucgaccuaaaaaauuacauagauaaacaacuacuuccaauauuaaacaaacaauccuguagcaucagcaauauagaaacaguaauagaauuucaacaaaaaaacaaccgauuauuagaaaucacucgagaauuuuccguaaacgccgggguaacaacuccagucucaaccuacaugcuaaccaauucagaacuauugagcuuaauaaacgacaugccaauaaccaacgaccaaaaaaaacuaaugucuaacaauguucaaaucgucagacaacaaaguuacaguauaauguguauaaucaaagaagaaguccuagcauacguaguccaacucccacuauauggaguuaucgacacaccauguuggaaauuacacaccucaccauuaugcacaaccaauacaaaagaaggaucaaacauaugccuuacacggacagaccgcggaugguauugugacaacgcuggcucagucuccuuuuucccacaagcagaaacaugcaaaguacaaucaaacagagucuuuugcgauaccaugaacucacuuacauuaccaagcgaaguaaaucuuuguaacgucgacaucuucaauccuaaauaugacugcaaaaucaugaccucaaaaacagacguuagcucuucaguaaucacuagcuuaggagcaaucguaucaugcuacggcaaaacaaaauguacagcaucaaauaaaaacagaggaaucauaaaaacauuuucaaacggaugcgauuauguaagcaacaaaggaguagauacuguaagcguaggaaacacauuguacuauguaaacaaacaagaaggaaaaucacucuauguaaaaggagaaccuauaaucaauuucuacgauccauuaguguucccaucagaugaauuugacgccucaauaucacaaguuaaugaaaaaauaaaucaaucgcuagcauucauacguaaaucagaugaauuacuacauaacguaaacgcaggcaaauccacaacaaauaucaugaucacaacaauuauaauaguaauaauaguaauacuacuaucacuaauagccguaggacuccuacuauacugcaaagcaagaucuacuccaguaacccucucaaaagaucaacuaagcggaauuaauaacaucgcauucagcaacuaaggacuagucccuguucccagagcccacuuuuuuuucuuuuuuugaaauaaaauagccugucuuucagaucuaaaaaaaaaaaaaaaaaaaaaaaaaaaaaaaaaaaaaaaaaaaaaaaaaaaaaaaaaaaaaaaaugcaucccccccccccccccccccccccccccccccaaaggcucuuuucagagccaccagaauu

SEQ ID NO: 1034 - RNA, 2023 nt, Artificial Sequence
  mRNA product Design d-1 comprising derived and/or modified sequence from HRSV(A2)__F0_DSCav1 (opt11)
gggagacccgugacccggaaguuguacggcuacgcgacuuucccucccacaaacccucgcgcccuuccuuuccuacuugggcccggcagaaagcuuaccauggaacuacuuauccucaaagccaacgccaucaccaccauccucacagcaguaaccuuuugcuucgccucaggccaaaauaucacagaagaauuuuaccagaguaccugcuccgccguauccaaaggauaccucagcgcgcuccgcaccggcugguacacuucaguaaucacaaucgaacuauccaacaucaaagaaaacaaaugcaacggcaccgacgcgaaagucaaacucaucaaacaagaacuagacaaauacaaaaaugccguaacagaacuacaacuguuaaugcagagcacacccgccaccaacaaccgcgcccgccgggaacucccccgauucaugaacuacacacucaacaacgccaaaaagacgaacgucacccucagcaagaaacgaaaacgcagauuccucgguuuccuacuaggcguaggcucagcaauagccuccggaguagccgucugcaaaguccugcacuuagaaggcgaagucaacaaaaucaaauccgcccuacucuccacgaacaaagccgucgucucccuguccaacggugucuccguuuuaaccuucaaaguucuggaccucaaaaacuacauagacaaacagcuucuccccauccucaacaaacaauccuguagcaucuccaacaucgaaaccgucauagaauuucaacagaaaaacaacagacugcucgaaaucacccgcgaguucuccgucaacgccggcgucacgacucccgucuccaccuauaugcucacgaacucggaacuccuuucccuaaucaacgacaugccgaucaccaacgaccaaaagaaacucaugucaaacaacguacaaauuguccgccaacaaucauacuccaucaugugcauaauuaaagaagaaguccucgcauacguaguccaacucccccucuacggcgucaucgacacccccugcuggaaacuccacaccuccccacucugcacaaccaacaccaaagaaggcucaaacauaugccuaacgcgcaccgaucgcgguugguacugcgacaacgccgguuccgucagcuucuucccccaagcagagacaugcaaaguccaaucaaaccgcgucuucugcgacaccaugaacucacuaacccuuccaagcgaagucaaccucugcaacguugacaucuucaaccccaaauacgacuguaaaaucaugaccuccaagaccgacguauccucuuccgucaucacaucccuaggcgcuaucguauccugcuaugguaaaaccaaaugcaccgccuccaacaaaaaccgcggcaucaucaagacauuuuccaacggcugcgacuacgugagcaacaaaggcgucgacaccgucuccguaggcaacacccucuacuauguaaacaaacaagagggcaaaucacucuacgucaaaggggaacccaucaucaacuucuacgacccgcucguauuccccagcgaugaguucgacgccuccaucucccaggucaacgaaaagauaaaccaaucacucgcauucauucguaaauccgacgaacuccuacacaacgugaaugcaggcaaaucgaccacuaacaucaugaucaccaccaucaucaucgucaucauagucauccuccugucccuuaucgccgucggucuuuuauuauacugcaaagcccgcagcacccccgucacccucucuaaggaccaacucagcggcaucaauaacaucgcauucucuaacuaaggacuagucccuguucccagagcccacuuuuuuuucuuuuuuugaaauaaaauagccugucuuucagaucuaaaaaaaaaaaaaaaaaaaaaaaaaaaaaaaaaaaaaaaaaaaaaaaaaaaaaaaaaaaaaaaaugcaucccccccccccccccccccccccccccccccaaaggcucuuuucagagccaccagaauu

SEQ ID NO: 1035 - RNA, 2078 nt, Artificial Sequence
  mRNA product Design d-2 comprising derived and/or modified sequence from HRSV(A2)__F0_DSCav1 (opt1)
gggagagcggcucggccauuuugucccagucaguccggaggcugcggcugcagaaguaccgccugcggaguaacugcaaagaagcuuaccauggagcugcucauccugaaggccaacgccaucaccaccauccugacggcggugaccuucugcuucgccagcggccagaacaucaccgaggaguucuaccaguccacgugcagcgccgucuccaagggguaccucagcgcccugcggaccggcugguacaccuccgugaucaccaucgagcugagcaacaucaaggagaacaagugcaacgggaccgacgccaaggugaagcucaucaagcaggagcuggacaaguacaagaacgcggucacggagcugcagcuccugaugcaguccaccccggcaaccaacaaccgcgcccggcgcgagcugccccgguucaugaacuacacccucaacaacgccaagaagacgaacgugacccugagcaagaagcgcaagcggcgcuuccugggcuuccuccugggggugggcuccgccaucgcgagcggcgucgccgugugcaaggugcugcaccucgagggggaggucaacaagaucaagagcgcccugcuguccaccaacaaggccguggugagccucuccaacggcgucagcgugcugaccuucaaggugcuggaccucaagaacuacaucgacaagcagcugcugcccauccugaacaagcagagcugcuccaucagcaacaucgagacggugaucgaguuccagcagaagaacaaccggcuccuggagaucacccgcgaguucagcgugaacgccggggucaccacccccguguccacguacaugcugaccaacagcgagcuccugucccugaucaacgacaugccgaucaccaacgaccagaagaagcucaugagcaacaacgugcagaucguccggcagcaguccuacagcaucaugugcaucaucaaggaggaggugcuggcguacgugguccagcugccccucuacggcgugaucgacacccccugcuggaagcugcacacgagcccccugugcaccaccaacaccaaggagggguccaacaucugccucacgcgcaccgaccggggcugguacugcgacaacgccggcagcgucuccuucuucccgcaggccgagaccugcaaggugcagagcaaccgcguguucugcgacaccaugaacucccugacgcugcccagcgagguaaaccucugcaacgucgacaucuucaaccccaaguacgacugcaagaucaugaccuccaagaccgacgugagcuccagcgugaucaccucccugggggccaucgucagcugcuacggcaagacgaagugcaccgccagcaacaagaaccgggggaucaucaagaccuucuccaacggcugcgacuacgugagcaacaagggcguggacaccguguccgucgggaacacccuguacuacgugaacaagcaggagggcaagagccucuacgugaagggggagcccaucaucaacuucuacgacccgcuggucuuccccuccgacgaguucgacgcgagcaucucccaggugaacgagaagaucaaccagagccuggccuucauccgcaaguccgacgagcugcuccacaacgugaacgccggcaagagcacgaccaacaucaugaucaccaccaucaucaucgucaucaucgugauccugcugucccucaucgccguggggcugcugcucuacugcaaggcccggagcacgcccgucacccuguccaaggaccagcugagcggcaucaacaacaucgcguucuccaacugaggacuaguaauaaggaaacuguaugaaugucugugggcaggaagugaagagauccuucuguaaagguuuuuggaauuaugucugcugaauaauaaacuuuuuugaaauaauaaaucugguagaaaaaugagaucuaaaaaaaaaaaaaaaaaaaaaaaaaaaaaaaaaaaaaaaaaaaaaaaaaaaaaaaaaaaaaaaaugcaucccccccccccccccccccccccccccccccaaaggcucuuuucagagccaccagaauu

SEQ ID NO: 1036 - RNA, 2078 nt, Artificial Sequence
  mRNA product Design d-2 comprising derived and/or modified sequence from HRSV(A2)__F0_DSCav1 (opt1)
gggagagcggcucggccauuuugucccagucaguccggaggcugcggcugcagaaguaccgccugcggaguaacugcaaagaagcuuaccauggagcugcucauccugaaggccaacgccaucaccaccauccugacggcggugaccuucugcuucgccagcggccagaacaucaccgaggaguucuaccaguccacgugcagcgccgucuccaagggguaccucagcgcccugcgcaccggcugguacaccuccgugaucaccaucgagcugagcaacaucaaggagaacaagugcaacgggaccgacgccaaggugaagcucaucaagcaggagcuggacaaguacaagaacgcggucacggagcugcagcuccugaugcaguccacccccgccaccaacaaccgggcccgccgggagcugccgcgcuucaugaacuacacccucaacaacgccaagaagacgaacgugacccugagcaagaagcggaagcgccgguuccugggcuuccuccugggggugggcuccgcgaucgccagcggcgucgccgugugcaaggugcugcaccucgagggggaggucaacaagaucaaguccgcccugcugagcaccaacaaggccguggugucccucagcaacggcgucuccgugcugaccuucaaggugcuggaccucaagaacuacaucgacaagcagcugcugcccauccucaacaagcagagcugcuccaucagcaacaucgagacggucaucgaguuccagcagaagaacaaccgccugcuggagaucacccgggaguucuccgugaacgcgggggugaccacccccgucagcacguacaugcucaccaacagcgagcugcugucccucaucaacgacaugcccaucaccaacgaccagaagaagcugaugagcaacaacgugcagaucgugcgccagcaguccuacagcaucaugugcaucaucaaggaggagguccuggccuacguggugcagcucccgcuguacggcgucaucgacacccccugcuggaagcugcacacgagcccccucugcaccaccaacaccaaggaggggagcaacaucugccugacgcggaccgaccgcggcugguacugcgacaacgccggcuccgugagcuucuucccccaggccgagaccugcaagguccaguccaaccggguguucugcgacaccaugaacagccugacgcucccguccgaggugaaccugugcaacgucgacaucuucaaccccaaguacgacugcaagaucaugaccagcaagaccgacguguccagcuccgugaucaccagccugggggccaucgucuccugcuacggcaagacgaagugcaccgcgagcaacaagaaccgcgggaucaucaagaccuucuccaacggcugcgacuacgugagcaacaagggcguggacaccgucagcguggggaacacccucuacuacgugaacaagcaggagggcaagucccuguacgucaagggggagcccaucaucaacuucuacgacccccugguguucccgagcgacgaguucgacgccuccaucagccaggugaacgagaagaucaaccagucccucgccuucauccggaaguccgacgagcugcugcacaacgucaacgccggcaaguccacgaccaacaucaugaucaccaccaucaucaucgugaucaucgugauccugcucagccugaucgccgucgggcugcuccuguacugcaaggcgcgcuccacgcccgugacccugagcaaggaccagcucuccggcaucaacaacaucgccuucagcaacugaggacuaguaauaaggaaacuguaugaaugucugugggcaggaagugaagagauccuucuguaaagguuuuuggaauuaugucugcugaauaauaaacuuuuuugaaauaauaaaucugguagaaaaaugagaucuaaaaaaaaaaaaaaaaaaaaaaaaaaaaaaaaaaaaaaaaaaaaaaaaaaaaaaaaaaaaaaaaugcaucccccccccccccccccccccccccccccccaaaggcucuuuucagagccaccagaauu

SEQ ID NO: 1037 - RNA, 2078 nt, Artificial Sequence
  mRNA product Design d-2 comprising derived and/or modified sequence from HRSV(A2)__F0_DSCav1 (opt2)
gggagagcggcucggccauuuugucccagucaguccggaggcugcggcugcagaaguaccgccugcggaguaacugcaaagaagcuuaccauggagcuccucauccucaaggccaacgccaucaccaccauccucaccgccgucaccuucugcuucgccuccggccagaacaucaccgaggaguucuaccaguccaccugcuccgccgucuccaagggcuaccucuccgcccuccgcaccggcugguacaccuccgucaucaccaucgagcucuccaacaucaaggagaacaagugcaacggcaccgacgccaaggucaagcucaucaagcaggagcucgacaaguacaagaacgccgucaccgagcuccagcuccucaugcaguccacccccgccaccaacaaccgcgcccgccgcgagcucccccgcuucaugaacuacacccucaacaacgccaagaagaccaacgucacccucuccaagaagcgcaagcgccgcuuccucggcuuccuccucggcgucggcuccgccaucgccuccggcgucgccgucugcaagguccuccaccucgagggcgaggucaacaagaucaaguccgcccuccucuccaccaacaaggccgucgucucccucuccaacggcgucuccguccucaccuucaagguccucgaccucaagaacuacaucgacaagcagcuccuccccauccucaacaagcaguccugcuccaucuccaacaucgagaccgucaucgaguuccagcagaagaacaaccgccuccucgagaucacccgcgaguucuccgucaacgccggcgucaccacccccgucuccaccuacaugcucaccaacuccgagcuccucucccucaucaacgacaugcccaucaccaacgaccagaagaagcucauguccaacaacguccagaucguccgccagcaguccuacuccaucaugugcaucaucaaggaggagguccucgccuacgucguccagcucccccucuacggcgucaucgacacccccugcuggaagcuccacaccuccccccucugcaccaccaacaccaaggagggcuccaacaucugccucacccgcaccgaccgcggcugguacugcgacaacgccggcuccgucuccuucuucccccaggccgagaccugcaagguccaguccaaccgcgucuucugcgacaccaugaacucccucacccuccccuccgaggucaaccucugcaacgucgacaucuucaaccccaaguacgacugcaagaucaugaccuccaagaccgacgucuccuccuccgucaucaccucccucggcgccaucgucuccugcuacggcaagaccaagugcaccgccuccaacaagaaccgcggcaucaucaagaccuucuccaacggcugcgacuacgucuccaacaagggcgucgacaccgucuccgucggcaacacccucuacuacgucaacaagcaggagggcaagucccucuacgucaagggcgagcccaucaucaacuucuacgacccccucgucuuccccuccgacgaguucgacgccuccaucucccaggucaacgagaagaucaaccagucccucgccuucauccgcaaguccgacgagcuccuccacaacgucaacgccggcaaguccaccaccaacaucaugaucaccaccaucaucaucgucaucaucgucauccuccucucccucaucgccgucggccuccuccucuacugcaaggcccgcuccacccccgucacccucuccaaggaccagcucuccggcaucaacaacaucgccuucuccaacugaggacuaguaauaaggaaacuguaugaaugucugugggcaggaagugaagagauccuucuguaaagguuuuuggaauuaugucugcugaauaauaaacuuuuuugaaauaauaaaucugguagaaaaaugagaucuaaaaaaaaaaaaaaaaaaaaaaaaaaaaaaaaaaaaaaaaaaaaaaaaaaaaaaaaaaaaaaaaugcaucccccccccccccccccccccccccccccccaaaggcucuuuucagagccaccagaauu

SEQ ID NO: 1038 - RNA, 2078 nt, Artificial Sequence
  mRNA product Design d-2 comprising derived and/or modified sequence from HRSV(A2)__F0_DSCav1 (opt3)
gggagagcggcucggccauuuugucccagucaguccggaggcugcggcugcagaaguaccgccugcggaguaacugcaaagaagcuuaccauggagcugcucauccuuaaggccaacgcuauuaccacaauacugacugcagugacguucugcuuugccagcggccagaauaucaccgaagaguucuaccaauccacauguucugcggucucaaaaggguauuugagugcuuuaagaacuggaugguacaccagcguuauuacaaucgaacuguccaacauuaaggagaauaaaugcaacgguaccgacgccaaggugaaacuaaucaagcaggaacucgauaaguauaaaaaugcaguaacugagcugcagcuucugaugcagucuacacccgccaccaacaauagggcucggcgcgaguugccucgauuuaugaacuacacgcucaauaacgcaaagaaaacuaaugugacccugucgaagaaacguaagagaagguuccugggcuuucucuuaggggucggaucagccauagcuagcggcguggccguuuguaaggugcugcaccuugaaggugaggucaacaaaaucaagagugcguugcuguccacaaauaaagcagugguaucucuaagcaacgggguuuccgugcucacuuucaagguccuggaccuuaaaaauuauauugauaagcaacuguugccaauccucaacaaacagucaugcaguauuagcaacaucgaaaccgugauagaguuucagcagaagaauaaccggcuguuagagauuacacgcgaguucucugugaaugccggagucaccacgccgguuuccacuuacaugcugacaaacucagaacuccuuagccugaucaaugacaugcccauuaccaacgaucaaaagaaauugaugaguaauaacgugcagaucguaagacagcagucuuauuccaucauguguauuauaaaggaagaggugcuagcuuacgucgugcaacugccucucuacggcguuaucgacacuccaugcuggaaacugcauacaagcccccuuuguaccacgaauaccaaggaaggcucgaacauuugccugacaaggacugaucgggggugguauugugacaaugccggaucuguguccuuuuucccucaggcagagaccugcaaaguccagucaaaccgcguguuuugugauacaaugaauaguuugacucucccaagcgagguaaaccugugcaauguugacaucuucaaccccaaguacgauugcaagauaaugaccuccaaaacagacgugucuagcucagucauuaccaguuuaggugcuaucguguccuguuauggcaagacuaaaugcacggccagcaacaagaaucgagggaucauuaaaacauuuucuaacggaugugauuacgucucaaauaagggcguggacaccguuaguguggguaacacucuguauuacguaaauaagcaagaagggaaaagccuauaugucaagggagagccuaucauuaacuucuacgacccacucguguucccguccgaugaauuugacgcgucuauaucgcagguuaaugagaaaaucaaccagagccuggccuucauuagaaaguccgaugaacuuuugcacaaugugaacgcaggcaaaucaaccacaaauaucaugaucaccacuauuauaaucgucauuaucgugauucugcucagucugaucgcuguaggccuucuguuguacugcaaggccaggucuacacccgugacgcucagcaaggaccagcuguccgggauaaacaauaucgcuuuuucaaacugaggacuaguaauaaggaaacuguaugaaugucugugggcaggaagugaagagauccuucuguaaagguuuuuggaauuaugucugcugaauaauaaacuuuuuugaaauaauaaaucugguagaaaaaugagaucuaaaaaaaaaaaaaaaaaaaaaaaaaaaaaaaaaaaaaaaaaaaaaaaaaaaaaaaaaaaaaaaaugcaucccccccccccccccccccccccccccccccaaaggcucuuuucagagccaccagaauu

SEQ ID NO: 1039 - RNA, 2078 nt, Artificial Sequence
  mRNA product Design d-2 comprising derived and/or modified sequence from HRSV(A2)__F0_DSCav1 (opt4)
gggagagcggcucggccauuuugucccagucaguccggaggcugcggcugcagaaguaccgccugcggaguaacugcaaagaagcuuaccauggagcugcugauccugaaggccaacgccaucaccaccauccugaccgccgugaccuucugcuucgccagcggccagaacaucaccgaggaguucuaccagagcaccugcagcgccgugagcaagggcuaccugagcgcccugagaaccggcugguacaccagcgugaucaccaucgagcugagcaacaucaaggagaacaagugcaacggcaccgacgccaaggugaagcugaucaagcaggagcuggacaaguacaagaacgccgugaccgagcugcagcugcugaugcagagcacccccgccaccaacaacagagccagaagagagcugcccagauucaugaacuacacccugaacaacgccaagaagaccaacgugacccugagcaagaagagaaagagaagauuccugggcuuccugcugggcgugggcagcgccaucgccagcggcguggccgugugcaaggugcugcaccuggagggcgaggugaacaagaucaagagcgcccugcugagcaccaacaaggccguggugagccugagcaacggcgugagcgugcugaccuucaaggugcuggaccugaagaacuacaucgacaagcagcugcugcccauccugaacaagcagagcugcagcaucagcaacaucgagaccgugaucgaguuccagcagaagaacaacagacugcuggagaucaccagagaguucagcgugaacgccggcgugaccacccccgugagcaccuacaugcugaccaacagcgagcugcugagccugaucaacgacaugcccaucaccaacgaccagaagaagcugaugagcaacaacgugcagaucgugagacagcagagcuacagcaucaugugcaucaucaaggaggaggugcuggccuacguggugcagcugccccuguacggcgugaucgacacccccugcuggaagcugcacaccagcccccugugcaccaccaacaccaaggagggcagcaacaucugccugaccagaaccgacagaggcugguacugcgacaacgccggcagcgugagcuucuucccccaggccgagaccugcaaggugcagagcaacagaguguucugcgacaccaugaacagccugacccugcccagcgaggugaaccugugcaacguggacaucuucaaccccaaguacgacugcaagaucaugaccagcaagaccgacgugagcagcagcgugaucaccagccugggcgccaucgugagcugcuacggcaagaccaagugcaccgccagcaacaagaacagaggcaucaucaagaccuucagcaacggcugcgacuacgugagcaacaagggcguggacaccgugagcgugggcaacacccuguacuacgugaacaagcaggagggcaagagccuguacgugaagggcgagcccaucaucaacuucuacgacccccugguguuccccagcgacgaguucgacgccagcaucagccaggugaacgagaagaucaaccagagccuggccuucaucagaaagagcgacgagcugcugcacaacgugaacgccggcaagagcaccaccaacaucaugaucaccaccaucaucaucgugaucaucgugauccugcugagccugaucgccgugggccugcugcuguacugcaaggccagaagcacccccgugacccugagcaaggaccagcugagcggcaucaacaacaucgccuucagcaacugaggacuaguaauaaggaaacuguaugaaugucugugggcaggaagugaagagauccuucuguaaagguuuuuggaauuaugucugcugaauaauaaacuuuuuugaaauaauaaaucugguagaaaaaugagaucuaaaaaaaaaaaaaaaaaaaaaaaaaaaaaaaaaaaaaaaaaaaaaaaaaaaaaaaaaaaaaaaaugcaucccccccccccccccccccccccccccccccaaaggcucuuuucagagccaccagaauu

SEQ ID NO: 1040 - RNA, 2078 nt, Artificial Sequence
  mRNA product Design d-2 comprising derived and/or modified sequence from HRSV(A2)__F0_DSCav1 (opt5)
gggagagcggcucggccauuuugucccagucaguccggaggcugcggcugcagaaguaccgccugcggaguaacugcaaagaagcuuaccauggagcugcucauccugaaggccaacgcuauuaccacaauccuuacggccgugaccuucugcuuugcgagcggccagaauauuacagaagaguucuaccaauccaccuguucugcugucagcaaaggguaucuguccgcccucagaacaggaugguacaccucuguuaucacaauugaacugagcaacaucaaggagaauaaaugcaacggcaccgacgccaaggugaaacuuaucaagcaggaacuggauaaguauaaaaaugcugugacggagcuccagcugcugaugcaguccacccccgccacaaacaaucgggcucgcagagagcucccucgguuuaugaacuacacccugaauaacgccaagaaaacaaaugucacccuuucuaagaaacgcaagagacgguuccugggguuucuccugggagugggcagcgcgauugccuccgggguugcuguguguaagguccuucaccuggaaggagaggugaacaaaaucaagagcgcccuccugucuacgaauaaagcuguugugucccugagcaacggcgucucugugcucacauucaaggugcuggaccuuaaaaauuauauugauaagcaacugcucccgauccugaacaaacaguccugcagcauuucuaacaucgaaaccgucauugaguuucagcagaagaauaaccgccuucuggagaucacaagagaauuuuccguuaaugccggcgugaccacccccgugagcacauacaugcucacgaacuccgagcugcugucucucaucaaugacaugccuauuaccaacgaucaaaagaaacugaugagcaauaacguccagaucgugcggcagcaguccuauagcauuauguguaucauuaaggaagagguucuugcguacgugguccaacugccccucuacggggugaucgacacaccuugcuggaaacugcauaccucuccccuuuguacaaccaauacgaaggaaggauccaacaucugccugacacgcaccgauagaggcugguauugugacaaugccgggagcguuucuuucuucccucaggcugagaccugcaaagugcagagcaaccgggucuuuugugauacaaugaacucccucacccugccgucugaggugaaucugugcaaugucgacauuuucaaccccaaguacgauugcaagaucaugacaagcaaaacggacguguccagcucuguuauuaccucccucggagccaucgugagcuguuauggcaagacaaaaugcaccgcuucuaacaagaaucgcgggauuaucaaaacauuuuccaacggaugugauuacgucagcaauaagggcguggacaccguuuccgugggcaacacgcuguauuacgucaauaagcaagaagggaaaucucuuuaugugaagggagagccuaucauuaacuucuacgacccccugguguucccuagcgaugaauuugacgccuccaucucucagguuaaugagaaaauuaaccagagccucgccuucaucagaaaguccgaugaacugcugcacaaugucaacgcuggcaaaagcaccacaaauauuaugaucaccacaauuaucaucgugauuaucgugauucuucucucucugaucgcggucgggcugcuccuguacugcaaggcccgguccacccccgugacgcuuagcaaggaccagcugucuggaauuaacaauaucgcuuuuuccaacugaggacuaguaauaaggaaacuguaugaaugucugugggcaggaagugaagagauccuucuguaaagguuuuuggaauuaugucugcugaauaauaaacuuuuuugaaauaauaaaucugguagaaaaaugagaucuaaaaaaaaaaaaaaaaaaaaaaaaaaaaaaaaaaaaaaaaaaaaaaaaaaaaaaaaaaaaaaaaugcaucccccccccccccccccccccccccccccccaaaggcucuuuucagagccaccagaauu

SEQ ID NO: 1041 - RNA, 2078 nt, Artificial Sequence
  mRNA product Design d-2 comprising derived and/or modified sequence from HRSV(A2)__F0_DSCav1 (opt6)
gggagagcggcucggccauuuugucccagucaguccggaggcugcggcugcagaaguaccgccugcggaguaacugcaaagaagcuuaccauggaauuauuaauccucaaagcgaacgcuauuacuaccauucuaacagcagucacauucugcuucgccucaggccaaaacauuacagaagaauuuuaccaaucaacaugcucugccguaucaaaaggcuaccuauccgcccuacgaacaggcugguacacaagcguaauaacaaucgaacuaucaaacauaaaagaaaacaaaugcaacgguacagacgccaaaguuaaacuaauaaaacaagaacucgauaaauacaaaaacgcaguaacagaauuacaacuacuaaugcaaucaacaccugcaacaaacaauagagccaggagagaauuaccucgauucaugaauuacacacucaauaacgcaaaaaaaaccaacguuacacuaucaaaaaaaagaaaacgacgauucuuaggauuccuacucggagucggaucagcaauagcaucuggcguugcaguaugcaaaguauuacacuuagaaggugaagucaauaaaauaaaaagcgcgcuacuaaguacaaacaaagcagucgucucccuaucaaacggagucucaguccuaacauucaaaguacucgaccuaaaaaauuacauagauaaacaacuacuuccaauauuaaacaaacaauccuguagcaucagcaauauagaaacaguaauagaauuucaacaaaaaaacaaccgauuauuagaaaucacucgagaauuuuccguaaacgccgggguaacaacuccagucucaaccuacaugcuaaccaauucagaacuauugagcuuaauaaacgacaugccaauaaccaacgaccaaaaaaaacuaaugucuaacaauguucaaaucgucagacaacaaaguuacaguauaauguguauaaucaaagaagaaguccuagcauacguaguccaacucccacuauauggaguuaucgacacaccauguuggaaauuacacaccucaccauuaugcacaaccaauacaaaagaaggaucaaacauaugccuuacacggacagaccgcggaugguauugugacaacgcuggcucagucuccuuuuucccacaagcagaaacaugcaaaguacaaucaaacagagucuuuugcgauaccaugaacucacuuacauuaccaagcgaaguaaaucuuuguaacgucgacaucuucaauccuaaauaugacugcaaaaucaugaccucaaaaacagacguuagcucuucaguaaucacuagcuuaggagcaaucguaucaugcuacggcaaaacaaaauguacagcaucaaauaaaaacagaggaaucauaaaaacauuuucaaacggaugcgauuauguaagcaacaaaggaguagauacuguaagcguaggaaacacauuguacuauguaaacaaacaagaaggaaaaucacucuauguaaaaggagaaccuauaaucaauuucuacgauccauuaguguucccaucagaugaauuugacgccucaauaucacaaguuaaugaaaaaauaaaucaaucgcuagcauucauacguaaaucagaugaauuacuacauaacguaaacgcaggcaaauccacaacaaauaucaugaucacaacaauuauaauaguaauaauaguaauacuacuaucacuaauagccguaggacuccuacuauacugcaaagcaagaucuacuccaguaacccucucaaaagaucaacuaagcggaauuaauaacaucgcauucagcaacuaaggacuaguaauaaggaaacuguaugaaugucugugggcaggaagugaagagauccuucuguaaagguuuuuggaauuaugucugcugaauaauaaacuuuuuugaaauaauaaaucugguagaaaaaugagaucuaaaaaaaaaaaaaaaaaaaaaaaaaaaaaaaaaaaaaaaaaaaaaaaaaaaaaaaaaaaaaaaaugcaucccccccccccccccccccccccccccccccaaaggcucuuuucagagccaccagaauu

SEQ ID NO: 1042 - RNA, 2078 nt, Artificial Sequence
  mRNA product Design d-2 comprising derived and/or modified sequence from HRSV(A2)__F0_DSCav1 (opt11)
gggagagcggcucggccauuuugucccagucaguccggaggcugcggcugcagaaguaccgccugcggaguaacugcaaagaagcuuaccauggaacuacuuauccucaaagccaacgccaucaccaccauccucacagcaguaaccuuuugcuucgccucaggccaaaauaucacagaagaauuuuaccagaguaccugcuccgccguauccaaaggauaccucagcgcgcuccgcaccggcugguacacuucaguaaucacaaucgaacuauccaacaucaaagaaaacaaaugcaacggcaccgacgcgaaagucaaacucaucaaacaagaacuagacaaauacaaaaaugccguaacagaacuacaacuguuaaugcagagcacacccgccaccaacaaccgcgcccgccgggaacucccccgauucaugaacuacacacucaacaacgccaaaaagacgaacgucacccucagcaagaaacgaaaacgcagauuccucgguuuccuacuaggcguaggcucagcaauagccuccggaguagccgucugcaaaguccugcacuuagaaggcgaagucaacaaaaucaaauccgcccuacucuccacgaacaaagccgucgucucccuguccaacggugucuccguuuuaaccuucaaaguucuggaccucaaaaacuacauagacaaacagcuucuccccauccucaacaaacaauccuguagcaucuccaacaucgaaaccgucauagaauuucaacagaaaaacaacagacugcucgaaaucacccgcgaguucuccgucaacgccggcgucacgacucccgucuccaccuauaugcucacgaacucggaacuccuuucccuaaucaacgacaugccgaucaccaacgaccaaaagaaacucaugucaaacaacguacaaauuguccgccaacaaucauacuccaucaugugcauaauuaaagaagaaguccucgcauacguaguccaacucccccucuacggcgucaucgacacccccugcuggaaacuccacaccuccccacucugcacaaccaacaccaaagaaggcucaaacauaugccuaacgcgcaccgaucgcgguugguacugcgacaacgccgguuccgucagcuucuucccccaagcagagacaugcaaaguccaaucaaaccgcgucuucugcgacaccaugaacucacuaacccuuccaagcgaagucaaccucugcaacguugacaucuucaaccccaaauacgacuguaaaaucaugaccuccaagaccgacguauccucuuccgucaucacaucccuaggcgcuaucguauccugcuaugguaaaaccaaaugcaccgccuccaacaaaaaccgcggcaucaucaagacauuuuccaacggcugcgacuacgugagcaacaaaggcgucgacaccgucuccguaggcaacacccucuacuauguaaacaaacaagagggcaaaucacucuacgucaaaggggaacccaucaucaacuucuacgacccgcucguauuccccagcgaugaguucgacgccuccaucucccaggucaacgaaaagauaaaccaaucacucgcauucauucguaaauccgacgaacuccuacacaacgugaaugcaggcaaaucgaccacuaacaucaugaucaccaccaucaucaucgucaucauagucauccuccugucccuuaucgccgucggucuuuuauuauacugcaaagcccgcagcacccccgucacccucucuaaggaccaacucagcggcaucaauaacaucgcauucucuaacuaaggacuaguaauaaggaaacuguaugaaugucugugggcaggaagugaagagauccuucuguaaagguuuuuggaauuaugucugcugaauaauaaacuuuuuugaaauaauaaaucugguagaaaaaugagaucuaaaaaaaaaaaaaaaaaaaaaaaaaaaaaaaaaaaaaaaaaaaaaaaaaaaaaaaaaaaaaaaaugcaucccccccccccccccccccccccccccccccaaaggcucuuuucagagccaccagaauu

SEQ ID NO: 1043 - RNA, 2394 nt, Artificial Sequence
  mRNA product Design d-3 comprising derived and/or modified sequence from HRSV(A2)__F0_DSCav1 (opt1)
gggagagggcgcuuggcuugcaaggacccugagcugcggcauugaagcacacccaacccaacucgacugaagucagccucacugaaccggaucugagaaucuucucucucugggcuugccagggcucuccgaaccuagcuagcauccucuucaauuccaacuagaaagcuuaccauggagcugcucauccugaaggccaacgccaucaccaccauccugacggcggugaccuucugcuucgccagcggccagaacaucaccgaggaguucuaccaguccacgugcagcgccgucuccaagggguaccucagcgcccugcggaccggcugguacaccuccgugaucaccaucgagcugagcaacaucaaggagaacaagugcaacgggaccgacgccaaggugaagcucaucaagcaggagcuggacaaguacaagaacgcggucacggagcugcagcuccugaugcaguccaccccggcaaccaacaaccgcgcccggcgcgagcugccccgguucaugaacuacacccucaacaacgccaagaagacgaacgugacccugagcaagaagcgcaagcggcgcuuccugggcuuccuccugggggugggcuccgccaucgcgagcggcgucgccgugugcaaggugcugcaccucgagggggaggucaacaagaucaagagcgcccugcuguccaccaacaaggccguggugagccucuccaacggcgucagcgugcugaccuucaaggugcuggaccucaagaacuacaucgacaagcagcugcugcccauccugaacaagcagagcugcuccaucagcaacaucgagacggugaucgaguuccagcagaagaacaaccggcuccuggagaucacccgcgaguucagcgugaacgccggggucaccacccccguguccacguacaugcugaccaacagcgagcuccugucccugaucaacgacaugccgaucaccaacgaccagaagaagcucaugagcaacaacgugcagaucguccggcagcaguccuacagcaucaugugcaucaucaaggaggaggugcuggcguacgugguccagcugccccucuacggcgugaucgacacccccugcuggaagcugcacacgagcccccugugcaccaccaacaccaaggagggguccaacaucugccucacgcgcaccgaccggggcugguacugcgacaacgccggcagcgucuccuucuucccgcaggccgagaccugcaaggugcagagcaaccgcguguucugcgacaccaugaacucccugacgcugcccagcgagguaaaccucugcaacgucgacaucuucaaccccaaguacgacugcaagaucaugaccuccaagaccgacgugagcuccagcgugaucaccucccugggggccaucgucagcugcuacggcaagacgaagugcaccgccagcaacaagaaccgggggaucaucaagaccuucuccaacggcugcgacuacgugagcaacaagggcguggacaccguguccgucgggaacacccuguacuacgugaacaagcaggagggcaagagccucuacgugaagggggagcccaucaucaacuucuacgacccgcuggucuuccccuccgacgaguucgacgcgagcaucucccaggugaacgagaagaucaaccagagccuggccuucauccgcaaguccgacgagcugcuccacaacgugaacgccggcaagagcacgaccaacaucaugaucaccaccaucaucaucgucaucaucgugauccugcugucccucaucgccguggggcugcugcucuacugcaaggcccggagcacgcccgucacccuguccaaggaccagcugagcggcaucaacaacaucgcguucuccaacugaggacuagugaagggaacacccaaauuuaauucagccuuaagcacaauuaauuaagagugaaacguaauuguacaagcaguuggucacccaccauagggcaugaucaacaccgcaaccuuuccuuuuucccccagugauucugaaaaaccccucuucccuucagcuugcuuagauguuccaaauuuaguaagcuuaaggcggccuacagaagaaaaagaaaaaaaaggccacaaaaguucccucucacuuucaguaaauaaaauaaaagcagcaacagaaauaaagaaauaaaugaaauucaaaaugaaauaaauauuguguugugcagcauuaaaaaaucaauaaaaauuaaaaaugagcaagaucuaaaaaaaaaaaaaaaaaaaaaaaaaaaaaaaaaaaaaaaaaaaaaaaaaaaaaaaaaaaaaaaaugcaucccccccccccccccccccccccccccccccaaaggcucuuuucagagccaccagaauu

SEQ ID NO: 1044 - RNA, 2394 nt, Artificial Sequence
  mRNA product Design d-3 comprising derived and/or modified sequence from HRSV(A2)__F0_DSCav1 (opt1)
gggagagggcgcuuggcuugcaaggacccugagcugcggcauugaagcacacccaacccaacucgacugaagucagccucacugaaccggaucugagaaucuucucucucugggcuugccagggcucuccgaaccuagcuagcauccucuucaauuccaacuagaaagcuuaccauggagcugcucauccugaaggccaacgccaucaccaccauccugacggcggugaccuucugcuucgccagcggccagaacaucaccgaggaguucuaccaguccacgugcagcgccgucuccaagggguaccucagcgcccugcgcaccggcugguacaccuccgugaucaccaucgagcugagcaacaucaaggagaacaagugcaacgggaccgacgccaaggugaagcucaucaagcaggagcuggacaaguacaagaacgcggucacggagcugcagcuccugaugcaguccacccccgccaccaacaaccgggcccgccgggagcugccgcgcuucaugaacuacacccucaacaacgccaagaagacgaacgugacccugagcaagaagcggaagcgccgguuccugggcuuccuccugggggugggcuccgcgaucgccagcggcgucgccgugugcaaggugcugcaccucgagggggaggucaacaagaucaaguccgcccugcugagcaccaacaaggccguggugucccucagcaacggcgucuccgugcugaccuucaaggugcuggaccucaagaacuacaucgacaagcagcugcugcccauccucaacaagcagagcugcuccaucagcaacaucgagacggucaucgaguuccagcagaagaacaaccgccugcuggagaucacccgggaguucuccgugaacgcgggggugaccacccccgucagcacguacaugcucaccaacagcgagcugcugucccucaucaacgacaugcccaucaccaacgaccagaagaagcugaugagcaacaacgugcagaucgugcgccagcaguccuacagcaucaugugcaucaucaaggaggagguccuggccuacguggugcagcucccgcuguacggcgucaucgacacccccugcuggaagcugcacacgagcccccucugcaccaccaacaccaaggaggggagcaacaucugccugacgcggaccgaccgcggcugguacugcgacaacgccggcuccgugagcuucuucccccaggccgagaccugcaagguccaguccaaccggguguucugcgacaccaugaacagccugacgcucccguccgaggugaaccugugcaacgucgacaucuucaaccccaaguacgacugcaagaucaugaccagcaagaccgacguguccagcuccgugaucaccagccugggggccaucgucuccugcuacggcaagacgaagugcaccgcgagcaacaagaaccgcgggaucaucaagaccuucuccaacggcugcgacuacgugagcaacaagggcguggacaccgucagcguggggaacacccucuacuacgugaacaagcaggagggcaagucccuguacgucaagggggagcccaucaucaacuucuacgacccccugguguucccgagcgacgaguucgacgccuccaucagccaggugaacgagaagaucaaccagucccucgccuucauccggaaguccgacgagcugcugcacaacgucaacgccggcaaguccacgaccaacaucaugaucaccaccaucaucaucgugaucaucgugauccugcucagccugaucgccgucgggcugcuccuguacugcaaggcgcgcuccacgcccgugacccugagcaaggaccagcucuccggcaucaacaacaucgccuucagcaacugaggacuagugaagggaacacccaaauuuaauucagccuuaagcacaauuaauuaagagugaaacguaauuguacaagcaguuggucacccaccauagggcaugaucaacaccgcaaccuuuccuuuuucccccagugauucugaaaaaccccucuucccuucagcuugcuuagauguuccaaauuuaguaagcuuaaggcggccuacagaagaaaaagaaaaaaaaggccacaaaaguucccucucacuuucaguaaauaaaauaaaagcagcaacagaaauaaagaaauaaaugaaauucaaaaugaaauaaauauuguguugugcagcauuaaaaaaucaauaaaaauuaaaaaugagcaagaucuaaaaaaaaaaaaaaaaaaaaaaaaaaaaaaaaaaaaaaaaaaaaaaaaaaaaaaaaaaaaaaaaugcaucccccccccccccccccccccccccccccccaaaggcucuuuucagagccaccagaauu

SEQ ID NO: 1045 - RNA, 2394 nt, Artificial Sequence
  mRNA product Design d-3 comprising derived and/or modified sequence from HRSV(A2)__F0_DSCav1 (opt2)
gggagagggcgcuuggcuugcaaggacccugagcugcggcauugaagcacacccaacccaacucgacugaagucagccucacugaaccggaucugagaaucuucucucucugggcuugccagggcucuccgaaccuagcuagcauccucuucaauuccaacuagaaagcuuaccauggagcuccucauccucaaggccaacgccaucaccaccauccucaccgccgucaccuucugcuucgccuccggccagaacaucaccgaggaguucuaccaguccaccugcuccgccgucuccaagggcuaccucuccgcccuccgcaccggcugguacaccuccgucaucaccaucgagcucuccaacaucaaggagaacaagugcaacggcaccgacgccaaggucaagcucaucaagcaggagcucgacaaguacaagaacgccgucaccgagcuccagcuccucaugcaguccacccccgccaccaacaaccgcgcccgccgcgagcucccccgcuucaugaacuacacccucaacaacgccaagaagaccaacgucacccucuccaagaagcgcaagcgccgcuuccucggcuuccuccucggcgucggcuccgccaucgccuccggcgucgccgucugcaagguccuccaccucgagggcgaggucaacaagaucaaguccgcccuccucuccaccaacaaggccgucgucucccucuccaacggcgucuccguccucaccuucaagguccucgaccucaagaacuacaucgacaagcagcuccuccccauccucaacaagcaguccugcuccaucuccaacaucgagaccgucaucgaguuccagcagaagaacaaccgccuccucgagaucacccgcgaguucuccgucaacgccggcgucaccacccccgucuccaccuacaugcucaccaacuccgagcuccucucccucaucaacgacaugcccaucaccaacgaccagaagaagcucauguccaacaacguccagaucguccgccagcaguccuacuccaucaugugcaucaucaaggaggagguccucgccuacgucguccagcucccccucuacggcgucaucgacacccccugcuggaagcuccacaccuccccccucugcaccaccaacaccaaggagggcuccaacaucugccucacccgcaccgaccgcggcugguacugcgacaacgccggcuccgucuccuucuucccccaggccgagaccugcaagguccaguccaaccgcgucuucugcgacaccaugaacucccucacccuccccuccgaggucaaccucugcaacgucgacaucuucaaccccaaguacgacugcaagaucaugaccuccaagaccgacgucuccuccuccgucaucaccucccucggcgccaucgucuccugcuacggcaagaccaagugcaccgccuccaacaagaaccgcggcaucaucaagaccuucuccaacggcugcgacuacgucuccaacaagggcgucgacaccgucuccgucggcaacacccucuacuacgucaacaagcaggagggcaagucccucuacgucaagggcgagcccaucaucaacuucuacgacccccucgucuuccccuccgacgaguucgacgccuccaucucccaggucaacgagaagaucaaccagucccucgccuucauccgcaaguccgacgagcuccuccacaacgucaacgccggcaaguccaccaccaacaucaugaucaccaccaucaucaucgucaucaucgucauccuccucucccucaucgccgucggccuccuccucuacugcaaggcccgcuccacccccgucacccucuccaaggaccagcucuccggcaucaacaacaucgccuucuccaacugaggacuagugaagggaacacccaaauuuaauucagccuuaagcacaauuaauuaagagugaaacguaauuguacaagcaguuggucacccaccauagggcaugaucaacaccgcaaccuuuccuuuuucccccagugauucugaaaaaccccucuucccuucagcuugcuuagauguuccaaauuuaguaagcuuaaggcggccuacagaagaaaaagaaaaaaaaggccacaaaaguucccucucacuuucaguaaauaaaauaaaagcagcaacagaaauaaagaaauaaaugaaauucaaaaugaaauaaauauuguguugugcagcauuaaaaaaucaauaaaaauuaaaaaugagcaagaucuaaaaaaaaaaaaaaaaaaaaaaaaaaaaaaaaaaaaaaaaaaaaaaaaaaaaaaaaaaaaaaaaugcaucccccccccccccccccccccccccccccccaaaggcucuuuucagagccaccagaauu

SEQ ID NO: 1046 - RNA, 2394 nt, Artificial Sequence
  mRNA product Design d-3 comprising derived and/or modified sequence from HRSV(A2)__F0_DSCav1 (opt3)
gggagagggcgcuuggcuugcaaggacccugagcugcggcauugaagcacacccaacccaacucgacugaagucagccucacugaaccggaucugagaaucuucucucucugggcuugccagggcucuccgaaccuagcuagcauccucuucaauuccaacuagaaagcuuaccauggagcugcucauccuuaaggccaacgcuauuaccacaauacugacugcagugacguucugcuuugccagcggccagaauaucaccgaagaguucuaccaauccacauguucugcggucucaaaaggguauuugagugcuuuaagaacuggaugguacaccagcguuauuacaaucgaacuguccaacauuaaggagaauaaaugcaacgguaccgacgccaaggugaaacuaaucaagcaggaacucgauaaguauaaaaaugcaguaacugagcugcagcuucugaugcagucuacacccgccaccaacaauagggcucggcgcgaguugccucgauuuaugaacuacacgcucaauaacgcaaagaaaacuaaugugacccugucgaagaaacguaagagaagguuccugggcuuucucuuaggggucggaucagccauagcuagcggcguggccguuuguaaggugcugcaccuugaaggugaggucaacaaaaucaagagugcguugcuguccacaaauaaagcagugguaucucuaagcaacgggguuuccgugcucacuuucaagguccuggaccuuaaaaauuauauugauaagcaacuguugccaauccucaacaaacagucaugcaguauuagcaacaucgaaaccgugauagaguuucagcagaagaauaaccggcuguuagagauuacacgcgaguucucugugaaugccggagucaccacgccgguuuccacuuacaugcugacaaacucagaacuccuuagccugaucaaugacaugcccauuaccaacgaucaaaagaaauugaugaguaauaacgugcagaucguaagacagcagucuuauuccaucauguguauuauaaaggaagaggugcuagcuuacgucgugcaacugccucucuacggcguuaucgacacuccaugcuggaaacugcauacaagcccccuuuguaccacgaauaccaaggaaggcucgaacauuugccugacaaggacugaucgggggugguauugugacaaugccggaucuguguccuuuuucccucaggcagagaccugcaaaguccagucaaaccgcguguuuugugauacaaugaauaguuugacucucccaagcgagguaaaccugugcaauguugacaucuucaaccccaaguacgauugcaagauaaugaccuccaaaacagacgugucuagcucagucauuaccaguuuaggugcuaucguguccuguuauggcaagacuaaaugcacggccagcaacaagaaucgagggaucauuaaaacauuuucuaacggaugugauuacgucucaaauaagggcguggacaccguuaguguggguaacacucuguauuacguaaauaagcaagaagggaaaagccuauaugucaagggagagccuaucauuaacuucuacgacccacucguguucccguccgaugaauuugacgcgucuauaucgcagguuaaugagaaaaucaaccagagccuggccuucauuagaaaguccgaugaacuuuugcacaaugugaacgcaggcaaaucaaccacaaauaucaugaucaccacuauuauaaucgucauuaucgugauucugcucagucugaucgcuguaggccuucuguuguacugcaaggccaggucuacacccgugacgcucagcaaggaccagcuguccgggauaaacaauaucgcuuuuucaaacugaggacuagugaagggaacacccaaauuuaauucagccuuaagcacaauuaauuaagagugaaacguaauuguacaagcaguuggucacccaccauagggcaugaucaacaccgcaaccuuuccuuuuucccccagugauucugaaaaaccccucuucccuucagcuugcuuagauguuccaaauuuaguaagcuuaaggcggccuacagaagaaaaagaaaaaaaaggccacaaaaguucccucucacuuucaguaaauaaaauaaaagcagcaacagaaauaaagaaauaaaugaaauucaaaaugaaauaaauauuguguugugcagcauuaaaaaaucaauaaaaauuaaaaaugagcaagaucuaaaaaaaaaaaaaaaaaaaaaaaaaaaaaaaaaaaaaaaaaaaaaaaaaaaaaaaaaaaaaaaaugcaucccccccccccccccccccccccccccccccaaaggcucuuuucagagccaccagaauu

SEQ ID NO: 1047 - RNA, 2394 nt, Artificial Sequence
  mRNA product Design d-3 comprising derived and/or modified sequence from HRSV(A2)__F0_DSCav1 (opt4)
gggagagggcgcuuggcuugcaaggacccugagcugcggcauugaagcacacccaacccaacucgacugaagucagccucacugaaccggaucugagaaucuucucucucugggcuugccagggcucuccgaaccuagcuagcauccucuucaauuccaacuagaaagcuuaccauggagcugcugauccugaaggccaacgccaucaccaccauccugaccgccgugaccuucugcuucgccagcggccagaacaucaccgaggaguucuaccagagcaccugcagcgccgugagcaagggcuaccugagcgcccugagaaccggcugguacaccagcgugaucaccaucgagcugagcaacaucaaggagaacaagugcaacggcaccgacgccaaggugaagcugaucaagcaggagcuggacaaguacaagaacgccgugaccgagcugcagcugcugaugcagagcacccccgccaccaacaacagagccagaagagagcugcccagauucaugaacuacacccugaacaacgccaagaagaccaacgugacccugagcaagaagagaaagagaagauuccugggcuuccugcugggcgugggcagcgccaucgccagcggcguggccgugugcaaggugcugcaccuggagggcgaggugaacaagaucaagagcgcccugcugagcaccaacaaggccguggugagccugagcaacggcgugagcgugcugaccuucaaggugcuggaccugaagaacuacaucgacaagcagcugcugcccauccugaacaagcagagcugcagcaucagcaacaucgagaccgugaucgaguuccagcagaagaacaacagacugcuggagaucaccagagaguucagcgugaacgccggcgugaccacccccgugagcaccuacaugcugaccaacagcgagcugcugagccugaucaacgacaugcccaucaccaacgaccagaagaagcugaugagcaacaacgugcagaucgugagacagcagagcuacagcaucaugugcaucaucaaggaggaggugcuggccuacguggugcagcugccccuguacggcgugaucgacacccccugcuggaagcugcacaccagcccccugugcaccaccaacaccaaggagggcagcaacaucugccugaccagaaccgacagaggcugguacugcgacaacgccggcagcgugagcuucuucccccaggccgagaccugcaaggugcagagcaacagaguguucugcgacaccaugaacagccugacccugcccagcgaggugaaccugugcaacguggacaucuucaaccccaaguacgacugcaagaucaugaccagcaagaccgacgugagcagcagcgugaucaccagccugggcgccaucgugagcugcuacggcaagaccaagugcaccgccagcaacaagaacagaggcaucaucaagaccuucagcaacggcugcgacuacgugagcaacaagggcguggacaccgugagcgugggcaacacccuguacuacgugaacaagcaggagggcaagagccuguacgugaagggcgagcccaucaucaacuucuacgacccccugguguuccccagcgacgaguucgacgccagcaucagccaggugaacgagaagaucaaccagagccuggccuucaucagaaagagcgacgagcugcugcacaacgugaacgccggcaagagcaccaccaacaucaugaucaccaccaucaucaucgugaucaucgugauccugcugagccugaucgccgugggccugcugcuguacugcaaggccagaagcacccccgugacccugagcaaggaccagcugagcggcaucaacaacaucgccuucagcaacugaggacuagugaagggaacacccaaauuuaauucagccuuaagcacaauuaauuaagagugaaacguaauuguacaagcaguuggucacccaccauagggcaugaucaacaccgcaaccuuuccuuuuucccccagugauucugaaaaaccccucuucccuucagcuugcuuagauguuccaaauuuaguaagcuuaaggcggccuacagaagaaaaagaaaaaaaaggccacaaaaguucccucucacuuucaguaaauaaaauaaaagcagcaacagaaauaaagaaauaaaugaaauucaaaaugaaauaaauauuguguugugcagcauuaaaaaaucaauaaaaauuaaaaaugagcaagaucuaaaaaaaaaaaaaaaaaaaaaaaaaaaaaaaaaaaaaaaaaaaaaaaaaaaaaaaaaaaaaaaaugcaucccccccccccccccccccccccccccccccaaaggcucuuuucagagccaccagaauu

SEQ ID NO: 1048 - RNA, 2394 nt, Artificial Sequence
  mRNA product Design d-3 comprising derived and/or modified sequence from HRSV(A2)__F0_DSCav1 (opt5)
gggagagggcgcuuggcuugcaaggacccugagcugcggcauugaagcacacccaacccaacucgacugaagucagccucacugaaccggaucugagaaucuucucucucugggcuugccagggcucuccgaaccuagcuagcauccucuucaauuccaacuagaaagcuuaccauggagcugcucauccugaaggccaacgcuauuaccacaauccuuacggccgugaccuucugcuuugcgagcggccagaauauuacagaagaguucuaccaauccaccuguucugcugucagcaaaggguaucuguccgcccucagaacaggaugguacaccucuguuaucacaauugaacugagcaacaucaaggagaauaaaugcaacggcaccgacgccaaggugaaacuuaucaagcaggaacuggauaaguauaaaaaugcugugacggagcuccagcugcugaugcaguccacccccgccacaaacaaucgggcucgcagagagcucccucgguuuaugaacuacacccugaauaacgccaagaaaacaaaugucacccuuucuaagaaacgcaagagacgguuccugggguuucuccugggagugggcagcgcgauugccuccgggguugcuguguguaagguccuucaccuggaaggagaggugaacaaaaucaagagcgcccuccugucuacgaauaaagcuguugugucccugagcaacggcgucucugugcucacauucaaggugcuggaccuuaaaaauuauauugauaagcaacugcucccgauccugaacaaacaguccugcagcauuucuaacaucgaaaccgucauugaguuucagcagaagaauaaccgccuucuggagaucacaagagaauuuuccguuaaugccggcgugaccacccccgugagcacauacaugcucacgaacuccgagcugcugucucucaucaaugacaugccuauuaccaacgaucaaaagaaacugaugagcaauaacguccagaucgugcggcagcaguccuauagcauuauguguaucauuaaggaagagguucuugcguacgugguccaacugccccucuacggggugaucgacacaccuugcuggaaacugcauaccucuccccuuuguacaaccaauacgaaggaaggauccaacaucugccugacacgcaccgauagaggcugguauugugacaaugccgggagcguuucuuucuucccucaggcugagaccugcaaagugcagagcaaccgggucuuuugugauacaaugaacucccucacccugccgucugaggugaaucugugcaaugucgacauuuucaaccccaaguacgauugcaagaucaugacaagcaaaacggacguguccagcucuguuauuaccucccucggagccaucgugagcuguuauggcaagacaaaaugcaccgcuucuaacaagaaucgcgggauuaucaaaacauuuuccaacggaugugauuacgucagcaauaagggcguggacaccguuuccgugggcaacacgcuguauuacgucaauaagcaagaagggaaaucucuuuaugugaagggagagccuaucauuaacuucuacgacccccugguguucccuagcgaugaauuugacgccuccaucucucagguuaaugagaaaauuaaccagagccucgccuucaucagaaaguccgaugaacugcugcacaaugucaacgcuggcaaaagcaccacaaauauuaugaucaccacaauuaucaucgugauuaucgugauucuucucucucugaucgcggucgggcugcuccuguacugcaaggcccgguccacccccgugacgcuuagcaaggaccagcugucuggaauuaacaauaucgcuuuuuccaacugaggacuagugaagggaacacccaaauuuaauucagccuuaagcacaauuaauuaagagugaaacguaauuguacaagcaguuggucacccaccauagggcaugaucaacaccgcaaccuuuccuuuuucccccagugauucugaaaaaccccucuucccuucagcuugcuuagauguuccaaauuuaguaagcuuaaggcggccuacagaagaaaaagaaaaaaaaggccacaaaaguucccucucacuuucaguaaauaaaauaaaagcagcaacagaaauaaagaaauaaaugaaauucaaaaugaaauaaauauuguguugugcagcauuaaaaaaucaauaaaaauuaaaaaugagcaagaucuaaaaaaaaaaaaaaaaaaaaaaaaaaaaaaaaaaaaaaaaaaaaaaaaaaaaaaaaaaaaaaaaugcaucccccccccccccccccccccccccccccccaaaggcucuuuucagagccaccagaauu

SEQ ID NO: 1049 - RNA, 2394 nt, Artificial Sequence
  mRNA product Design d-3 comprising derived and/or modified sequence from HRSV(A2)__F0_DSCav1 (opt6)
gggagagggcgcuuggcuugcaaggacccugagcugcggcauugaagcacacccaacccaacucgacugaagucagccucacugaaccggaucugagaaucuucucucucugggcuugccagggcucuccgaaccuagcuagcauccucuucaauuccaacuagaaagcuuaccauggaauuauuaauccucaaagcgaacgcuauuacuaccauucuaacagcagucacauucugcuucgccucaggccaaaacauuacagaagaauuuuaccaaucaacaugcucugccguaucaaaaggcuaccuauccgcccuacgaacaggcugguacacaagcguaauaacaaucgaacuaucaaacauaaaagaaaacaaaugcaacgguacagacgccaaaguuaaacuaauaaaacaagaacucgauaaauacaaaaacgcaguaacagaauuacaacuacuaaugcaaucaacaccugcaacaaacaauagagccaggagagaauuaccucgauucaugaauuacacacucaauaacgcaaaaaaaaccaacguuacacuaucaaaaaaaagaaaacgacgauucuuaggauuccuacucggagucggaucagcaauagcaucuggcguugcaguaugcaaaguauuacacuuagaaggugaagucaauaaaauaaaaagcgcgcuacuaaguacaaacaaagcagucgucucccuaucaaacggagucucaguccuaacauucaaaguacucgaccuaaaaaauuacauagauaaacaacuacuuccaauauuaaacaaacaauccuguagcaucagcaauauagaaacaguaauagaauuucaacaaaaaaacaaccgauuauuagaaaucacucgagaauuuuccguaaacgccgggguaacaacuccagucucaaccuacaugcuaaccaauucagaacuauugagcuuaauaaacgacaugccaauaaccaacgaccaaaaaaaacuaaugucuaacaauguucaaaucgucagacaacaaaguuacaguauaauguguauaaucaaagaagaaguccuagcauacguaguccaacucccacuauauggaguuaucgacacaccauguuggaaauuacacaccucaccauuaugcacaaccaauacaaaagaaggaucaaacauaugccuuacacggacagaccgcggaugguauugugacaacgcuggcucagucuccuuuuucccacaagcagaaacaugcaaaguacaaucaaacagagucuuuugcgauaccaugaacucacuuacauuaccaagcgaaguaaaucuuuguaacgucgacaucuucaauccuaaauaugacugcaaaaucaugaccucaaaaacagacguuagcucuucaguaaucacuagcuuaggagcaaucguaucaugcuacggcaaaacaaaauguacagcaucaaauaaaaacagaggaaucauaaaaacauuuucaaacggaugcgauuauguaagcaacaaaggaguagauacuguaagcguaggaaacacauuguacuauguaaacaaacaagaaggaaaaucacucuauguaaaaggagaaccuauaaucaauuucuacgauccauuaguguucccaucagaugaauuugacgccucaauaucacaaguuaaugaaaaaauaaaucaaucgcuagcauucauacguaaaucagaugaauuacuacauaacguaaacgcaggcaaauccacaacaaauaucaugaucacaacaauuauaauaguaauaauaguaauacuacuaucacuaauagccguaggacuccuacuauacugcaaagcaagaucuacuccaguaacccucucaaaagaucaacuaagcggaauuaauaacaucgcauucagcaacuaaggacuagugaagggaacacccaaauuuaauucagccuuaagcacaauuaauuaagagugaaacguaauuguacaagcaguuggucacccaccauagggcaugaucaacaccgcaaccuuuccuuuuucccccagugauucugaaaaaccccucuucccuucagcuugcuuagauguuccaaauuuaguaagcuuaaggcggccuacagaagaaaaagaaaaaaaaggccacaaaaguucccucucacuuucaguaaauaaaauaaaagcagcaacagaaauaaagaaauaaaugaaauucaaaaugaaauaaauauuguguugugcagcauuaaaaaaucaauaaaaauuaaaaaugagcaagaucuaaaaaaaaaaaaaaaaaaaaaaaaaaaaaaaaaaaaaaaaaaaaaaaaaaaaaaaaaaaaaaaaugcaucccccccccccccccccccccccccccccccaaaggcucuuuucagagccaccagaauu

SEQ ID NO: 1050 - RNA, 2394 nt, Artificial Sequence
  mRNA product Design d-3 comprising derived and/or modified sequence from HRSV(A2)__F0_DSCav1 (opt11)
gggagagggcgcuuggcuugcaaggacccugagcugcggcauugaagcacacccaacccaacucgacugaagucagccucacugaaccggaucugagaaucuucucucucugggcuugccagggcucuccgaaccuagcuagcauccucuucaauuccaacuagaaagcuuaccauggaacuacuuauccucaaagccaacgccaucaccaccauccucacagcaguaaccuuuugcuucgccucaggccaaaauaucacagaagaauuuuaccagaguaccugcuccgccguauccaaaggauaccucagcgcgcuccgcaccggcugguacacuucaguaaucacaaucgaacuauccaacaucaaagaaaacaaaugcaacggcaccgacgcgaaagucaaacucaucaaacaagaacuagacaaauacaaaaaugccguaacagaacuacaacuguuaaugcagagcacacccgccaccaacaaccgcgcccgccgggaacucccccgauucaugaacuacacacucaacaacgccaaaaagacgaacgucacccucagcaagaaacgaaaacgcagauuccucgguuuccuacuaggcguaggcucagcaauagccuccggaguagccgucugcaaaguccugcacuuagaaggcgaagucaacaaaaucaaauccgcccuacucuccacgaacaaagccgucgucucccuguccaacggugucuccguuuuaaccuucaaaguucuggaccucaaaaacuacauagacaaacagcuucuccccauccucaacaaacaauccuguagcaucuccaacaucgaaaccgucauagaauuucaacagaaaaacaacagacugcucgaaaucacccgcgaguucuccgucaacgccggcgucacgacucccgucuccaccuauaugcucacgaacucggaacuccuuucccuaaucaacgacaugccgaucaccaacgaccaaaagaaacucaugucaaacaacguacaaauuguccgccaacaaucauacuccaucaugugcauaauuaaagaagaaguccucgcauacguaguccaacucccccucuacggcgucaucgacacccccugcuggaaacuccacaccuccccacucugcacaaccaacaccaaagaaggcucaaacauaugccuaacgcgcaccgaucgcgguugguacugcgacaacgccgguuccgucagcuucuucccccaagcagagacaugcaaaguccaaucaaaccgcgucuucugcgacaccaugaacucacuaacccuuccaagcgaagucaaccucugcaacguugacaucuucaaccccaaauacgacuguaaaaucaugaccuccaagaccgacguauccucuuccgucaucacaucccuaggcgcuaucguauccugcuaugguaaaaccaaaugcaccgccuccaacaaaaaccgcggcaucaucaagacauuuuccaacggcugcgacuacgugagcaacaaaggcgucgacaccgucuccguaggcaacacccucuacuauguaaacaaacaagagggcaaaucacucuacgucaaaggggaacccaucaucaacuucuacgacccgcucguauuccccagcgaugaguucgacgccuccaucucccaggucaacgaaaagauaaaccaaucacucgcauucauucguaaauccgacgaacuccuacacaacgugaaugcaggcaaaucgaccacuaacaucaugaucaccaccaucaucaucgucaucauagucauccuccugucccuuaucgccgucggucuuuuauuauacugcaaagcccgcagcacccccgucacccucucuaaggaccaacucagcggcaucaauaacaucgcauucucuaacuaaggacuagugaagggaacacccaaauuuaauucagccuuaagcacaauuaauuaagagugaaacguaauuguacaagcaguuggucacccaccauagggcaugaucaacaccgcaaccuuuccuuuuucccccagugauucugaaaaaccccucuucccuucagcuugcuuagauguuccaaauuuaguaagcuuaaggcggccuacagaagaaaaagaaaaaaaaggccacaaaaguucccucucacuuucaguaaauaaaauaaaagcagcaacagaaauaaagaaauaaaugaaauucaaaaugaaauaaauauuguguugugcagcauuaaaaaaucaauaaaaauuaaaaaugagcaagaucuaaaaaaaaaaaaaaaaaaaaaaaaaaaaaaaaaaaaaaaaaaaaaaaaaaaaaaaaaaaaaaaaugcaucccccccccccccccccccccccccccccccaaaggcucuuuucagagccaccagaauu

SEQ ID NO: 1051 - RNA, 2077 nt, Artificial Sequence
  mRNA product Design d-4 comprising derived and/or modified sequence from HRSV(A2)__F0_DSCav1 (opt1)
gggagagucccgcagucggcguccagcggcucugcuuguucgugugugugucguugcaggccuuauucaagcuuaccauggagcugcucauccugaaggccaacgccaucaccaccauccugacggcggugaccuucugcuucgccagcggccagaacaucaccgaggaguucuaccaguccacgugcagcgccgucuccaagggguaccucagcgcccugcggaccggcugguacaccuccgugaucaccaucgagcugagcaacaucaaggagaacaagugcaacgggaccgacgccaaggugaagcucaucaagcaggagcuggacaaguacaagaacgcggucacggagcugcagcuccugaugcaguccaccccggcaaccaacaaccgcgcccggcgcgagcugccccgguucaugaacuacacccucaacaacgccaagaagacgaacgugacccugagcaagaagcgcaagcggcgcuuccugggcuuccuccugggggugggcuccgccaucgcgagcggcgucgccgugugcaaggugcugcaccucgagggggaggucaacaagaucaagagcgcccugcuguccaccaacaaggccguggugagccucuccaacggcgucagcgugcugaccuucaaggugcuggaccucaagaacuacaucgacaagcagcugcugcccauccugaacaagcagagcugcuccaucagcaacaucgagacggugaucgaguuccagcagaagaacaaccggcuccuggagaucacccgcgaguucagcgugaacgccggggucaccacccccguguccacguacaugcugaccaacagcgagcuccugucccugaucaacgacaugccgaucaccaacgaccagaagaagcucaugagcaacaacgugcagaucguccggcagcaguccuacagcaucaugugcaucaucaaggaggaggugcuggcguacgugguccagcugccccucuacggcgugaucgacacccccugcuggaagcugcacacgagcccccugugcaccaccaacaccaaggagggguccaacaucugccucacgcgcaccgaccggggcugguacugcgacaacgccggcagcgucuccuucuucccgcaggccgagaccugcaaggugcagagcaaccgcguguucugcgacaccaugaacucccugacgcugcccagcgagguaaaccucugcaacgucgacaucuucaaccccaaguacgacugcaagaucaugaccuccaagaccgacgugagcuccagcgugaucaccucccugggggccaucgucagcugcuacggcaagacgaagugcaccgccagcaacaagaaccgggggaucaucaagaccuucuccaacggcugcgacuacgugagcaacaagggcguggacaccguguccgucgggaacacccuguacuacgugaacaagcaggagggcaagagccucuacgugaagggggagcccaucaucaacuucuacgacccgcuggucuuccccuccgacgaguucgacgcgagcaucucccaggugaacgagaagaucaaccagagccuggccuucauccgcaaguccgacgagcugcuccacaacgugaacgccggcaagagcacgaccaacaucaugaucaccaccaucaucaucgucaucaucgugauccugcugucccucaucgccguggggcugcugcucuacugcaaggcccggagcacgcccgucacccuguccaaggaccagcugagcggcaucaacaacaucgcguucuccaacugaggacuaguggaagcauuuuccuggcugauuaaaagaaauuacucagcuauggucaucuguuccuguuagaaggcuaugcagcauauuauauacuaugcgcauguuaugaaaugcauaauaaaaaauuuuaaaaaaucuaaaagaucuaaaaaaaaaaaaaaaaaaaaaaaaaaaaaaaaaaaaaaaaaaaaaaaaaaaaaaaaaaaaaaaaugcaucccccccccccccccccccccccccccccccaaaggcucuuuucagagccaccagaauu

SEQ ID NO: 1052 - RNA, 2077 nt, Artificial Sequence
  mRNA product Design d-4 comprising derived and/or modified sequence from HRSV(A2)__F0_DSCav1 (opt1)
gggagagucccgcagucggcguccagcggcucugcuuguucgugugugugucguugcaggccuuauucaagcuuaccauggagcugcucauccugaaggccaacgccaucaccaccauccugacggcggugaccuucugcuucgccagcggccagaacaucaccgaggaguucuaccaguccacgugcagcgccgucuccaagggguaccucagcgcccugcgcaccggcugguacaccuccgugaucaccaucgagcugagcaacaucaaggagaacaagugcaacgggaccgacgccaaggugaagcucaucaagcaggagcuggacaaguacaagaacgcggucacggagcugcagcuccugaugcaguccacccccgccaccaacaaccgggcccgccgggagcugccgcgcuucaugaacuacacccucaacaacgccaagaagacgaacgugacccugagcaagaagcggaagcgccgguuccugggcuuccuccugggggugggcuccgcgaucgccagcggcgucgccgugugcaaggugcugcaccucgagggggaggucaacaagaucaaguccgcccugcugagcaccaacaaggccguggugucccucagcaacggcgucuccgugcugaccuucaaggugcuggaccucaagaacuacaucgacaagcagcugcugcccauccucaacaagcagagcugcuccaucagcaacaucgagacggucaucgaguuccagcagaagaacaaccgccugcuggagaucacccgggaguucuccgugaacgcgggggugaccacccccgucagcacguacaugcucaccaacagcgagcugcugucccucaucaacgacaugcccaucaccaacgaccagaagaagcugaugagcaacaacgugcagaucgugcgccagcaguccuacagcaucaugugcaucaucaaggaggagguccuggccuacguggugcagcucccgcuguacggcgucaucgacacccccugcuggaagcugcacacgagcccccucugcaccaccaacaccaaggaggggagcaacaucugccugacgcggaccgaccgcggcugguacugcgacaacgccggcuccgugagcuucuucccccaggccgagaccugcaagguccaguccaaccggguguucugcgacaccaugaacagccugacgcucccguccgaggugaaccugugcaacgucgacaucuucaaccccaaguacgacugcaagaucaugaccagcaagaccgacguguccagcuccgugaucaccagccugggggccaucgucuccugcuacggcaagacgaagugcaccgcgagcaacaagaaccgcgggaucaucaagaccuucuccaacggcugcgacuacgugagcaacaagggcguggacaccgucagcguggggaacacccucuacuacgugaacaagcaggagggcaagucccuguacgucaagggggagcccaucaucaacuucuacgacccccugguguucccgagcgacgaguucgacgccuccaucagccaggugaacgagaagaucaaccagucccucgccuucauccggaaguccgacgagcugcugcacaacgucaacgccggcaaguccacgaccaacaucaugaucaccaccaucaucaucgugaucaucgugauccugcucagccugaucgccgucgggcugcuccuguacugcaaggcgcgcuccacgcccgugacccugagcaaggaccagcucuccggcaucaacaacaucgccuucagcaacugaggacuaguggaagcauuuuccuggcugauuaaaagaaauuacucagcuauggucaucuguuccuguuagaaggcuaugcagcauauuauauacuaugcgcauguuaugaaaugcauaauaaaaaauuuuaaaaaaucuaaaagaucuaaaaaaaaaaaaaaaaaaaaaaaaaaaaaaaaaaaaaaaaaaaaaaaaaaaaaaaaaaaaaaaaugcaucccccccccccccccccccccccccccccccaaaggcucuuuucagagccaccagaauu

SEQ ID NO: 1053 - RNA, 2077 nt, Artificial Sequence
  mRNA product Design d-4 comprising derived and/or modified sequence from HRSV(A2)__F0_DSCav1 (opt2)
gggagagucccgcagucggcguccagcggcucugcuuguucgugugugugucguugcaggccuuauucaagcuuaccauggagcuccucauccucaaggccaacgccaucaccaccauccucaccgccgucaccuucugcuucgccuccggccagaacaucaccgaggaguucuaccaguccaccugcuccgccgucuccaagggcuaccucuccgcccuccgcaccggcugguacaccuccgucaucaccaucgagcucuccaacaucaaggagaacaagugcaacggcaccgacgccaaggucaagcucaucaagcaggagcucgacaaguacaagaacgccgucaccgagcuccagcuccucaugcaguccacccccgccaccaacaaccgcgcccgccgcgagcucccccgcuucaugaacuacacccucaacaacgccaagaagaccaacgucacccucuccaagaagcgcaagcgccgcuuccucggcuuccuccucggcgucggcuccgccaucgccuccggcgucgccgucugcaagguccuccaccucgagggcgaggucaacaagaucaaguccgcccuccucuccaccaacaaggccgucgucucccucuccaacggcgucuccguccucaccuucaagguccucgaccucaagaacuacaucgacaagcagcuccuccccauccucaacaagcaguccugcuccaucuccaacaucgagaccgucaucgaguuccagcagaagaacaaccgccuccucgagaucacccgcgaguucuccgucaacgccggcgucaccacccccgucuccaccuacaugcucaccaacuccgagcuccucucccucaucaacgacaugcccaucaccaacgaccagaagaagcucauguccaacaacguccagaucguccgccagcaguccuacuccaucaugugcaucaucaaggaggagguccucgccuacgucguccagcucccccucuacggcgucaucgacacccccugcuggaagcuccacaccuccccccucugcaccaccaacaccaaggagggcuccaacaucugccucacccgcaccgaccgcggcugguacugcgacaacgccggcuccgucuccuucuucccccaggccgagaccugcaagguccaguccaaccgcgucuucugcgacaccaugaacucccucacccuccccuccgaggucaaccucugcaacgucgacaucuucaaccccaaguacgacugcaagaucaugaccuccaagaccgacgucuccuccuccgucaucaccucccucggcgccaucgucuccugcuacggcaagaccaagugcaccgccuccaacaagaaccgcggcaucaucaagaccuucuccaacggcugcgacuacgucuccaacaagggcgucgacaccgucuccgucggcaacacccucuacuacgucaacaagcaggagggcaagucccucuacgucaagggcgagcccaucaucaacuucuacgacccccucgucuuccccuccgacgaguucgacgccuccaucucccaggucaacgagaagaucaaccagucccucgccuucauccgcaaguccgacgagcuccuccacaacgucaacgccggcaaguccaccaccaacaucaugaucaccaccaucaucaucgucaucaucgucauccuccucucccucaucgccgucggccuccuccucuacugcaaggcccgcuccacccccgucacccucuccaaggaccagcucuccggcaucaacaacaucgccuucuccaacugaggacuaguggaagcauuuuccuggcugauuaaaagaaauuacucagcuauggucaucuguuccuguuagaaggcuaugcagcauauuauauacuaugcgcauguuaugaaaugcauaauaaaaaauuuuaaaaaaucuaaaagaucuaaaaaaaaaaaaaaaaaaaaaaaaaaaaaaaaaaaaaaaaaaaaaaaaaaaaaaaaaaaaaaaaugcaucccccccccccccccccccccccccccccccaaaggcucuuuucagagccaccagaauu

SEQ ID NO: 1054 - RNA, 2077 nt, Artificial Sequence
  mRNA product Design d-4 comprising derived and/or modified sequence from HRSV(A2)__F0_DSCav1 (opt3)
gggagagucccgcagucggcguccagcggcucugcuuguucgugugugugucguugcaggccuuauucaagcuuaccauggagcugcucauccuuaaggccaacgcuauuaccacaauacugacugcagugacguucugcuuugccagcggccagaauaucaccgaagaguucuaccaauccacauguucugcggucucaaaaggguauuugagugcuuuaagaacuggaugguacaccagcguuauuacaaucgaacuguccaacauuaaggagaauaaaugcaacgguaccgacgccaaggugaaacuaaucaagcaggaacucgauaaguauaaaaaugcaguaacugagcugcagcuucugaugcagucuacacccgccaccaacaauagggcucggcgcgaguugccucgauuuaugaacuacacgcucaauaacgcaaagaaaacuaaugugacccugucgaagaaacguaagagaagguuccugggcuuucucuuaggggucggaucagccauagcuagcggcguggccguuuguaaggugcugcaccuugaaggugaggucaacaaaaucaagagugcguugcuguccacaaauaaagcagugguaucucuaagcaacgggguuuccgugcucacuuucaagguccuggaccuuaaaaauuauauugauaagcaacuguugccaauccucaacaaacagucaugcaguauuagcaacaucgaaaccgugauagaguuucagcagaagaauaaccggcuguuagagauuacacgcgaguucucugugaaugccggagucaccacgccgguuuccacuuacaugcugacaaacucagaacuccuuagccugaucaaugacaugcccauuaccaacgaucaaaagaaauugaugaguaauaacgugcagaucguaagacagcagucuuauuccaucauguguauuauaaaggaagaggugcuagcuuacgucgugcaacugccucucuacggcguuaucgacacuccaugcuggaaacugcauacaagcccccuuuguaccacgaauaccaaggaaggcucgaacauuugccugacaaggacugaucgggggugguauugugacaaugccggaucuguguccuuuuucccucaggcagagaccugcaaaguccagucaaaccgcguguuuugugauacaaugaauaguuugacucucccaagcgagguaaaccugugcaauguugacaucuucaaccccaaguacgauugcaagauaaugaccuccaaaacagacgugucuagcucagucauuaccaguuuaggugcuaucguguccuguuauggcaagacuaaaugcacggccagcaacaagaaucgagggaucauuaaaacauuuucuaacggaugugauuacgucucaaauaagggcguggacaccguuaguguggguaacacucuguauuacguaaauaagcaagaagggaaaagccuauaugucaagggagagccuaucauuaacuucuacgacccacucguguucccguccgaugaauuugacgcgucuauaucgcagguuaaugagaaaaucaaccagagccuggccuucauuagaaaguccgaugaacuuuugcacaaugugaacgcaggcaaaucaaccacaaauaucaugaucaccacuauuauaaucgucauuaucgugauucugcucagucugaucgcuguaggccuucuguuguacugcaaggccaggucuacacccgugacgcucagcaaggaccagcuguccgggauaaacaauaucgcuuuuucaaacugaggacuaguggaagcauuuuccuggcugauuaaaagaaauuacucagcuauggucaucuguuccuguuagaaggcuaugcagcauauuauauacuaugcgcauguuaugaaaugcauaauaaaaaauuuuaaaaaaucuaaaagaucuaaaaaaaaaaaaaaaaaaaaaaaaaaaaaaaaaaaaaaaaaaaaaaaaaaaaaaaaaaaaaaaaugcaucccccccccccccccccccccccccccccccaaaggcucuuuucagagccaccagaauu

SEQ ID NO: 1055 - RNA, 2077 nt, Artificial Sequence
  mRNA product Design d-4 comprising derived and/or modified sequence from HRSV(A2)__F0_DSCav1 (opt4)
gggagagucccgcagucggcguccagcggcucugcuuguucgugugugugucguugcaggccuuauucaagcuuaccauggagcugcugauccugaaggccaacgccaucaccaccauccugaccgccgugaccuucugcuucgccagcggccagaacaucaccgaggaguucuaccagagcaccugcagcgccgugagcaagggcuaccugagcgcccugagaaccggcugguacaccagcgugaucaccaucgagcugagcaacaucaaggagaacaagugcaacggcaccgacgccaaggugaagcugaucaagcaggagcuggacaaguacaagaacgccgugaccgagcugcagcugcugaugcagagcacccccgccaccaacaacagagccagaagagagcugcccagauucaugaacuacacccugaacaacgccaagaagaccaacgugacccugagcaagaagagaaagagaagauuccugggcuuccugcugggcgugggcagcgccaucgccagcggcguggccgugugcaaggugcugcaccuggagggcgaggugaacaagaucaagagcgcccugcugagcaccaacaaggccguggugagccugagcaacggcgugagcgugcugaccuucaaggugcuggaccugaagaacuacaucgacaagcagcugcugcccauccugaacaagcagagcugcagcaucagcaacaucgagaccgugaucgaguuccagcagaagaacaacagacugcuggagaucaccagagaguucagcgugaacgccggcgugaccacccccgugagcaccuacaugcugaccaacagcgagcugcugagccugaucaacgacaugcccaucaccaacgaccagaagaagcugaugagcaacaacgugcagaucgugagacagcagagcuacagcaucaugugcaucaucaaggaggaggugcuggccuacguggugcagcugccccuguacggcgugaucgacacccccugcuggaagcugcacaccagcccccugugcaccaccaacaccaaggagggcagcaacaucugccugaccagaaccgacagaggcugguacugcgacaacgccggcagcgugagcuucuucccccaggccgagaccugcaaggugcagagcaacagaguguucugcgacaccaugaacagccugacccugcccagcgaggugaaccugugcaacguggacaucuucaaccccaaguacgacugcaagaucaugaccagcaagaccgacgugagcagcagcgugaucaccagccugggcgccaucgugagcugcuacggcaagaccaagugcaccgccagcaacaagaacagaggcaucaucaagaccuucagcaacggcugcgacuacgugagcaacaagggcguggacaccgugagcgugggcaacacccuguacuacgugaacaagcaggagggcaagagccuguacgugaagggcgagcccaucaucaacuucuacgacccccugguguuccccagcgacgaguucgacgccagcaucagccaggugaacgagaagaucaaccagagccuggccuucaucagaaagagcgacgagcugcugcacaacgugaacgccggcaagagcaccaccaacaucaugaucaccaccaucaucaucgugaucaucgugauccugcugagccugaucgccgugggccugcugcuguacugcaaggccagaagcacccccgugacccugagcaaggaccagcugagcggcaucaacaacaucgccuucagcaacugaggacuaguggaagcauuuuccuggcugauuaaaagaaauuacucagcuauggucaucuguuccuguuagaaggcuaugcagcauauuauauacuaugcgcauguuaugaaaugcauaauaaaaaauuuuaaaaaaucuaaaagaucuaaaaaaaaaaaaaaaaaaaaaaaaaaaaaaaaaaaaaaaaaaaaaaaaaaaaaaaaaaaaaaaaugcaucccccccccccccccccccccccccccccccaaaggcucuuuucagagccaccagaauu

SEQ ID NO: 1056 - RNA, 2077 nt, Artificial Sequence
  mRNA product Design d-4 comprising derived and/or modified sequence from HRSV(A2)__F0_DSCav1 (opt5)
gggagagucccgcagucggcguccagcggcucugcuuguucgugugugugucguugcaggccuuauucaagcuuaccauggagcugcucauccugaaggccaacgcuauuaccacaauccuuacggccgugaccuucugcuuugcgagcggccagaauauuacagaagaguucuaccaauccaccuguucugcugucagcaaaggguaucuguccgcccucagaacaggaugguacaccucuguuaucacaauugaacugagcaacaucaaggagaauaaaugcaacggcaccgacgccaaggugaaacuuaucaagcaggaacuggauaaguauaaaaaugcugugacggagcuccagcugcugaugcaguccacccccgccacaaacaaucgggcucgcagagagcucccucgguuuaugaacuacacccugaauaacgccaagaaaacaaaugucacccuuucuaagaaacgcaagagacgguuccugggguuucuccugggagugggcagcgcgauugccuccgggguugcuguguguaagguccuucaccuggaaggagaggugaacaaaaucaagagcgcccuccugucuacgaauaaagcuguugugucccugagcaacggcgucucugugcucacauucaaggugcuggaccuuaaaaauuauauugauaagcaacugcucccgauccugaacaaacaguccugcagcauuucuaacaucgaaaccgucauugaguuucagcagaagaauaaccgccuucuggagaucacaagagaauuuuccguuaaugccggcgugaccacccccgugagcacauacaugcucacgaacuccgagcugcugucucucaucaaugacaugccuauuaccaacgaucaaaagaaacugaugagcaauaacguccagaucgugcggcagcaguccuauagcauuauguguaucauuaaggaagagguucuugcguacgugguccaacugccccucuacggggugaucgacacaccuugcuggaaacugcauaccucuccccuuuguacaaccaauacgaaggaaggauccaacaucugccugacacgcaccgauagaggcugguauugugacaaugccgggagcguuucuuucuucccucaggcugagaccugcaaagugcagagcaaccgggucuuuugugauacaaugaacucccucacccugccgucugaggugaaucugugcaaugucgacauuuucaaccccaaguacgauugcaagaucaugacaagcaaaacggacguguccagcucuguuauuaccucccucggagccaucgugagcuguuauggcaagacaaaaugcaccgcuucuaacaagaaucgcgggauuaucaaaacauuuuccaacggaugugauuacgucagcaauaagggcguggacaccguuuccgugggcaacacgcuguauuacgucaauaagcaagaagggaaaucucuuuaugugaagggagagccuaucauuaacuucuacgacccccugguguucccuagcgaugaauuugacgccuccaucucucagguuaaugagaaaauuaaccagagccucgccuucaucagaaaguccgaugaacugcugcacaaugucaacgcuggcaaaagcaccacaaauauuaugaucaccacaauuaucaucgugauuaucgugauucuucucucucugaucgcggucgggcugcuccuguacugcaaggcccgguccacccccgugacgcuuagcaaggaccagcugucuggaauuaacaauaucgcuuuuuccaacugaggacuaguggaagcauuuuccuggcugauuaaaagaaauuacucagcuauggucaucuguuccuguuagaaggcuaugcagcauauuauauacuaugcgcauguuaugaaaugcauaauaaaaaauuuuaaaaaaucuaaaagaucuaaaaaaaaaaaaaaaaaaaaaaaaaaaaaaaaaaaaaaaaaaaaaaaaaaaaaaaaaaaaaaaaugcaucccccccccccccccccccccccccccccccaaaggcucuuuucagagccaccagaauu

SEQ ID NO: 1057 - RNA, 2077 nt, Artificial Sequence
  mRNA product Design d-4 comprising derived and/or modified sequence from HRSV(A2)__F0_DSCav1 (opt6)
gggagagucccgcagucggcguccagcggcucugcuuguucgugugugugucguugcaggccuuauucaagcuuaccauggaauuauuaauccucaaagcgaacgcuauuacuaccauucuaacagcagucacauucugcuucgccucaggccaaaacauuacagaagaauuuuaccaaucaacaugcucugccguaucaaaaggcuaccuauccgcccuacgaacaggcugguacacaagcguaauaacaaucgaacuaucaaacauaaaagaaaacaaaugcaacgguacagacgccaaaguuaaacuaauaaaacaagaacucgauaaauacaaaaacgcaguaacagaauuacaacuacuaaugcaaucaacaccugcaacaaacaauagagccaggagagaauuaccucgauucaugaauuacacacucaauaacgcaaaaaaaaccaacguuacacuaucaaaaaaaagaaaacgacgauucuuaggauuccuacucggagucggaucagcaauagcaucuggcguugcaguaugcaaaguauuacacuuagaaggugaagucaauaaaauaaaaagcgcgcuacuaaguacaaacaaagcagucgucucccuaucaaacggagucucaguccuaacauucaaaguacucgaccuaaaaaauuacauagauaaacaacuacuuccaauauuaaacaaacaauccuguagcaucagcaauauagaaacaguaauagaauuucaacaaaaaaacaaccgauuauuagaaaucacucgagaauuuuccguaaacgccgggguaacaacuccagucucaaccuacaugcuaaccaauucagaacuauugagcuuaauaaacgacaugccaauaaccaacgaccaaaaaaaacuaaugucuaacaauguucaaaucgucagacaacaaaguuacaguauaauguguauaaucaaagaagaaguccuagcauacguaguccaacucccacuauauggaguuaucgacacaccauguuggaaauuacacaccucaccauuaugcacaaccaauacaaaagaaggaucaaacauaugccuuacacggacagaccgcggaugguauugugacaacgcuggcucagucuccuuuuucccacaagcagaaacaugcaaaguacaaucaaacagagucuuuugcgauaccaugaacucacuuacauuaccaagcgaaguaaaucuuuguaacgucgacaucuucaauccuaaauaugacugcaaaaucaugaccucaaaaacagacguuagcucuucaguaaucacuagcuuaggagcaaucguaucaugcuacggcaaaacaaaauguacagcaucaaauaaaaacagaggaaucauaaaaacauuuucaaacggaugcgauuauguaagcaacaaaggaguagauacuguaagcguaggaaacacauuguacuauguaaacaaacaagaaggaaaaucacucuauguaaaaggagaaccuauaaucaauuucuacgauccauuaguguucccaucagaugaauuugacgccucaauaucacaaguuaaugaaaaaauaaaucaaucgcuagcauucauacguaaaucagaugaauuacuacauaacguaaacgcaggcaaauccacaacaaauaucaugaucacaacaauuauaauaguaauaauaguaauacuacuaucacuaauagccguaggacuccuacuauacugcaaagcaagaucuacuccaguaacccucucaaaagaucaacuaagcggaauuaauaacaucgcauucagcaacuaaggacuaguggaagcauuuuccuggcugauuaaaagaaauuacucagcuauggucaucuguuccuguuagaaggcuaugcagcauauuauauacuaugcgcauguuaugaaaugcauaauaaaaaauuuuaaaaaaucuaaaagaucuaaaaaaaaaaaaaaaaaaaaaaaaaaaaaaaaaaaaaaaaaaaaaaaaaaaaaaaaaaaaaaaaugcaucccccccccccccccccccccccccccccccaaaggcucuuuucagagccaccagaauu

SEQ ID NO: 1058 - RNA, 2077 nt, Artificial Sequence
  mRNA product Design d-4 comprising derived and/or modified sequence from HRSV(A2)__F0_DSCav1 (opt11)
gggagagucccgcagucggcguccagcggcucugcuuguucgugugugugucguugcaggccuuauucaagcuuaccauggaacuacuuauccucaaagccaacgccaucaccaccauccucacagcaguaaccuuuugcuucgccucaggccaaaauaucacagaagaauuuuaccagaguaccugcuccgccguauccaaaggauaccucagcgcgcuccgcaccggcugguacacuucaguaaucacaaucgaacuauccaacaucaaagaaaacaaaugcaacggcaccgacgcgaaagucaaacucaucaaacaagaacuagacaaauacaaaaaugccguaacagaacuacaacuguuaaugcagagcacacccgccaccaacaaccgcgcccgccgggaacucccccgauucaugaacuacacacucaacaacgccaaaaagacgaacgucacccucagcaagaaacgaaaacgcagauuccucgguuuccuacuaggcguaggcucagcaauagccuccggaguagccgucugcaaaguccugcacuuagaaggcgaagucaacaaaaucaaauccgcccuacucuccacgaacaaagccgucgucucccuguccaacggugucuccguuuuaaccuucaaaguucuggaccucaaaaacuacauagacaaacagcuucuccccauccucaacaaacaauccuguagcaucuccaacaucgaaaccgucauagaauuucaacagaaaaacaacagacugcucgaaaucacccgcgaguucuccgucaacgccggcgucacgacucccgucuccaccuauaugcucacgaacucggaacuccuuucccuaaucaacgacaugccgaucaccaacgaccaaaagaaacucaugucaaacaacguacaaauuguccgccaacaaucauacuccaucaugugcauaauuaaagaagaaguccucgcauacguaguccaacucccccucuacggcgucaucgacacccccugcuggaaacuccacaccuccccacucugcacaaccaacaccaaagaaggcucaaacauaugccuaacgcgcaccgaucgcgguugguacugcgacaacgccgguuccgucagcuucuucccccaagcagagacaugcaaaguccaaucaaaccgcgucuucugcgacaccaugaacucacuaacccuuccaagcgaagucaaccucugcaacguugacaucuucaaccccaaauacgacuguaaaaucaugaccuccaagaccgacguauccucuuccgucaucacaucccuaggcgcuaucguauccugcuaugguaaaaccaaaugcaccgccuccaacaaaaaccgcggcaucaucaagacauuuuccaacggcugcgacuacgugagcaacaaaggcgucgacaccgucuccguaggcaacacccucuacuauguaaacaaacaagagggcaaaucacucuacgucaaaggggaacccaucaucaacuucuacgacccgcucguauuccccagcgaugaguucgacgccuccaucucccaggucaacgaaaagauaaaccaaucacucgcauucauucguaaauccgacgaacuccuacacaacgugaaugcaggcaaaucgaccacuaacaucaugaucaccaccaucaucaucgucaucauagucauccuccugucccuuaucgccgucggucuuuuauuauacugcaaagcccgcagcacccccgucacccucucuaaggaccaacucagcggcaucaauaacaucgcauucucuaacuaaggacuaguggaagcauuuuccuggcugauuaaaagaaauuacucagcuauggucaucuguuccuguuagaaggcuaugcagcauauuauauacuaugcgcauguuaugaaaugcauaauaaaaaauuuuaaaaaaucuaaaagaucuaaaaaaaaaaaaaaaaaaaaaaaaaaaaaaaaaaaaaaaaaaaaaaaaaaaaaaaaaaaaaaaaugcaucccccccccccccccccccccccccccccccaaaggcucuuuucagagccaccagaauu

SEQ ID NO: 1059 - RNA, 2174 nt, Artificial Sequence
  mRNA product Design d-5 comprising derived and/or modified sequence from HRSV(A2)__F0_DSCav1 (opt1)
gggagagggcgcuuggcuugcaaggacccugagcugcggcauugaagcacacccaacccaacucgacugaagucagccucacugaaccggaucugagaaucuucucucucugggcuugccagggcucuccgaaccuagcuagcauccucuucaauuccaacuagaaagcuuaccauggagcugcucauccugaaggccaacgccaucaccaccauccugacggcggugaccuucugcuucgccagcggccagaacaucaccgaggaguucuaccaguccacgugcagcgccgucuccaagggguaccucagcgcccugcggaccggcugguacaccuccgugaucaccaucgagcugagcaacaucaaggagaacaagugcaacgggaccgacgccaaggugaagcucaucaagcaggagcuggacaaguacaagaacgcggucacggagcugcagcuccugaugcaguccaccccggcaaccaacaaccgcgcccggcgcgagcugccccgguucaugaacuacacccucaacaacgccaagaagacgaacgugacccugagcaagaagcgcaagcggcgcuuccugggcuuccuccugggggugggcuccgccaucgcgagcggcgucgccgugugcaaggugcugcaccucgagggggaggucaacaagaucaagagcgcccugcuguccaccaacaaggccguggugagccucuccaacggcgucagcgugcugaccuucaaggugcuggaccucaagaacuacaucgacaagcagcugcugcccauccugaacaagcagagcugcuccaucagcaacaucgagacggugaucgaguuccagcagaagaacaaccggcuccuggagaucacccgcgaguucagcgugaacgccggggucaccacccccguguccacguacaugcugaccaacagcgagcuccugucccugaucaacgacaugccgaucaccaacgaccagaagaagcucaugagcaacaacgugcagaucguccggcagcaguccuacagcaucaugugcaucaucaaggaggaggugcuggcguacgugguccagcugccccucuacggcgugaucgacacccccugcuggaagcugcacacgagcccccugugcaccaccaacaccaaggagggguccaacaucugccucacgcgcaccgaccggggcugguacugcgacaacgccggcagcgucuccuucuucccgcaggccgagaccugcaaggugcagagcaaccgcguguucugcgacaccaugaacucccugacgcugcccagcgagguaaaccucugcaacgucgacaucuucaaccccaaguacgacugcaagaucaugaccuccaagaccgacgugagcuccagcgugaucaccucccugggggccaucgucagcugcuacggcaagacgaagugcaccgccagcaacaagaaccgggggaucaucaagaccuucuccaacggcugcgacuacgugagcaacaagggcguggacaccguguccgucgggaacacccuguacuacgugaacaagcaggagggcaagagccucuacgugaagggggagcccaucaucaacuucuacgacccgcuggucuuccccuccgacgaguucgacgcgagcaucucccaggugaacgagaagaucaaccagagccuggccuucauccgcaaguccgacgagcugcuccacaacgugaacgccggcaagagcacgaccaacaucaugaucaccaccaucaucaucgucaucaucgugauccugcugucccucaucgccguggggcugcugcucuacugcaaggcccggagcacgcccgucacccuguccaaggaccagcugagcggcaucaacaacaucgcguucuccaacugaggacuaguggaagcauuuuccuggcugauuaaaagaaauuacucagcuauggucaucuguuccuguuagaaggcuaugcagcauauuauauacuaugcgcauguuaugaaaugcauaauaaaaaauuuuaaaaaaucuaaaagaucuaaaaaaaaaaaaaaaaaaaaaaaaaaaaaaaaaaaaaaaaaaaaaaaaaaaaaaaaaaaaaaaaugcaucccccccccccccccccccccccccccccccaaaggcucuuuucagagccaccagaauu

SEQ ID NO: 1060 - RNA, 2174 nt, Artificial Sequence
  mRNA product Design d-5 comprising derived and/or modified sequence from HRSV(A2)__F0_DSCav1 (opt1)
gggagagggcgcuuggcuugcaaggacccugagcugcggcauugaagcacacccaacccaacucgacugaagucagccucacugaaccggaucugagaaucuucucucucugggcuugccagggcucuccgaaccuagcuagcauccucuucaauuccaacuagaaagcuuaccauggagcugcucauccugaaggccaacgccaucaccaccauccugacggcggugaccuucugcuucgccagcggccagaacaucaccgaggaguucuaccaguccacgugcagcgccgucuccaagggguaccucagcgcccugcgcaccggcugguacaccuccgugaucaccaucgagcugagcaacaucaaggagaacaagugcaacgggaccgacgccaaggugaagcucaucaagcaggagcuggacaaguacaagaacgcggucacggagcugcagcuccugaugcaguccacccccgccaccaacaaccgggcccgccgggagcugccgcgcuucaugaacuacacccucaacaacgccaagaagacgaacgugacccugagcaagaagcggaagcgccgguuccugggcuuccuccugggggugggcuccgcgaucgccagcggcgucgccgugugcaaggugcugcaccucgagggggaggucaacaagaucaaguccgcccugcugagcaccaacaaggccguggugucccucagcaacggcgucuccgugcugaccuucaaggugcuggaccucaagaacuacaucgacaagcagcugcugcccauccucaacaagcagagcugcuccaucagcaacaucgagacggucaucgaguuccagcagaagaacaaccgccugcuggagaucacccgggaguucuccgugaacgcgggggugaccacccccgucagcacguacaugcucaccaacagcgagcugcugucccucaucaacgacaugcccaucaccaacgaccagaagaagcugaugagcaacaacgugcagaucgugcgccagcaguccuacagcaucaugugcaucaucaaggaggagguccuggccuacguggugcagcucccgcuguacggcgucaucgacacccccugcuggaagcugcacacgagcccccucugcaccaccaacaccaaggaggggagcaacaucugccugacgcggaccgaccgcggcugguacugcgacaacgccggcuccgugagcuucuucccccaggccgagaccugcaagguccaguccaaccggguguucugcgacaccaugaacagccugacgcucccguccgaggugaaccugugcaacgucgacaucuucaaccccaaguacgacugcaagaucaugaccagcaagaccgacguguccagcuccgugaucaccagccugggggccaucgucuccugcuacggcaagacgaagugcaccgcgagcaacaagaaccgcgggaucaucaagaccuucuccaacggcugcgacuacgugagcaacaagggcguggacaccgucagcguggggaacacccucuacuacgugaacaagcaggagggcaagucccuguacgucaagggggagcccaucaucaacuucuacgacccccugguguucccgagcgacgaguucgacgccuccaucagccaggugaacgagaagaucaaccagucccucgccuucauccggaaguccgacgagcugcugcacaacgucaacgccggcaaguccacgaccaacaucaugaucaccaccaucaucaucgugaucaucgugauccugcucagccugaucgccgucgggcugcuccuguacugcaaggcgcgcuccacgcccgugacccugagcaaggaccagcucuccggcaucaacaacaucgccuucagcaacugaggacuaguggaagcauuuuccuggcugauuaaaagaaauuacucagcuauggucaucuguuccuguuagaaggcuaugcagcauauuauauacuaugcgcauguuaugaaaugcauaauaaaaaauuuuaaaaaaucuaaaagaucuaaaaaaaaaaaaaaaaaaaaaaaaaaaaaaaaaaaaaaaaaaaaaaaaaaaaaaaaaaaaaaaaugcaucccccccccccccccccccccccccccccccaaaggcucuuuucagagccaccagaauu

SEQ ID NO: 1061 - RNA, 2174 nt, Artificial Sequence
  mRNA product Design d-5 comprising derived and/or modified sequence from HRSV(A2)__F0_DSCav1 (opt2)
gggagagggcgcuuggcuugcaaggacccugagcugcggcauugaagcacacccaacccaacucgacugaagucagccucacugaaccggaucugagaaucuucucucucugggcuugccagggcucuccgaaccuagcuagcauccucuucaauuccaacuagaaagcuuaccauggagcuccucauccucaaggccaacgccaucaccaccauccucaccgccgucaccuucugcuucgccuccggccagaacaucaccgaggaguucuaccaguccaccugcuccgccgucuccaagggcuaccucuccgcccuccgcaccggcugguacaccuccgucaucaccaucgagcucuccaacaucaaggagaacaagugcaacggcaccgacgccaaggucaagcucaucaagcaggagcucgacaaguacaagaacgccgucaccgagcuccagcuccucaugcaguccacccccgccaccaacaaccgcgcccgccgcgagcucccccgcuucaugaacuacacccucaacaacgccaagaagaccaacgucacccucuccaagaagcgcaagcgccgcuuccucggcuuccuccucggcgucggcuccgccaucgccuccggcgucgccgucugcaagguccuccaccucgagggcgaggucaacaagaucaaguccgcccuccucuccaccaacaaggccgucgucucccucuccaacggcgucuccguccucaccuucaagguccucgaccucaagaacuacaucgacaagcagcuccuccccauccucaacaagcaguccugcuccaucuccaacaucgagaccgucaucgaguuccagcagaagaacaaccgccuccucgagaucacccgcgaguucuccgucaacgccggcgucaccacccccgucuccaccuacaugcucaccaacuccgagcuccucucccucaucaacgacaugcccaucaccaacgaccagaagaagcucauguccaacaacguccagaucguccgccagcaguccuacuccaucaugugcaucaucaaggaggagguccucgccuacgucguccagcucccccucuacggcgucaucgacacccccugcuggaagcuccacaccuccccccucugcaccaccaacaccaaggagggcuccaacaucugccucacccgcaccgaccgcggcugguacugcgacaacgccggcuccgucuccuucuucccccaggccgagaccugcaagguccaguccaaccgcgucuucugcgacaccaugaacucccucacccuccccuccgaggucaaccucugcaacgucgacaucuucaaccccaaguacgacugcaagaucaugaccuccaagaccgacgucuccuccuccgucaucaccucccucggcgccaucgucuccugcuacggcaagaccaagugcaccgccuccaacaagaaccgcggcaucaucaagaccuucuccaacggcugcgacuacgucuccaacaagggcgucgacaccgucuccgucggcaacacccucuacuacgucaacaagcaggagggcaagucccucuacgucaagggcgagcccaucaucaacuucuacgacccccucgucuuccccuccgacgaguucgacgccuccaucucccaggucaacgagaagaucaaccagucccucgccuucauccgcaaguccgacgagcuccuccacaacgucaacgccggcaaguccaccaccaacaucaugaucaccaccaucaucaucgucaucaucgucauccuccucucccucaucgccgucggccuccuccucuacugcaaggcccgcuccacccccgucacccucuccaaggaccagcucuccggcaucaacaacaucgccuucuccaacugaggacuaguggaagcauuuuccuggcugauuaaaagaaauuacucagcuauggucaucuguuccuguuagaaggcuaugcagcauauuauauacuaugcgcauguuaugaaaugcauaauaaaaaauuuuaaaaaaucuaaaagaucuaaaaaaaaaaaaaaaaaaaaaaaaaaaaaaaaaaaaaaaaaaaaaaaaaaaaaaaaaaaaaaaaugcaucccccccccccccccccccccccccccccccaaaggcucuuuucagagccaccagaauu

SEQ ID NO: 1062 - RNA, 2174 nt, Artificial Sequence
  mRNA product Design d-5 comprising derived and/or modified sequence from HRSV(A2)__F0_DSCav1 (opt3)
gggagagggcgcuuggcuugcaaggacccugagcugcggcauugaagcacacccaacccaacucgacugaagucagccucacugaaccggaucugagaaucuucucucucugggcuugccagggcucuccgaaccuagcuagcauccucuucaauuccaacuagaaagcuuaccauggagcugcucauccuuaaggccaacgcuauuaccacaauacugacugcagugacguucugcuuugccagcggccagaauaucaccgaagaguucuaccaauccacauguucugcggucucaaaaggguauuugagugcuuuaagaacuggaugguacaccagcguuauuacaaucgaacuguccaacauuaaggagaauaaaugcaacgguaccgacgccaaggugaaacuaaucaagcaggaacucgauaaguauaaaaaugcaguaacugagcugcagcuucugaugcagucuacacccgccaccaacaauagggcucggcgcgaguugccucgauuuaugaacuacacgcucaauaacgcaaagaaaacuaaugugacccugucgaagaaacguaagagaagguuccugggcuuucucuuaggggucggaucagccauagcuagcggcguggccguuuguaaggugcugcaccuugaaggugaggucaacaaaaucaagagugcguugcuguccacaaauaaagcagugguaucucuaagcaacgggguuuccgugcucacuuucaagguccuggaccuuaaaaauuauauugauaagcaacuguugccaauccucaacaaacagucaugcaguauuagcaacaucgaaaccgugauagaguuucagcagaagaauaaccggcuguuagagauuacacgcgaguucucugugaaugccggagucaccacgccgguuuccacuuacaugcugacaaacucagaacuccuuagccugaucaaugacaugcccauuaccaacgaucaaaagaaauugaugaguaauaacgugcagaucguaagacagcagucuuauuccaucauguguauuauaaaggaagaggugcuagcuuacgucgugcaacugccucucuacggcguuaucgacacuccaugcuggaaacugcauacaagcccccuuuguaccacgaauaccaaggaaggcucgaacauuugccugacaaggacugaucgggggugguauugugacaaugccggaucuguguccuuuuucccucaggcagagaccugcaaaguccagucaaaccgcguguuuugugauacaaugaauaguuugacucucccaagcgagguaaaccugugcaauguugacaucuucaaccccaaguacgauugcaagauaaugaccuccaaaacagacgugucuagcucagucauuaccaguuuaggugcuaucguguccuguuauggcaagacuaaaugcacggccagcaacaagaaucgagggaucauuaaaacauuuucuaacggaugugauuacgucucaaauaagggcguggacaccguuaguguggguaacacucuguauuacguaaauaagcaagaagggaaaagccuauaugucaagggagagccuaucauuaacuucuacgacccacucguguucccguccgaugaauuugacgcgucuauaucgcagguuaaugagaaaaucaaccagagccuggccuucauuagaaaguccgaugaacuuuugcacaaugugaacgcaggcaaaucaaccacaaauaucaugaucaccacuauuauaaucgucauuaucgugauucugcucagucugaucgcuguaggccuucuguuguacugcaaggccaggucuacacccgugacgcucagcaaggaccagcuguccgggauaaacaauaucgcuuuuucaaacugaggacuaguggaagcauuuuccuggcugauuaaaagaaauuacucagcuauggucaucuguuccuguuagaaggcuaugcagcauauuauauacuaugcgcauguuaugaaaugcauaauaaaaaauuuuaaaaaaucuaaaagaucuaaaaaaaaaaaaaaaaaaaaaaaaaaaaaaaaaaaaaaaaaaaaaaaaaaaaaaaaaaaaaaaaugcaucccccccccccccccccccccccccccccccaaaggcucuuuucagagccaccagaauu

SEQ ID NO: 1063 - RNA, 2174 nt, Artificial Sequence
  mRNA product Design d-5 comprising derived and/or modified sequence from HRSV(A2)__F0_DSCav1 (opt4)
gggagagggcgcuuggcuugcaaggacccugagcugcggcauugaagcacacccaacccaacucgacugaagucagccucacugaaccggaucugagaaucuucucucucugggcuugccagggcucuccgaaccuagcuagcauccucuucaauuccaacuagaaagcuuaccauggagcugcugauccugaaggccaacgccaucaccaccauccugaccgccgugaccuucugcuucgccagcggccagaacaucaccgaggaguucuaccagagcaccugcagcgccgugagcaagggcuaccugagcgcccugagaaccggcugguacaccagcgugaucaccaucgagcugagcaacaucaaggagaacaagugcaacggcaccgacgccaaggugaagcugaucaagcaggagcuggacaaguacaagaacgccgugaccgagcugcagcugcugaugcagagcacccccgccaccaacaacagagccagaagagagcugcccagauucaugaacuacacccugaacaacgccaagaagaccaacgugacccugagcaagaagagaaagagaagauuccugggcuuccugcugggcgugggcagcgccaucgccagcggcguggccgugugcaaggugcugcaccuggagggcgaggugaacaagaucaagagcgcccugcugagcaccaacaaggccguggugagccugagcaacggcgugagcgugcugaccuucaaggugcuggaccugaagaacuacaucgacaagcagcugcugcccauccugaacaagcagagcugcagcaucagcaacaucgagaccgugaucgaguuccagcagaagaacaacagacugcuggagaucaccagagaguucagcgugaacgccggcgugaccacccccgugagcaccuacaugcugaccaacagcgagcugcugagccugaucaacgacaugcccaucaccaacgaccagaagaagcugaugagcaacaacgugcagaucgugagacagcagagcuacagcaucaugugcaucaucaaggaggaggugcuggccuacguggugcagcugccccuguacggcgugaucgacacccccugcuggaagcugcacaccagcccccugugcaccaccaacaccaaggagggcagcaacaucugccugaccagaaccgacagaggcugguacugcgacaacgccggcagcgugagcuucuucccccaggccgagaccugcaaggugcagagcaacagaguguucugcgacaccaugaacagccugacccugcccagcgaggugaaccugugcaacguggacaucuucaaccccaaguacgacugcaagaucaugaccagcaagaccgacgugagcagcagcgugaucaccagccugggcgccaucgugagcugcuacggcaagaccaagugcaccgccagcaacaagaacagaggcaucaucaagaccuucagcaacggcugcgacuacgugagcaacaagggcguggacaccgugagcgugggcaacacccuguacuacgugaacaagcaggagggcaagagccuguacgugaagggcgagcccaucaucaacuucuacgacccccugguguuccccagcgacgaguucgacgccagcaucagccaggugaacgagaagaucaaccagagccuggccuucaucagaaagagcgacgagcugcugcacaacgugaacgccggcaagagcaccaccaacaucaugaucaccaccaucaucaucgugaucaucgugauccugcugagccugaucgccgugggccugcugcuguacugcaaggccagaagcacccccgugacccugagcaaggaccagcugagcggcaucaacaacaucgccuucagcaacugaggacuaguggaagcauuuuccuggcugauuaaaagaaauuacucagcuauggucaucuguuccuguuagaaggcuaugcagcauauuauauacuaugcgcauguuaugaaaugcauaauaaaaaauuuuaaaaaaucuaaaagaucuaaaaaaaaaaaaaaaaaaaaaaaaaaaaaaaaaaaaaaaaaaaaaaaaaaaaaaaaaaaaaaaaugcaucccccccccccccccccccccccccccccccaaaggcucuuuucagagccaccagaauu

SEQ ID NO: 1064 - RNA, 2174 nt, Artificial Sequence
  mRNA product Design d-5 comprising derived and/or modified sequence from HRSV(A2)__F0_DSCav1 (opt5)
gggagagggcgcuuggcuugcaaggacccugagcugcggcauugaagcacacccaacccaacucgacugaagucagccucacugaaccggaucugagaaucuucucucucugggcuugccagggcucuccgaaccuagcuagcauccucuucaauuccaacuagaaagcuuaccauggagcugcucauccugaaggccaacgcuauuaccacaauccuuacggccgugaccuucugcuuugcgagcggccagaauauuacagaagaguucuaccaauccaccuguucugcugucagcaaaggguaucuguccgcccucagaacaggaugguacaccucuguuaucacaauugaacugagcaacaucaaggagaauaaaugcaacggcaccgacgccaaggugaaacuuaucaagcaggaacuggauaaguauaaaaaugcugugacggagcuccagcugcugaugcaguccacccccgccacaaacaaucgggcucgcagagagcucccucgguuuaugaacuacacccugaauaacgccaagaaaacaaaugucacccuuucuaagaaacgcaagagacgguuccugggguuucuccugggagugggcagcgcgauugccuccgggguugcuguguguaagguccuucaccuggaaggagaggugaacaaaaucaagagcgcccuccugucuacgaauaaagcuguugugucccugagcaacggcgucucugugcucacauucaaggugcuggaccuuaaaaauuauauugauaagcaacugcucccgauccugaacaaacaguccugcagcauuucuaacaucgaaaccgucauugaguuucagcagaagaauaaccgccuucuggagaucacaagagaauuuuccguuaaugccggcgugaccacccccgugagcacauacaugcucacgaacuccgagcugcugucucucaucaaugacaugccuauuaccaacgaucaaaagaaacugaugagcaauaacguccagaucgugcggcagcaguccuauagcauuauguguaucauuaaggaagagguucuugcguacgugguccaacugccccucuacggggugaucgacacaccuugcuggaaacugcauaccucuccccuuuguacaaccaauacgaaggaaggauccaacaucugccugacacgcaccgauagaggcugguauugugacaaugccgggagcguuucuuucuucccucaggcugagaccugcaaagugcagagcaaccgggucuuuugugauacaaugaacucccucacccugccgucugaggugaaucugugcaaugucgacauuuucaaccccaaguacgauugcaagaucaugacaagcaaaacggacguguccagcucuguuauuaccucccucggagccaucgugagcuguuauggcaagacaaaaugcaccgcuucuaacaagaaucgcgggauuaucaaaacauuuuccaacggaugugauuacgucagcaauaagggcguggacaccguuuccgugggcaacacgcuguauuacgucaauaagcaagaagggaaaucucuuuaugugaagggagagccuaucauuaacuucuacgacccccugguguucccuagcgaugaauuugacgccuccaucucucagguuaaugagaaaauuaaccagagccucgccuucaucagaaaguccgaugaacugcugcacaaugucaacgcuggcaaaagcaccacaaauauuaugaucaccacaauuaucaucgugauuaucgugauucuucucucucugaucgcggucgggcugcuccuguacugcaaggcccgguccacccccgugacgcuuagcaaggaccagcugucuggaauuaacaauaucgcuuuuuccaacugaggacuaguggaagcauuuuccuggcugauuaaaagaaauuacucagcuauggucaucuguuccuguuagaaggcuaugcagcauauuauauacuaugcgcauguuaugaaaugcauaauaaaaaauuuuaaaaaaucuaaaagaucuaaaaaaaaaaaaaaaaaaaaaaaaaaaaaaaaaaaaaaaaaaaaaaaaaaaaaaaaaaaaaaaaugcaucccccccccccccccccccccccccccccccaaaggcucuuuucagagccaccagaauu

SEQ ID NO: 1065 - RNA, 2174 nt, Artificial Sequence
  mRNA product Design d-5 comprising derived and/or modified sequence from HRSV(A2)__F0_DSCav1 (opt6)
gggagagggcgcuuggcuugcaaggacccugagcugcggcauugaagcacacccaacccaacucgacugaagucagccucacugaaccggaucugagaaucuucucucucugggcuugccagggcucuccgaaccuagcuagcauccucuucaauuccaacuagaaagcuuaccauggaauuauuaauccucaaagcgaacgcuauuacuaccauucuaacagcagucacauucugcuucgccucaggccaaaacauuacagaagaauuuuaccaaucaacaugcucugccguaucaaaaggcuaccuauccgcccuacgaacaggcugguacacaagcguaauaacaaucgaacuaucaaacauaaaagaaaacaaaugcaacgguacagacgccaaaguuaaacuaauaaaacaagaacucgauaaauacaaaaacgcaguaacagaauuacaacuacuaaugcaaucaacaccugcaacaaacaauagagccaggagagaauuaccucgauucaugaauuacacacucaauaacgcaaaaaaaaccaacguuacacuaucaaaaaaaagaaaacgacgauucuuaggauuccuacucggagucggaucagcaauagcaucuggcguugcaguaugcaaaguauuacacuuagaaggugaagucaauaaaauaaaaagcgcgcuacuaaguacaaacaaagcagucgucucccuaucaaacggagucucaguccuaacauucaaaguacucgaccuaaaaaauuacauagauaaacaacuacuuccaauauuaaacaaacaauccuguagcaucagcaauauagaaacaguaauagaauuucaacaaaaaaacaaccgauuauuagaaaucacucgagaauuuuccguaaacgccgggguaacaacuccagucucaaccuacaugcuaaccaauucagaacuauugagcuuaauaaacgacaugccaauaaccaacgaccaaaaaaaacuaaugucuaacaauguucaaaucgucagacaacaaaguuacaguauaauguguauaaucaaagaagaaguccuagcauacguaguccaacucccacuauauggaguuaucgacacaccauguuggaaauuacacaccucaccauuaugcacaaccaauacaaaagaaggaucaaacauaugccuuacacggacagaccgcggaugguauugugacaacgcuggcucagucuccuuuuucccacaagcagaaacaugcaaaguacaaucaaacagagucuuuugcgauaccaugaacucacuuacauuaccaagcgaaguaaaucuuuguaacgucgacaucuucaauccuaaauaugacugcaaaaucaugaccucaaaaacagacguuagcucuucaguaaucacuagcuuaggagcaaucguaucaugcuacggcaaaacaaaauguacagcaucaaauaaaaacagaggaaucauaaaaacauuuucaaacggaugcgauuauguaagcaacaaaggaguagauacuguaagcguaggaaacacauuguacuauguaaacaaacaagaaggaaaaucacucuauguaaaaggagaaccuauaaucaauuucuacgauccauuaguguucccaucagaugaauuugacgccucaauaucacaaguuaaugaaaaaauaaaucaaucgcuagcauucauacguaaaucagaugaauuacuacauaacguaaacgcaggcaaauccacaacaaauaucaugaucacaacaauuauaauaguaauaauaguaauacuacuaucacuaauagccguaggacuccuacuauacugcaaagcaagaucuacuccaguaacccucucaaaagaucaacuaagcggaauuaauaacaucgcauucagcaacuaaggacuaguggaagcauuuuccuggcugauuaaaagaaauuacucagcuauggucaucuguuccuguuagaaggcuaugcagcauauuauauacuaugcgcauguuaugaaaugcauaauaaaaaauuuuaaaaaaucuaaaagaucuaaaaaaaaaaaaaaaaaaaaaaaaaaaaaaaaaaaaaaaaaaaaaaaaaaaaaaaaaaaaaaaaugcaucccccccccccccccccccccccccccccccaaaggcucuuuucagagccaccagaauu

SEQ ID NO: 1066 - RNA, 2174 nt, Artificial Sequence
  mRNA product Design d-5 comprising derived and/or modified sequence from HRSV(A2)__F0_DSCav1 (opt11)
gggagagggcgcuuggcuugcaaggacccugagcugcggcauugaagcacacccaacccaacucgacugaagucagccucacugaaccggaucugagaaucuucucucucugggcuugccagggcucuccgaaccuagcuagcauccucuucaauuccaacuagaaagcuuaccauggaacuacuuauccucaaagccaacgccaucaccaccauccucacagcaguaaccuuuugcuucgccucaggccaaaauaucacagaagaauuuuaccagaguaccugcuccgccguauccaaaggauaccucagcgcgcuccgcaccggcugguacacuucaguaaucacaaucgaacuauccaacaucaaagaaaacaaaugcaacggcaccgacgcgaaagucaaacucaucaaacaagaacuagacaaauacaaaaaugccguaacagaacuacaacuguuaaugcagagcacacccgccaccaacaaccgcgcccgccgggaacucccccgauucaugaacuacacacucaacaacgccaaaaagacgaacgucacccucagcaagaaacgaaaacgcagauuccucgguuuccuacuaggcguaggcucagcaauagccuccggaguagccgucugcaaaguccugcacuuagaaggcgaagucaacaaaaucaaauccgcccuacucuccacgaacaaagccgucgucucccuguccaacggugucuccguuuuaaccuucaaaguucuggaccucaaaaacuacauagacaaacagcuucuccccauccucaacaaacaauccuguagcaucuccaacaucgaaaccgucauagaauuucaacagaaaaacaacagacugcucgaaaucacccgcgaguucuccgucaacgccggcgucacgacucccgucuccaccuauaugcucacgaacucggaacuccuuucccuaaucaacgacaugccgaucaccaacgaccaaaagaaacucaugucaaacaacguacaaauuguccgccaacaaucauacuccaucaugugcauaauuaaagaagaaguccucgcauacguaguccaacucccccucuacggcgucaucgacacccccugcuggaaacuccacaccuccccacucugcacaaccaacaccaaagaaggcucaaacauaugccuaacgcgcaccgaucgcgguugguacugcgacaacgccgguuccgucagcuucuucccccaagcagagacaugcaaaguccaaucaaaccgcgucuucugcgacaccaugaacucacuaacccuuccaagcgaagucaaccucugcaacguugacaucuucaaccccaaauacgacuguaaaaucaugaccuccaagaccgacguauccucuuccgucaucacaucccuaggcgcuaucguauccugcuaugguaaaaccaaaugcaccgccuccaacaaaaaccgcggcaucaucaagacauuuuccaacggcugcgacuacgugagcaacaaaggcgucgacaccgucuccguaggcaacacccucuacuauguaaacaaacaagagggcaaaucacucuacgucaaaggggaacccaucaucaacuucuacgacccgcucguauuccccagcgaugaguucgacgccuccaucucccaggucaacgaaaagauaaaccaaucacucgcauucauucguaaauccgacgaacuccuacacaacgugaaugcaggcaaaucgaccacuaacaucaugaucaccaccaucaucaucgucaucauagucauccuccugucccuuaucgccgucggucuuuuauuauacugcaaagcccgcagcacccccgucacccucucuaaggaccaacucagcggcaucaauaacaucgcauucucuaacuaaggacuaguggaagcauuuuccuggcugauuaaaagaaauuacucagcuauggucaucuguuccuguuagaaggcuaugcagcauauuauauacuaugcgcauguuaugaaaugcauaauaaaaaauuuuaaaaaaucuaaaagaucuaaaaaaaaaaaaaaaaaaaaaaaaaaaaaaaaaaaaaaaaaaaaaaaaaaaaaaaaaaaaaaaaugcaucccccccccccccccccccccccccccccccaaaggcucuuuucagagccaccagaauu

SEQ ID NO: 1067 - RNA, 2054 nt, Artificial Sequence
  mRNA product Design e-1 comprising derived and/or modified sequence from HRSV(A2)__F0_DSCav1 (opt1)
gggagaauauaagcguuggcggagcgucgguuguagcacucugcgcgcccgcucuucugcugcuguuugucuacuuccuccugcuuccccgccgccgccgccgccaucaagcuuaccauggagcugcucauccugaaggccaacgccaucaccaccauccugacggcggugaccuucugcuucgccagcggccagaacaucaccgaggaguucuaccaguccacgugcagcgccgucuccaagggguaccucagcgcccugcggaccggcugguacaccuccgugaucaccaucgagcugagcaacaucaaggagaacaagugcaacgggaccgacgccaaggugaagcucaucaagcaggagcuggacaaguacaagaacgcggucacggagcugcagcuccugaugcaguccaccccggcaaccaacaaccgcgcccggcgcgagcugccccgguucaugaacuacacccucaacaacgccaagaagacgaacgugacccugagcaagaagcgcaagcggcgcuuccugggcuuccuccugggggugggcuccgccaucgcgagcggcgucgccgugugcaaggugcugcaccucgagggggaggucaacaagaucaagagcgcccugcuguccaccaacaaggccguggugagccucuccaacggcgucagcgugcugaccuucaaggugcuggaccucaagaacuacaucgacaagcagcugcugcccauccugaacaagcagagcugcuccaucagcaacaucgagacggugaucgaguuccagcagaagaacaaccggcuccuggagaucacccgcgaguucagcgugaacgccggggucaccacccccguguccacguacaugcugaccaacagcgagcuccugucccugaucaacgacaugccgaucaccaacgaccagaagaagcucaugagcaacaacgugcagaucguccggcagcaguccuacagcaucaugugcaucaucaaggaggaggugcuggcguacgugguccagcugccccucuacggcgugaucgacacccccugcuggaagcugcacacgagcccccugugcaccaccaacaccaaggagggguccaacaucugccucacgcgcaccgaccggggcugguacugcgacaacgccggcagcgucuccuucuucccgcaggccgagaccugcaaggugcagagcaaccgcguguucugcgacaccaugaacucccugacgcugcccagcgagguaaaccucugcaacgucgacaucuucaaccccaaguacgacugcaagaucaugaccuccaagaccgacgugagcuccagcgugaucaccucccugggggccaucgucagcugcuacggcaagacgaagugcaccgccagcaacaagaaccgggggaucaucaagaccuucuccaacggcugcgacuacgugagcaacaagggcguggacaccguguccgucgggaacacccuguacuacgugaacaagcaggagggcaagagccucuacgugaagggggagcccaucaucaacuucuacgacccgcuggucuuccccuccgacgaguucgacgcgagcaucucccaggugaacgagaagaucaaccagagccuggccuucauccgcaaguccgacgagcugcuccacaacgugaacgccggcaagagcacgaccaacaucaugaucaccaccaucaucaucgucaucaucgugauccugcugucccucaucgccguggggcugcugcucuacugcaaggcccggagcacgcccgucacccuguccaaggaccagcugagcggcaucaacaacaucgcguucuccaacugaggacuaguguccaccugucccuccugggcugcuggauugucucguuuuccugccaaauaaacaggaucagcgcuuuacagaucuaaaaaaaaaaaaaaaaaaaaaaaaaaaaaaaaaaaaaaaaaaaaaaaaaaaaaaaaaaaaaaaaugcaucccccccccccccccccccccccccccccccaaaggcucuuuucagagccaccagaauu

SEQ ID NO: 1068 - RNA, 2054 nt, Artificial Sequence
  mRNA product Design e-1 comprising derived and/or modified sequence from HRSV(A2)__F0_DSCav1 (opt1)
gggagaauauaagcguuggcggagcgucgguuguagcacucugcgcgcccgcucuucugcugcuguuugucuacuuccuccugcuuccccgccgccgccgccgccaucaagcuuaccauggagcugcucauccugaaggccaacgccaucaccaccauccugacggcggugaccuucugcuucgccagcggccagaacaucaccgaggaguucuaccaguccacgugcagcgccgucuccaagggguaccucagcgcccugcgcaccggcugguacaccuccgugaucaccaucgagcugagcaacaucaaggagaacaagugcaacgggaccgacgccaaggugaagcucaucaagcaggagcuggacaaguacaagaacgcggucacggagcugcagcuccugaugcaguccacccccgccaccaacaaccgggcccgccgggagcugccgcgcuucaugaacuacacccucaacaacgccaagaagacgaacgugacccugagcaagaagcggaagcgccgguuccugggcuuccuccugggggugggcuccgcgaucgccagcggcgucgccgugugcaaggugcugcaccucgagggggaggucaacaagaucaaguccgcccugcugagcaccaacaaggccguggugucccucagcaacggcgucuccgugcugaccuucaaggugcuggaccucaagaacuacaucgacaagcagcugcugcccauccucaacaagcagagcugcuccaucagcaacaucgagacggucaucgaguuccagcagaagaacaaccgccugcuggagaucacccgggaguucuccgugaacgcgggggugaccacccccgucagcacguacaugcucaccaacagcgagcugcugucccucaucaacgacaugcccaucaccaacgaccagaagaagcugaugagcaacaacgugcagaucgugcgccagcaguccuacagcaucaugugcaucaucaaggaggagguccuggccuacguggugcagcucccgcuguacggcgucaucgacacccccugcuggaagcugcacacgagcccccucugcaccaccaacaccaaggaggggagcaacaucugccugacgcggaccgaccgcggcugguacugcgacaacgccggcuccgugagcuucuucccccaggccgagaccugcaagguccaguccaaccggguguucugcgacaccaugaacagccugacgcucccguccgaggugaaccugugcaacgucgacaucuucaaccccaaguacgacugcaagaucaugaccagcaagaccgacguguccagcuccgugaucaccagccugggggccaucgucuccugcuacggcaagacgaagugcaccgcgagcaacaagaaccgcgggaucaucaagaccuucuccaacggcugcgacuacgugagcaacaagggcguggacaccgucagcguggggaacacccucuacuacgugaacaagcaggagggcaagucccuguacgucaagggggagcccaucaucaacuucuacgacccccugguguucccgagcgacgaguucgacgccuccaucagccaggugaacgagaagaucaaccagucccucgccuucauccggaaguccgacgagcugcugcacaacgucaacgccggcaaguccacgaccaacaucaugaucaccaccaucaucaucgugaucaucgugauccugcucagccugaucgccgucgggcugcuccuguacugcaaggcgcgcuccacgcccgugacccugagcaaggaccagcucuccggcaucaacaacaucgccuucagcaacugaggacuaguguccaccugucccuccugggcugcuggauugucucguuuuccugccaaauaaacaggaucagcgcuuuacagaucuaaaaaaaaaaaaaaaaaaaaaaaaaaaaaaaaaaaaaaaaaaaaaaaaaaaaaaaaaaaaaaaaugcaucccccccccccccccccccccccccccccccaaaggcucuuuucagagccaccagaauu

SEQ ID NO: 1069 - RNA, 2054 nt, Artificial Sequence
  mRNA product Design e-1 comprising derived and/or modified sequence from HRSV(A2)__F0_DSCav1 (opt2)
gggagaauauaagcguuggcggagcgucgguuguagcacucugcgcgcccgcucuucugcugcuguuugucuacuuccuccugcuuccccgccgccgccgccgccaucaagcuuaccauggagcuccucauccucaaggccaacgccaucaccaccauccucaccgccgucaccuucugcuucgccuccggccagaacaucaccgaggaguucuaccaguccaccugcuccgccgucuccaagggcuaccucuccgcccuccgcaccggcugguacaccuccgucaucaccaucgagcucuccaacaucaaggagaacaagugcaacggcaccgacgccaaggucaagcucaucaagcaggagcucgacaaguacaagaacgccgucaccgagcuccagcuccucaugcaguccacccccgccaccaacaaccgcgcccgccgcgagcucccccgcuucaugaacuacacccucaacaacgccaagaagaccaacgucacccucuccaagaagcgcaagcgccgcuuccucggcuuccuccucggcgucggcuccgccaucgccuccggcgucgccgucugcaagguccuccaccucgagggcgaggucaacaagaucaaguccgcccuccucuccaccaacaaggccgucgucucccucuccaacggcgucuccguccucaccuucaagguccucgaccucaagaacuacaucgacaagcagcuccuccccauccucaacaagcaguccugcuccaucuccaacaucgagaccgucaucgaguuccagcagaagaacaaccgccuccucgagaucacccgcgaguucuccgucaacgccggcgucaccacccccgucuccaccuacaugcucaccaacuccgagcuccucucccucaucaacgacaugcccaucaccaacgaccagaagaagcucauguccaacaacguccagaucguccgccagcaguccuacuccaucaugugcaucaucaaggaggagguccucgccuacgucguccagcucccccucuacggcgucaucgacacccccugcuggaagcuccacaccuccccccucugcaccaccaacaccaaggagggcuccaacaucugccucacccgcaccgaccgcggcugguacugcgacaacgccggcuccgucuccuucuucccccaggccgagaccugcaagguccaguccaaccgcgucuucugcgacaccaugaacucccucacccuccccuccgaggucaaccucugcaacgucgacaucuucaaccccaaguacgacugcaagaucaugaccuccaagaccgacgucuccuccuccgucaucaccucccucggcgccaucgucuccugcuacggcaagaccaagugcaccgccuccaacaagaaccgcggcaucaucaagaccuucuccaacggcugcgacuacgucuccaacaagggcgucgacaccgucuccgucggcaacacccucuacuacgucaacaagcaggagggcaagucccucuacgucaagggcgagcccaucaucaacuucuacgacccccucgucuuccccuccgacgaguucgacgccuccaucucccaggucaacgagaagaucaaccagucccucgccuucauccgcaaguccgacgagcuccuccacaacgucaacgccggcaaguccaccaccaacaucaugaucaccaccaucaucaucgucaucaucgucauccuccucucccucaucgccgucggccuccuccucuacugcaaggcccgcuccacccccgucacccucuccaaggaccagcucuccggcaucaacaacaucgccuucuccaacugaggacuaguguccaccugucccuccugggcugcuggauugucucguuuuccugccaaauaaacaggaucagcgcuuuacagaucuaaaaaaaaaaaaaaaaaaaaaaaaaaaaaaaaaaaaaaaaaaaaaaaaaaaaaaaaaaaaaaaaugcaucccccccccccccccccccccccccccccccaaaggcucuuuucagagccaccagaauu

SEQ ID NO: 1070 - RNA, 2054 nt, Artificial Sequence
  mRNA product Design e-1 comprising derived and/or modified sequence from HRSV(A2)__F0_DSCav1 (opt3)
gggagaauauaagcguuggcggagcgucgguuguagcacucugcgcgcccgcucuucugcugcuguuugucuacuuccuccugcuuccccgccgccgccgccgccaucaagcuuaccauggagcugcucauccuuaaggccaacgcuauuaccacaauacugacugcagugacguucugcuuugccagcggccagaauaucaccgaagaguucuaccaauccacauguucugcggucucaaaaggguauuugagugcuuuaagaacuggaugguacaccagcguuauuacaaucgaacuguccaacauuaaggagaauaaaugcaacgguaccgacgccaaggugaaacuaaucaagcaggaacucgauaaguauaaaaaugcaguaacugagcugcagcuucugaugcagucuacacccgccaccaacaauagggcucggcgcgaguugccucgauuuaugaacuacacgcucaauaacgcaaagaaaacuaaugugacccugucgaagaaacguaagagaagguuccugggcuuucucuuaggggucggaucagccauagcuagcggcguggccguuuguaaggugcugcaccuugaaggugaggucaacaaaaucaagagugcguugcuguccacaaauaaagcagugguaucucuaagcaacgggguuuccgugcucacuuucaagguccuggaccuuaaaaauuauauugauaagcaacuguugccaauccucaacaaacagucaugcaguauuagcaacaucgaaaccgugauagaguuucagcagaagaauaaccggcuguuagagauuacacgcgaguucucugugaaugccggagucaccacgccgguuuccacuuacaugcugacaaacucagaacuccuuagccugaucaaugacaugcccauuaccaacgaucaaaagaaauugaugaguaauaacgugcagaucguaagacagcagucuuauuccaucauguguauuauaaaggaagaggugcuagcuuacgucgugcaacugccucucuacggcguuaucgacacuccaugcuggaaacugcauacaagcccccuuuguaccacgaauaccaaggaaggcucgaacauuugccugacaaggacugaucgggggugguauugugacaaugccggaucuguguccuuuuucccucaggcagagaccugcaaaguccagucaaaccgcguguuuugugauacaaugaauaguuugacucucccaagcgagguaaaccugugcaauguugacaucuucaaccccaaguacgauugcaagauaaugaccuccaaaacagacgugucuagcucagucauuaccaguuuaggugcuaucguguccuguuauggcaagacuaaaugcacggccagcaacaagaaucgagggaucauuaaaacauuuucuaacggaugugauuacgucucaaauaagggcguggacaccguuaguguggguaacacucuguauuacguaaauaagcaagaagggaaaagccuauaugucaagggagagccuaucauuaacuucuacgacccacucguguucccguccgaugaauuugacgcgucuauaucgcagguuaaugagaaaaucaaccagagccuggccuucauuagaaaguccgaugaacuuuugcacaaugugaacgcaggcaaaucaaccacaaauaucaugaucaccacuauuauaaucgucauuaucgugauucugcucagucugaucgcuguaggccuucuguuguacugcaaggccaggucuacacccgugacgcucagcaaggaccagcuguccgggauaaacaauaucgcuuuuucaaacugaggacuaguguccaccugucccuccugggcugcuggauugucucguuuuccugccaaauaaacaggaucagcgcuuuacagaucuaaaaaaaaaaaaaaaaaaaaaaaaaaaaaaaaaaaaaaaaaaaaaaaaaaaaaaaaaaaaaaaaugcaucccccccccccccccccccccccccccccccaaaggcucuuuucagagccaccagaauu

SEQ ID NO: 1071 - RNA, 2054 nt, Artificial Sequence
  mRNA product Design e-1 comprising derived and/or modified sequence from HRSV(A2)__F0_DSCav1 (opt4)
gggagaauauaagcguuggcggagcgucgguuguagcacucugcgcgcccgcucuucugcugcuguuugucuacuuccuccugcuuccccgccgccgccgccgccaucaagcuuaccauggagcugcugauccugaaggccaacgccaucaccaccauccugaccgccgugaccuucugcuucgccagcggccagaacaucaccgaggaguucuaccagagcaccugcagcgccgugagcaagggcuaccugagcgcccugagaaccggcugguacaccagcgugaucaccaucgagcugagcaacaucaaggagaacaagugcaacggcaccgacgccaaggugaagcugaucaagcaggagcuggacaaguacaagaacgccgugaccgagcugcagcugcugaugcagagcacccccgccaccaacaacagagccagaagagagcugcccagauucaugaacuacacccugaacaacgccaagaagaccaacgugacccugagcaagaagagaaagagaagauuccugggcuuccugcugggcgugggcagcgccaucgccagcggcguggccgugugcaaggugcugcaccuggagggcgaggugaacaagaucaagagcgcccugcugagcaccaacaaggccguggugagccugagcaacggcgugagcgugcugaccuucaaggugcuggaccugaagaacuacaucgacaagcagcugcugcccauccugaacaagcagagcugcagcaucagcaacaucgagaccgugaucgaguuccagcagaagaacaacagacugcuggagaucaccagagaguucagcgugaacgccggcgugaccacccccgugagcaccuacaugcugaccaacagcgagcugcugagccugaucaacgacaugcccaucaccaacgaccagaagaagcugaugagcaacaacgugcagaucgugagacagcagagcuacagcaucaugugcaucaucaaggaggaggugcuggccuacguggugcagcugccccuguacggcgugaucgacacccccugcuggaagcugcacaccagcccccugugcaccaccaacaccaaggagggcagcaacaucugccugaccagaaccgacagaggcugguacugcgacaacgccggcagcgugagcuucuucccccaggccgagaccugcaaggugcagagcaacagaguguucugcgacaccaugaacagccugacccugcccagcgaggugaaccugugcaacguggacaucuucaaccccaaguacgacugcaagaucaugaccagcaagaccgacgugagcagcagcgugaucaccagccugggcgccaucgugagcugcuacggcaagaccaagugcaccgccagcaacaagaacagaggcaucaucaagaccuucagcaacggcugcgacuacgugagcaacaagggcguggacaccgugagcgugggcaacacccuguacuacgugaacaagcaggagggcaagagccuguacgugaagggcgagcccaucaucaacuucuacgacccccugguguuccccagcgacgaguucgacgccagcaucagccaggugaacgagaagaucaaccagagccuggccuucaucagaaagagcgacgagcugcugcacaacgugaacgccggcaagagcaccaccaacaucaugaucaccaccaucaucaucgugaucaucgugauccugcugagccugaucgccgugggccugcugcuguacugcaaggccagaagcacccccgugacccugagcaaggaccagcugagcggcaucaacaacaucgccuucagcaacugaggacuaguguccaccugucccuccugggcugcuggauugucucguuuuccugccaaauaaacaggaucagcgcuuuacagaucuaaaaaaaaaaaaaaaaaaaaaaaaaaaaaaaaaaaaaaaaaaaaaaaaaaaaaaaaaaaaaaaaugcaucccccccccccccccccccccccccccccccaaaggcucuuuucagagccaccagaauu

SEQ ID NO: 1072 - RNA, 2054 nt, Artificial Sequence
  mRNA product Design e-1 comprising derived and/or modified sequence from HRSV(A2)__F0_DSCav1 (opt5)
gggagaauauaagcguuggcggagcgucgguuguagcacucugcgcgcccgcucuucugcugcuguuugucuacuuccuccugcuuccccgccgccgccgccgccaucaagcuuaccauggagcugcucauccugaaggccaacgcuauuaccacaauccuuacggccgugaccuucugcuuugcgagcggccagaauauuacagaagaguucuaccaauccaccuguucugcugucagcaaaggguaucuguccgcccucagaacaggaugguacaccucuguuaucacaauugaacugagcaacaucaaggagaauaaaugcaacggcaccgacgccaaggugaaacuuaucaagcaggaacuggauaaguauaaaaaugcugugacggagcuccagcugcugaugcaguccacccccgccacaaacaaucgggcucgcagagagcucccucgguuuaugaacuacacccugaauaacgccaagaaaacaaaugucacccuuucuaagaaacgcaagagacgguuccugggguuucuccugggagugggcagcgcgauugccuccgggguugcuguguguaagguccuucaccuggaaggagaggugaacaaaaucaagagcgcccuccugucuacgaauaaagcuguugugucccugagcaacggcgucucugugcucacauucaaggugcuggaccuuaaaaauuauauugauaagcaacugcucccgauccugaacaaacaguccugcagcauuucuaacaucgaaaccgucauugaguuucagcagaagaauaaccgccuucuggagaucacaagagaauuuuccguuaaugccggcgugaccacccccgugagcacauacaugcucacgaacuccgagcugcugucucucaucaaugacaugccuauuaccaacgaucaaaagaaacugaugagcaauaacguccagaucgugcggcagcaguccuauagcauuauguguaucauuaaggaagagguucuugcguacgugguccaacugccccucuacggggugaucgacacaccuugcuggaaacugcauaccucuccccuuuguacaaccaauacgaaggaaggauccaacaucugccugacacgcaccgauagaggcugguauugugacaaugccgggagcguuucuuucuucccucaggcugagaccugcaaagugcagagcaaccgggucuuuugugauacaaugaacucccucacccugccgucugaggugaaucugugcaaugucgacauuuucaaccccaaguacgauugcaagaucaugacaagcaaaacggacguguccagcucuguuauuaccucccucggagccaucgugagcuguuauggcaagacaaaaugcaccgcuucuaacaagaaucgcgggauuaucaaaacauuuuccaacggaugugauuacgucagcaauaagggcguggacaccguuuccgugggcaacacgcuguauuacgucaauaagcaagaagggaaaucucuuuaugugaagggagagccuaucauuaacuucuacgacccccugguguucccuagcgaugaauuugacgccuccaucucucagguuaaugagaaaauuaaccagagccucgccuucaucagaaaguccgaugaacugcugcacaaugucaacgcuggcaaaagcaccacaaauauuaugaucaccacaauuaucaucgugauuaucgugauucuucucucucugaucgcggucgggcugcuccuguacugcaaggcccgguccacccccgugacgcuuagcaaggaccagcugucuggaauuaacaauaucgcuuuuuccaacugaggacuaguguccaccugucccuccugggcugcuggauugucucguuuuccugccaaauaaacaggaucagcgcuuuacagaucuaaaaaaaaaaaaaaaaaaaaaaaaaaaaaaaaaaaaaaaaaaaaaaaaaaaaaaaaaaaaaaaaugcaucccccccccccccccccccccccccccccccaaaggcucuuuucagagccaccagaauu

SEQ ID NO: 1073 - RNA, 2054 nt, Artificial Sequence
  mRNA product Design e-1 comprising derived and/or modified sequence from HRSV(A2)__F0_DSCav1 (opt6)
gggagaauauaagcguuggcggagcgucgguuguagcacucugcgcgcccgcucuucugcugcuguuugucuacuuccuccugcuuccccgccgccgccgccgccaucaagcuuaccauggaauuauuaauccucaaagcgaacgcuauuacuaccauucuaacagcagucacauucugcuucgccucaggccaaaacauuacagaagaauuuuaccaaucaacaugcucugccguaucaaaaggcuaccuauccgcccuacgaacaggcugguacacaagcguaauaacaaucgaacuaucaaacauaaaagaaaacaaaugcaacgguacagacgccaaaguuaaacuaauaaaacaagaacucgauaaauacaaaaacgcaguaacagaauuacaacuacuaaugcaaucaacaccugcaacaaacaauagagccaggagagaauuaccucgauucaugaauuacacacucaauaacgcaaaaaaaaccaacguuacacuaucaaaaaaaagaaaacgacgauucuuaggauuccuacucggagucggaucagcaauagcaucuggcguugcaguaugcaaaguauuacacuuagaaggugaagucaauaaaauaaaaagcgcgcuacuaaguacaaacaaagcagucgucucccuaucaaacggagucucaguccuaacauucaaaguacucgaccuaaaaaauuacauagauaaacaacuacuuccaauauuaaacaaacaauccuguagcaucagcaauauagaaacaguaauagaauuucaacaaaaaaacaaccgauuauuagaaaucacucgagaauuuuccguaaacgccgggguaacaacuccagucucaaccuacaugcuaaccaauucagaacuauugagcuuaauaaacgacaugccaauaaccaacgaccaaaaaaaacuaaugucuaacaauguucaaaucgucagacaacaaaguuacaguauaauguguauaaucaaagaagaaguccuagcauacguaguccaacucccacuauauggaguuaucgacacaccauguuggaaauuacacaccucaccauuaugcacaaccaauacaaaagaaggaucaaacauaugccuuacacggacagaccgcggaugguauugugacaacgcuggcucagucuccuuuuucccacaagcagaaacaugcaaaguacaaucaaacagagucuuuugcgauaccaugaacucacuuacauuaccaagcgaaguaaaucuuuguaacgucgacaucuucaauccuaaauaugacugcaaaaucaugaccucaaaaacagacguuagcucuucaguaaucacuagcuuaggagcaaucguaucaugcuacggcaaaacaaaauguacagcaucaaauaaaaacagaggaaucauaaaaacauuuucaaacggaugcgauuauguaagcaacaaaggaguagauacuguaagcguaggaaacacauuguacuauguaaacaaacaagaaggaaaaucacucuauguaaaaggagaaccuauaaucaauuucuacgauccauuaguguucccaucagaugaauuugacgccucaauaucacaaguuaaugaaaaaauaaaucaaucgcuagcauucauacguaaaucagaugaauuacuacauaacguaaacgcaggcaaauccacaacaaauaucaugaucacaacaauuauaauaguaauaauaguaauacuacuaucacuaauagccguaggacuccuacuauacugcaaagcaagaucuacuccaguaacccucucaaaagaucaacuaagcggaauuaauaacaucgcauucagcaacuaaggacuaguguccaccugucccuccugggcugcuggauugucucguuuuccugccaaauaaacaggaucagcgcuuuacagaucuaaaaaaaaaaaaaaaaaaaaaaaaaaaaaaaaaaaaaaaaaaaaaaaaaaaaaaaaaaaaaaaaugcaucccccccccccccccccccccccccccccccaaaggcucuuuucagagccaccagaauu

SEQ ID NO: 1074 - RNA, 2054 nt, Artificial Sequence
  mRNA product Design e-1 comprising derived and/or modified sequence from HRSV(A2)__F0_DSCav1 (opt11)
gggagaauauaagcguuggcggagcgucgguuguagcacucugcgcgcccgcucuucugcugcuguuugucuacuuccuccugcuuccccgccgccgccgccgccaucaagcuuaccauggaacuacuuauccucaaagccaacgccaucaccaccauccucacagcaguaaccuuuugcuucgccucaggccaaaauaucacagaagaauuuuaccagaguaccugcuccgccguauccaaaggauaccucagcgcgcuccgcaccggcugguacacuucaguaaucacaaucgaacuauccaacaucaaagaaaacaaaugcaacggcaccgacgcgaaagucaaacucaucaaacaagaacuagacaaauacaaaaaugccguaacagaacuacaacuguuaaugcagagcacacccgccaccaacaaccgcgcccgccgggaacucccccgauucaugaacuacacacucaacaacgccaaaaagacgaacgucacccucagcaagaaacgaaaacgcagauuccucgguuuccuacuaggcguaggcucagcaauagccuccggaguagccgucugcaaaguccugcacuuagaaggcgaagucaacaaaaucaaauccgcccuacucuccacgaacaaagccgucgucucccuguccaacggugucuccguuuuaaccuucaaaguucuggaccucaaaaacuacauagacaaacagcuucuccccauccucaacaaacaauccuguagcaucuccaacaucgaaaccgucauagaauuucaacagaaaaacaacagacugcucgaaaucacccgcgaguucuccgucaacgccggcgucacgacucccgucuccaccuauaugcucacgaacucggaacuccuuucccuaaucaacgacaugccgaucaccaacgaccaaaagaaacucaugucaaacaacguacaaauuguccgccaacaaucauacuccaucaugugcauaauuaaagaagaaguccucgcauacguaguccaacucccccucuacggcgucaucgacacccccugcuggaaacuccacaccuccccacucugcacaaccaacaccaaagaaggcucaaacauaugccuaacgcgcaccgaucgcgguugguacugcgacaacgccgguuccgucagcuucuucccccaagcagagacaugcaaaguccaaucaaaccgcgucuucugcgacaccaugaacucacuaacccuuccaagcgaagucaaccucugcaacguugacaucuucaaccccaaauacgacuguaaaaucaugaccuccaagaccgacguauccucuuccgucaucacaucccuaggcgcuaucguauccugcuaugguaaaaccaaaugcaccgccuccaacaaaaaccgcggcaucaucaagacauuuuccaacggcugcgacuacgugagcaacaaaggcgucgacaccgucuccguaggcaacacccucuacuauguaaacaaacaagagggcaaaucacucuacgucaaaggggaacccaucaucaacuucuacgacccgcucguauuccccagcgaugaguucgacgccuccaucucccaggucaacgaaaagauaaaccaaucacucgcauucauucguaaauccgacgaacuccuacacaacgugaaugcaggcaaaucgaccacuaacaucaugaucaccaccaucaucaucgucaucauagucauccuccugucccuuaucgccgucggucuuuuauuauacugcaaagcccgcagcacccccgucacccucucuaaggaccaacucagcggcaucaauaacaucgcauucucuaacuaaggacuaguguccaccugucccuccugggcugcuggauugucucguuuuccugccaaauaaacaggaucagcgcuuuacagaucuaaaaaaaaaaaaaaaaaaaaaaaaaaaaaaaaaaaaaaaaaaaaaaaaaaaaaaaaaaaaaaaaugcaucccccccccccccccccccccccccccccccaaaggcucuuuucagagccaccagaauu

SEQ ID NO: 1075 - RNA, 2036 nt, Artificial Sequence
  mRNA product Design e-2 comprising derived and/or modified sequence from HRSV(A2)__F0_DSCav1 (opt1)
gggagacccgugacccggaaguuguacggcuacgcgacuuucccucccacaaacccucgcgcccuuccuuuccuacuugggcccggcagaaagcuuaccauggagcugcucauccugaaggccaacgccaucaccaccauccugacggcggugaccuucugcuucgccagcggccagaacaucaccgaggaguucuaccaguccacgugcagcgccgucuccaagggguaccucagcgcccugcggaccggcugguacaccuccgugaucaccaucgagcugagcaacaucaaggagaacaagugcaacgggaccgacgccaaggugaagcucaucaagcaggagcuggacaaguacaagaacgcggucacggagcugcagcuccugaugcaguccaccccggcaaccaacaaccgcgcccggcgcgagcugccccgguucaugaacuacacccucaacaacgccaagaagacgaacgugacccugagcaagaagcgcaagcggcgcuuccugggcuuccuccugggggugggcuccgccaucgcgagcggcgucgccgugugcaaggugcugcaccucgagggggaggucaacaagaucaagagcgcccugcuguccaccaacaaggccguggugagccucuccaacggcgucagcgugcugaccuucaaggugcuggaccucaagaacuacaucgacaagcagcugcugcccauccugaacaagcagagcugcuccaucagcaacaucgagacggugaucgaguuccagcagaagaacaaccggcuccuggagaucacccgcgaguucagcgugaacgccggggucaccacccccguguccacguacaugcugaccaacagcgagcuccugucccugaucaacgacaugccgaucaccaacgaccagaagaagcucaugagcaacaacgugcagaucguccggcagcaguccuacagcaucaugugcaucaucaaggaggaggugcuggcguacgugguccagcugccccucuacggcgugaucgacacccccugcuggaagcugcacacgagcccccugugcaccaccaacaccaaggagggguccaacaucugccucacgcgcaccgaccggggcugguacugcgacaacgccggcagcgucuccuucuucccgcaggccgagaccugcaaggugcagagcaaccgcguguucugcgacaccaugaacucccugacgcugcccagcgagguaaaccucugcaacgucgacaucuucaaccccaaguacgacugcaagaucaugaccuccaagaccgacgugagcuccagcgugaucaccucccugggggccaucgucagcugcuacggcaagacgaagugcaccgccagcaacaagaaccgggggaucaucaagaccuucuccaacggcugcgacuacgugagcaacaagggcguggacaccguguccgucgggaacacccuguacuacgugaacaagcaggagggcaagagccucuacgugaagggggagcccaucaucaacuucuacgacccgcuggucuuccccuccgacgaguucgacgcgagcaucucccaggugaacgagaagaucaaccagagccuggccuucauccgcaaguccgacgagcugcuccacaacgugaacgccggcaagagcacgaccaacaucaugaucaccaccaucaucaucgucaucaucgugauccugcugucccucaucgccguggggcugcugcucuacugcaaggcccggagcacgcccgucacccuguccaaggaccagcugagcggcaucaacaacaucgcguucuccaacugaggacuaguguccaccugucccuccugggcugcuggauugucucguuuuccugccaaauaaacaggaucagcgcuuuacagaucuaaaaaaaaaaaaaaaaaaaaaaaaaaaaaaaaaaaaaaaaaaaaaaaaaaaaaaaaaaaaaaaaugcaucccccccccccccccccccccccccccccccaaaggcucuuuucagagccaccagaauu

SEQ ID NO: 1076 - RNA, 2036 nt, Artificial Sequence
  mRNA product Design e-2 comprising derived and/or modified sequence from HRSV(A2)__F0_DSCav1 (opt1)
gggagacccgugacccggaaguuguacggcuacgcgacuuucccucccacaaacccucgcgcccuuccuuuccuacuugggcccggcagaaagcuuaccauggagcugcucauccugaaggccaacgccaucaccaccauccugacggcggugaccuucugcuucgccagcggccagaacaucaccgaggaguucuaccaguccacgugcagcgccgucuccaagggguaccucagcgcccugcgcaccggcugguacaccuccgugaucaccaucgagcugagcaacaucaaggagaacaagugcaacgggaccgacgccaaggugaagcucaucaagcaggagcuggacaaguacaagaacgcggucacggagcugcagcuccugaugcaguccacccccgccaccaacaaccgggcccgccgggagcugccgcgcuucaugaacuacacccucaacaacgccaagaagacgaacgugacccugagcaagaagcggaagcgccgguuccugggcuuccuccugggggugggcuccgcgaucgccagcggcgucgccgugugcaaggugcugcaccucgagggggaggucaacaagaucaaguccgcccugcugagcaccaacaaggccguggugucccucagcaacggcgucuccgugcugaccuucaaggugcuggaccucaagaacuacaucgacaagcagcugcugcccauccucaacaagcagagcugcuccaucagcaacaucgagacggucaucgaguuccagcagaagaacaaccgccugcuggagaucacccgggaguucuccgugaacgcgggggugaccacccccgucagcacguacaugcucaccaacagcgagcugcugucccucaucaacgacaugcccaucaccaacgaccagaagaagcugaugagcaacaacgugcagaucgugcgccagcaguccuacagcaucaugugcaucaucaaggaggagguccuggccuacguggugcagcucccgcuguacggcgucaucgacacccccugcuggaagcugcacacgagcccccucugcaccaccaacaccaaggaggggagcaacaucugccugacgcggaccgaccgcggcugguacugcgacaacgccggcuccgugagcuucuucccccaggccgagaccugcaagguccaguccaaccggguguucugcgacaccaugaacagccugacgcucccguccgaggugaaccugugcaacgucgacaucuucaaccccaaguacgacugcaagaucaugaccagcaagaccgacguguccagcuccgugaucaccagccugggggccaucgucuccugcuacggcaagacgaagugcaccgcgagcaacaagaaccgcgggaucaucaagaccuucuccaacggcugcgacuacgugagcaacaagggcguggacaccgucagcguggggaacacccucuacuacgugaacaagcaggagggcaagucccuguacgucaagggggagcccaucaucaacuucuacgacccccugguguucccgagcgacgaguucgacgccuccaucagccaggugaacgagaagaucaaccagucccucgccuucauccggaaguccgacgagcugcugcacaacgucaacgccggcaaguccacgaccaacaucaugaucaccaccaucaucaucgugaucaucgugauccugcucagccugaucgccgucgggcugcuccuguacugcaaggcgcgcuccacgcccgugacccugagcaaggaccagcucuccggcaucaacaacaucgccuucagcaacugaggacuaguguccaccugucccuccugggcugcuggauugucucguuuuccugccaaauaaacaggaucagcgcuuuacagaucuaaaaaaaaaaaaaaaaaaaaaaaaaaaaaaaaaaaaaaaaaaaaaaaaaaaaaaaaaaaaaaaaugcaucccccccccccccccccccccccccccccccaaaggcucuuuucagagccaccagaauu

SEQ ID NO: 1077 - RNA, 2036 nt, Artificial Sequence
  mRNA product Design e-2 comprising derived and/or modified sequence from HRSV(A2)__F0_DSCav1 (opt2)
gggagacccgugacccggaaguuguacggcuacgcgacuuucccucccacaaacccucgcgcccuuccuuuccuacuugggcccggcagaaagcuuaccauggagcuccucauccucaaggccaacgccaucaccaccauccucaccgccgucaccuucugcuucgccuccggccagaacaucaccgaggaguucuaccaguccaccugcuccgccgucuccaagggcuaccucuccgcccuccgcaccggcugguacaccuccgucaucaccaucgagcucuccaacaucaaggagaacaagugcaacggcaccgacgccaaggucaagcucaucaagcaggagcucgacaaguacaagaacgccgucaccgagcuccagcuccucaugcaguccacccccgccaccaacaaccgcgcccgccgcgagcucccccgcuucaugaacuacacccucaacaacgccaagaagaccaacgucacccucuccaagaagcgcaagcgccgcuuccucggcuuccuccucggcgucggcuccgccaucgccuccggcgucgccgucugcaagguccuccaccucgagggcgaggucaacaagaucaaguccgcccuccucuccaccaacaaggccgucgucucccucuccaacggcgucuccguccucaccuucaagguccucgaccucaagaacuacaucgacaagcagcuccuccccauccucaacaagcaguccugcuccaucuccaacaucgagaccgucaucgaguuccagcagaagaacaaccgccuccucgagaucacccgcgaguucuccgucaacgccggcgucaccacccccgucuccaccuacaugcucaccaacuccgagcuccucucccucaucaacgacaugcccaucaccaacgaccagaagaagcucauguccaacaacguccagaucguccgccagcaguccuacuccaucaugugcaucaucaaggaggagguccucgccuacgucguccagcucccccucuacggcgucaucgacacccccugcuggaagcuccacaccuccccccucugcaccaccaacaccaaggagggcuccaacaucugccucacccgcaccgaccgcggcugguacugcgacaacgccggcuccgucuccuucuucccccaggccgagaccugcaagguccaguccaaccgcgucuucugcgacaccaugaacucccucacccuccccuccgaggucaaccucugcaacgucgacaucuucaaccccaaguacgacugcaagaucaugaccuccaagaccgacgucuccuccuccgucaucaccucccucggcgccaucgucuccugcuacggcaagaccaagugcaccgccuccaacaagaaccgcggcaucaucaagaccuucuccaacggcugcgacuacgucuccaacaagggcgucgacaccgucuccgucggcaacacccucuacuacgucaacaagcaggagggcaagucccucuacgucaagggcgagcccaucaucaacuucuacgacccccucgucuuccccuccgacgaguucgacgccuccaucucccaggucaacgagaagaucaaccagucccucgccuucauccgcaaguccgacgagcuccuccacaacgucaacgccggcaaguccaccaccaacaucaugaucaccaccaucaucaucgucaucaucgucauccuccucucccucaucgccgucggccuccuccucuacugcaaggcccgcuccacccccgucacccucuccaaggaccagcucuccggcaucaacaacaucgccuucuccaacugaggacuaguguccaccugucccuccugggcugcuggauugucucguuuuccugccaaauaaacaggaucagcgcuuuacagaucuaaaaaaaaaaaaaaaaaaaaaaaaaaaaaaaaaaaaaaaaaaaaaaaaaaaaaaaaaaaaaaaaugcaucccccccccccccccccccccccccccccccaaaggcucuuuucagagccaccagaauu

SEQ ID NO: 1078 - RNA, 2036 nt, Artificial Sequence
  mRNA product Design e-2 comprising derived and/or modified sequence from HRSV(A2)__F0_DSCav1 (opt3)
gggagacccgugacccggaaguuguacggcuacgcgacuuucccucccacaaacccucgcgcccuuccuuuccuacuugggcccggcagaaagcuuaccauggagcugcucauccuuaaggccaacgcuauuaccacaauacugacugcagugacguucugcuuugccagcggccagaauaucaccgaagaguucuaccaauccacauguucugcggucucaaaaggguauuugagugcuuuaagaacuggaugguacaccagcguuauuacaaucgaacuguccaacauuaaggagaauaaaugcaacgguaccgacgccaaggugaaacuaaucaagcaggaacucgauaaguauaaaaaugcaguaacugagcugcagcuucugaugcagucuacacccgccaccaacaauagggcucggcgcgaguugccucgauuuaugaacuacacgcucaauaacgcaaagaaaacuaaugugacccugucgaagaaacguaagagaagguuccugggcuuucucuuaggggucggaucagccauagcuagcggcguggccguuuguaaggugcugcaccuugaaggugaggucaacaaaaucaagagugcguugcuguccacaaauaaagcagugguaucucuaagcaacgggguuuccgugcucacuuucaagguccuggaccuuaaaaauuauauugauaagcaacuguugccaauccucaacaaacagucaugcaguauuagcaacaucgaaaccgugauagaguuucagcagaagaauaaccggcuguuagagauuacacgcgaguucucugugaaugccggagucaccacgccgguuuccacuuacaugcugacaaacucagaacuccuuagccugaucaaugacaugcccauuaccaacgaucaaaagaaauugaugaguaauaacgugcagaucguaagacagcagucuuauuccaucauguguauuauaaaggaagaggugcuagcuuacgucgugcaacugccucucuacggcguuaucgacacuccaugcuggaaacugcauacaagcccccuuuguaccacgaauaccaaggaaggcucgaacauuugccugacaaggacugaucgggggugguauugugacaaugccggaucuguguccuuuuucccucaggcagagaccugcaaaguccagucaaaccgcguguuuugugauacaaugaauaguuugacucucccaagcgagguaaaccugugcaauguugacaucuucaaccccaaguacgauugcaagauaaugaccuccaaaacagacgugucuagcucagucauuaccaguuuaggugcuaucguguccuguuauggcaagacuaaaugcacggccagcaacaagaaucgagggaucauuaaaacauuuucuaacggaugugauuacgucucaaauaagggcguggacaccguuaguguggguaacacucuguauuacguaaauaagcaagaagggaaaagccuauaugucaagggagagccuaucauuaacuucuacgacccacucguguucccguccgaugaauuugacgcgucuauaucgcagguuaaugagaaaaucaaccagagccuggccuucauuagaaaguccgaugaacuuuugcacaaugugaacgcaggcaaaucaaccacaaauaucaugaucaccacuauuauaaucgucauuaucgugauucugcucagucugaucgcuguaggccuucuguuguacugcaaggccaggucuacacccgugacgcucagcaaggaccagcuguccgggauaaacaauaucgcuuuuucaaacugaggacuaguguccaccugucccuccugggcugcuggauugucucguuuuccugccaaauaaacaggaucagcgcuuuacagaucuaaaaaaaaaaaaaaaaaaaaaaaaaaaaaaaaaaaaaaaaaaaaaaaaaaaaaaaaaaaaaaaaugcaucccccccccccccccccccccccccccccccaaaggcucuuuucagagccaccagaauu

SEQ ID NO: 1079 - RNA, 2036 nt, Artificial Sequence
  mRNA product Design e-2 comprising derived and/or modified sequence from HRSV(A2)__F0_DSCav1 (opt4)
gggagacccgugacccggaaguuguacggcuacgcgacuuucccucccacaaacccucgcgcccuuccuuuccuacuugggcccggcagaaagcuuaccauggagcugcugauccugaaggccaacgccaucaccaccauccugaccgccgugaccuucugcuucgccagcggccagaacaucaccgaggaguucuaccagagcaccugcagcgccgugagcaagggcuaccugagcgcccugagaaccggcugguacaccagcgugaucaccaucgagcugagcaacaucaaggagaacaagugcaacggcaccgacgccaaggugaagcugaucaagcaggagcuggacaaguacaagaacgccgugaccgagcugcagcugcugaugcagagcacccccgccaccaacaacagagccagaagagagcugcccagauucaugaacuacacccugaacaacgccaagaagaccaacgugacccugagcaagaagagaaagagaagauuccugggcuuccugcugggcgugggcagcgccaucgccagcggcguggccgugugcaaggugcugcaccuggagggcgaggugaacaagaucaagagcgcccugcugagcaccaacaaggccguggugagccugagcaacggcgugagcgugcugaccuucaaggugcuggaccugaagaacuacaucgacaagcagcugcugcccauccugaacaagcagagcugcagcaucagcaacaucgagaccgugaucgaguuccagcagaagaacaacagacugcuggagaucaccagagaguucagcgugaacgccggcgugaccacccccgugagcaccuacaugcugaccaacagcgagcugcugagccugaucaacgacaugcccaucaccaacgaccagaagaagcugaugagcaacaacgugcagaucgugagacagcagagcuacagcaucaugugcaucaucaaggaggaggugcuggccuacguggugcagcugccccuguacggcgugaucgacacccccugcuggaagcugcacaccagcccccugugcaccaccaacaccaaggagggcagcaacaucugccugaccagaaccgacagaggcugguacugcgacaacgccggcagcgugagcuucuucccccaggccgagaccugcaaggugcagagcaacagaguguucugcgacaccaugaacagccugacccugcccagcgaggugaaccugugcaacguggacaucuucaaccccaaguacgacugcaagaucaugaccagcaagaccgacgugagcagcagcgugaucaccagccugggcgccaucgugagcugcuacggcaagaccaagugcaccgccagcaacaagaacagaggcaucaucaagaccuucagcaacggcugcgacuacgugagcaacaagggcguggacaccgugagcgugggcaacacccuguacuacgugaacaagcaggagggcaagagccuguacgugaagggcgagcccaucaucaacuucuacgacccccugguguuccccagcgacgaguucgacgccagcaucagccaggugaacgagaagaucaaccagagccuggccuucaucagaaagagcgacgagcugcugcacaacgugaacgccggcaagagcaccaccaacaucaugaucaccaccaucaucaucgugaucaucgugauccugcugagccugaucgccgugggccugcugcuguacugcaaggccagaagcacccccgugacccugagcaaggaccagcugagcggcaucaacaacaucgccuucagcaacugaggacuaguguccaccugucccuccugggcugcuggauugucucguuuuccugccaaauaaacaggaucagcgcuuuacagaucuaaaaaaaaaaaaaaaaaaaaaaaaaaaaaaaaaaaaaaaaaaaaaaaaaaaaaaaaaaaaaaaaugcaucccccccccccccccccccccccccccccccaaaggcucuuuucagagccaccagaauu

SEQ ID NO: 1080 - RNA, 2036 nt, Artificial Sequence
  mRNA product Design e-2 comprising derived and/or modified sequence from HRSV(A2)__F0_DSCav1 (opt5)
gggagacccgugacccggaaguuguacggcuacgcgacuuucccucccacaaacccucgcgcccuuccuuuccuacuugggcccggcagaaagcuuaccauggagcugcucauccugaaggccaacgcuauuaccacaauccuuacggccgugaccuucugcuuugcgagcggccagaauauuacagaagaguucuaccaauccaccuguucugcugucagcaaaggguaucuguccgcccucagaacaggaugguacaccucuguuaucacaauugaacugagcaacaucaaggagaauaaaugcaacggcaccgacgccaaggugaaacuuaucaagcaggaacuggauaaguauaaaaaugcugugacggagcuccagcugcugaugcaguccacccccgccacaaacaaucgggcucgcagagagcucccucgguuuaugaacuacacccugaauaacgccaagaaaacaaaugucacccuuucuaagaaacgcaagagacgguuccugggguuucuccugggagugggcagcgcgauugccuccgggguugcuguguguaagguccuucaccuggaaggagaggugaacaaaaucaagagcgcccuccugucuacgaauaaagcuguugugucccugagcaacggcgucucugugcucacauucaaggugcuggaccuuaaaaauuauauugauaagcaacugcucccgauccugaacaaacaguccugcagcauuucuaacaucgaaaccgucauugaguuucagcagaagaauaaccgccuucuggagaucacaagagaauuuuccguuaaugccggcgugaccacccccgugagcacauacaugcucacgaacuccgagcugcugucucucaucaaugacaugccuauuaccaacgaucaaaagaaacugaugagcaauaacguccagaucgugcggcagcaguccuauagcauuauguguaucauuaaggaagagguucuugcguacgugguccaacugccccucuacggggugaucgacacaccuugcuggaaacugcauaccucuccccuuuguacaaccaauacgaaggaaggauccaacaucugccugacacgcaccgauagaggcugguauugugacaaugccgggagcguuucuuucuucccucaggcugagaccugcaaagugcagagcaaccgggucuuuugugauacaaugaacucccucacccugccgucugaggugaaucugugcaaugucgacauuuucaaccccaaguacgauugcaagaucaugacaagcaaaacggacguguccagcucuguuauuaccucccucggagccaucgugagcuguuauggcaagacaaaaugcaccgcuucuaacaagaaucgcgggauuaucaaaacauuuuccaacggaugugauuacgucagcaauaagggcguggacaccguuuccgugggcaacacgcuguauuacgucaauaagcaagaagggaaaucucuuuaugugaagggagagccuaucauuaacuucuacgacccccugguguucccuagcgaugaauuugacgccuccaucucucagguuaaugagaaaauuaaccagagccucgccuucaucagaaaguccgaugaacugcugcacaaugucaacgcuggcaaaagcaccacaaauauuaugaucaccacaauuaucaucgugauuaucgugauucuucucucucugaucgcggucgggcugcuccuguacugcaaggcccgguccacccccgugacgcuuagcaaggaccagcugucuggaauuaacaauaucgcuuuuuccaacugaggacuaguguccaccugucccuccugggcugcuggauugucucguuuuccugccaaauaaacaggaucagcgcuuuacagaucuaaaaaaaaaaaaaaaaaaaaaaaaaaaaaaaaaaaaaaaaaaaaaaaaaaaaaaaaaaaaaaaaugcaucccccccccccccccccccccccccccccccaaaggcucuuuucagagccaccagaauu

SEQ ID NO: 1081 - RNA, 2036 nt, Artificial Sequence
  mRNA product Design e-2 comprising derived and/or modified sequence from HRSV(A2)__F0_DSCav1 (opt6)
gggagacccgugacccggaaguuguacggcuacgcgacuuucccucccacaaacccucgcgcccuuccuuuccuacuugggcccggcagaaagcuuaccauggaauuauuaauccucaaagcgaacgcuauuacuaccauucuaacagcagucacauucugcuucgccucaggccaaaacauuacagaagaauuuuaccaaucaacaugcucugccguaucaaaaggcuaccuauccgcccuacgaacaggcugguacacaagcguaauaacaaucgaacuaucaaacauaaaagaaaacaaaugcaacgguacagacgccaaaguuaaacuaauaaaacaagaacucgauaaauacaaaaacgcaguaacagaauuacaacuacuaaugcaaucaacaccugcaacaaacaauagagccaggagagaauuaccucgauucaugaauuacacacucaauaacgcaaaaaaaaccaacguuacacuaucaaaaaaaagaaaacgacgauucuuaggauuccuacucggagucggaucagcaauagcaucuggcguugcaguaugcaaaguauuacacuuagaaggugaagucaauaaaauaaaaagcgcgcuacuaaguacaaacaaagcagucgucucccuaucaaacggagucucaguccuaacauucaaaguacucgaccuaaaaaauuacauagauaaacaacuacuuccaauauuaaacaaacaauccuguagcaucagcaauauagaaacaguaauagaauuucaacaaaaaaacaaccgauuauuagaaaucacucgagaauuuuccguaaacgccgggguaacaacuccagucucaaccuacaugcuaaccaauucagaacuauugagcuuaauaaacgacaugccaauaaccaacgaccaaaaaaaacuaaugucuaacaauguucaaaucgucagacaacaaaguuacaguauaauguguauaaucaaagaagaaguccuagcauacguaguccaacucccacuauauggaguuaucgacacaccauguuggaaauuacacaccucaccauuaugcacaaccaauacaaaagaaggaucaaacauaugccuuacacggacagaccgcggaugguauugugacaacgcuggcucagucuccuuuuucccacaagcagaaacaugcaaaguacaaucaaacagagucuuuugcgauaccaugaacucacuuacauuaccaagcgaaguaaaucuuuguaacgucgacaucuucaauccuaaauaugacugcaaaaucaugaccucaaaaacagacguuagcucuucaguaaucacuagcuuaggagcaaucguaucaugcuacggcaaaacaaaauguacagcaucaaauaaaaacagaggaaucauaaaaacauuuucaaacggaugcgauuauguaagcaacaaaggaguagauacuguaagcguaggaaacacauuguacuauguaaacaaacaagaaggaaaaucacucuauguaaaaggagaaccuauaaucaauuucuacgauccauuaguguucccaucagaugaauuugacgccucaauaucacaaguuaaugaaaaaauaaaucaaucgcuagcauucauacguaaaucagaugaauuacuacauaacguaaacgcaggcaaauccacaacaaauaucaugaucacaacaauuauaauaguaauaauaguaauacuacuaucacuaauagccguaggacuccuacuauacugcaaagcaagaucuacuccaguaacccucucaaaagaucaacuaagcggaauuaauaacaucgcauucagcaacuaaggacuaguguccaccugucccuccugggcugcuggauugucucguuuuccugccaaauaaacaggaucagcgcuuuacagaucuaaaaaaaaaaaaaaaaaaaaaaaaaaaaaaaaaaaaaaaaaaaaaaaaaaaaaaaaaaaaaaaaugcaucccccccccccccccccccccccccccccccaaaggcucuuuucagagccaccagaauu

SEQ ID NO: 1082 - RNA, 2036 nt, Artificial Sequence
  mRNA product Design e-2 comprising derived and/or modified sequence from HRSV(A2)__F0_DSCav1 (opt11)
gggagacccgugacccggaaguuguacggcuacgcgacuuucccucccacaaacccucgcgcccuuccuuuccuacuugggcccggcagaaagcuuaccauggaacuacuuauccucaaagccaacgccaucaccaccauccucacagcaguaaccuuuugcuucgccucaggccaaaauaucacagaagaauuuuaccagaguaccugcuccgccguauccaaaggauaccucagcgcgcuccgcaccggcugguacacuucaguaaucacaaucgaacuauccaacaucaaagaaaacaaaugcaacggcaccgacgcgaaagucaaacucaucaaacaagaacuagacaaauacaaaaaugccguaacagaacuacaacuguuaaugcagagcacacccgccaccaacaaccgcgcccgccgggaacucccccgauucaugaacuacacacucaacaacgccaaaaagacgaacgucacccucagcaagaaacgaaaacgcagauuccucgguuuccuacuaggcguaggcucagcaauagccuccggaguagccgucugcaaaguccugcacuuagaaggcgaagucaacaaaaucaaauccgcccuacucuccacgaacaaagccgucgucucccuguccaacggugucuccguuuuaaccuucaaaguucuggaccucaaaaacuacauagacaaacagcuucuccccauccucaacaaacaauccuguagcaucuccaacaucgaaaccgucauagaauuucaacagaaaaacaacagacugcucgaaaucacccgcgaguucuccgucaacgccggcgucacgacucccgucuccaccuauaugcucacgaacucggaacuccuuucccuaaucaacgacaugccgaucaccaacgaccaaaagaaacucaugucaaacaacguacaaauuguccgccaacaaucauacuccaucaugugcauaauuaaagaagaaguccucgcauacguaguccaacucccccucuacggcgucaucgacacccccugcuggaaacuccacaccuccccacucugcacaaccaacaccaaagaaggcucaaacauaugccuaacgcgcaccgaucgcgguugguacugcgacaacgccgguuccgucagcuucuucccccaagcagagacaugcaaaguccaaucaaaccgcgucuucugcgacaccaugaacucacuaacccuuccaagcgaagucaaccucugcaacguugacaucuucaaccccaaauacgacuguaaaaucaugaccuccaagaccgacguauccucuuccgucaucacaucccuaggcgcuaucguauccugcuaugguaaaaccaaaugcaccgccuccaacaaaaaccgcggcaucaucaagacauuuuccaacggcugcgacuacgugagcaacaaaggcgucgacaccgucuccguaggcaacacccucuacuauguaaacaaacaagagggcaaaucacucuacgucaaaggggaacccaucaucaacuucuacgacccgcucguauuccccagcgaugaguucgacgccuccaucucccaggucaacgaaaagauaaaccaaucacucgcauucauucguaaauccgacgaacuccuacacaacgugaaugcaggcaaaucgaccacuaacaucaugaucaccaccaucaucaucgucaucauagucauccuccugucccuuaucgccgucggucuuuuauuauacugcaaagcccgcagcacccccgucacccucucuaaggaccaacucagcggcaucaauaacaucgcauucucuaacuaaggacuaguguccaccugucccuccugggcugcuggauugucucguuuuccugccaaauaaacaggaucagcgcuuuacagaucuaaaaaaaaaaaaaaaaaaaaaaaaaaaaaaaaaaaaaaaaaaaaaaaaaaaaaaaaaaaaaaaaugcaucccccccccccccccccccccccccccccccaaaggcucuuuucagagccaccagaauu

SEQ ID NO: 1083 - RNA, 2006 nt, Artificial Sequence
  mRNA product Design e-3 comprising derived and/or modified sequence from HRSV(A2)__F0_DSCav1 (opt1)
gggagacuuucccauucuguagcagaauuugguguugccuguggucuuggucccgcggagaagcuuaccauggagcugcucauccugaaggccaacgccaucaccaccauccugacggcggugaccuucugcuucgccagcggccagaacaucaccgaggaguucuaccaguccacgugcagcgccgucuccaagggguaccucagcgcccugcggaccggcugguacaccuccgugaucaccaucgagcugagcaacaucaaggagaacaagugcaacgggaccgacgccaaggugaagcucaucaagcaggagcuggacaaguacaagaacgcggucacggagcugcagcuccugaugcaguccaccccggcaaccaacaaccgcgcccggcgcgagcugccccgguucaugaacuacacccucaacaacgccaagaagacgaacgugacccugagcaagaagcgcaagcggcgcuuccugggcuuccuccugggggugggcuccgccaucgcgagcggcgucgccgugugcaaggugcugcaccucgagggggaggucaacaagaucaagagcgcccugcuguccaccaacaaggccguggugagccucuccaacggcgucagcgugcugaccuucaaggugcuggaccucaagaacuacaucgacaagcagcugcugcccauccugaacaagcagagcugcuccaucagcaacaucgagacggugaucgaguuccagcagaagaacaaccggcuccuggagaucacccgcgaguucagcgugaacgccggggucaccacccccguguccacguacaugcugaccaacagcgagcuccugucccugaucaacgacaugccgaucaccaacgaccagaagaagcucaugagcaacaacgugcagaucguccggcagcaguccuacagcaucaugugcaucaucaaggaggaggugcuggcguacgugguccagcugccccucuacggcgugaucgacacccccugcuggaagcugcacacgagcccccugugcaccaccaacaccaaggagggguccaacaucugccucacgcgcaccgaccggggcugguacugcgacaacgccggcagcgucuccuucuucccgcaggccgagaccugcaaggugcagagcaaccgcguguucugcgacaccaugaacucccugacgcugcccagcgagguaaaccucugcaacgucgacaucuucaaccccaaguacgacugcaagaucaugaccuccaagaccgacgugagcuccagcgugaucaccucccugggggccaucgucagcugcuacggcaagacgaagugcaccgccagcaacaagaaccgggggaucaucaagaccuucuccaacggcugcgacuacgugagcaacaagggcguggacaccguguccgucgggaacacccuguacuacgugaacaagcaggagggcaagagccucuacgugaagggggagcccaucaucaacuucuacgacccgcuggucuuccccuccgacgaguucgacgcgagcaucucccaggugaacgagaagaucaaccagagccuggccuucauccgcaaguccgacgagcugcuccacaacgugaacgccggcaagagcacgaccaacaucaugaucaccaccaucaucaucgucaucaucgugauccugcugucccucaucgccguggggcugcugcucuacugcaaggcccggagcacgcccgucacccuguccaaggaccagcugagcggcaucaacaacaucgcguucuccaacugaggacuaguguccaccugucccuccugggcugcuggauugucucguuuuccugccaaauaaacaggaucagcgcuuuacagaucuaaaaaaaaaaaaaaaaaaaaaaaaaaaaaaaaaaaaaaaaaaaaaaaaaaaaaaaaaaaaaaaaugcaucccccccccccccccccccccccccccccccaaaggcucuuuucagagccaccagaauu

SEQ ID NO: 1084 - RNA, 2006 nt, Artificial Sequence
  mRNA product Design e-3 comprising derived and/or modified sequence from HRSV(A2)__F0_DSCav1 (opt1)
gggagacuuucccauucuguagcagaauuugguguugccuguggucuuggucccgcggagaagcuuaccauggagcugcucauccugaaggccaacgccaucaccaccauccugacggcggugaccuucugcuucgccagcggccagaacaucaccgaggaguucuaccaguccacgugcagcgccgucuccaagggguaccucagcgcccugcgcaccggcugguacaccuccgugaucaccaucgagcugagcaacaucaaggagaacaagugcaacgggaccgacgccaaggugaagcucaucaagcaggagcuggacaaguacaagaacgcggucacggagcugcagcuccugaugcaguccacccccgccaccaacaaccgggcccgccgggagcugccgcgcuucaugaacuacacccucaacaacgccaagaagacgaacgugacccugagcaagaagcggaagcgccgguuccugggcuuccuccugggggugggcuccgcgaucgccagcggcgucgccgugugcaaggugcugcaccucgagggggaggucaacaagaucaaguccgcccugcugagcaccaacaaggccguggugucccucagcaacggcgucuccgugcugaccuucaaggugcuggaccucaagaacuacaucgacaagcagcugcugcccauccucaacaagcagagcugcuccaucagcaacaucgagacggucaucgaguuccagcagaagaacaaccgccugcuggagaucacccgggaguucuccgugaacgcgggggugaccacccccgucagcacguacaugcucaccaacagcgagcugcugucccucaucaacgacaugcccaucaccaacgaccagaagaagcugaugagcaacaacgugcagaucgugcgccagcaguccuacagcaucaugugcaucaucaaggaggagguccuggccuacguggugcagcucccgcuguacggcgucaucgacacccccugcuggaagcugcacacgagcccccucugcaccaccaacaccaaggaggggagcaacaucugccugacgcggaccgaccgcggcugguacugcgacaacgccggcuccgugagcuucuucccccaggccgagaccugcaagguccaguccaaccggguguucugcgacaccaugaacagccugacgcucccguccgaggugaaccugugcaacgucgacaucuucaaccccaaguacgacugcaagaucaugaccagcaagaccgacguguccagcuccgugaucaccagccugggggccaucgucuccugcuacggcaagacgaagugcaccgcgagcaacaagaaccgcgggaucaucaagaccuucuccaacggcugcgacuacgugagcaacaagggcguggacaccgucagcguggggaacacccucuacuacgugaacaagcaggagggcaagucccuguacgucaagggggagcccaucaucaacuucuacgacccccugguguucccgagcgacgaguucgacgccuccaucagccaggugaacgagaagaucaaccagucccucgccuucauccggaaguccgacgagcugcugcacaacgucaacgccggcaaguccacgaccaacaucaugaucaccaccaucaucaucgugaucaucgugauccugcucagccugaucgccgucgggcugcuccuguacugcaaggcgcgcuccacgcccgugacccugagcaaggaccagcucuccggcaucaacaacaucgccuucagcaacugaggacuaguguccaccugucccuccugggcugcuggauugucucguuuuccugccaaauaaacaggaucagcgcuuuacagaucuaaaaaaaaaaaaaaaaaaaaaaaaaaaaaaaaaaaaaaaaaaaaaaaaaaaaaaaaaaaaaaaaugcaucccccccccccccccccccccccccccccccaaaggcucuuuucagagccaccagaauu

SEQ ID NO: 1085 - RNA, 2006 nt, Artificial Sequence
  mRNA product Design e-3 comprising derived and/or modified sequence from HRSV(A2)__F0_DSCav1 (opt2)
gggagacuuucccauucuguagcagaauuugguguugccuguggucuuggucccgcggagaagcuuaccauggagcuccucauccucaaggccaacgccaucaccaccauccucaccgccgucaccuucugcuucgccuccggccagaacaucaccgaggaguucuaccaguccaccugcuccgccgucuccaagggcuaccucuccgcccuccgcaccggcugguacaccuccgucaucaccaucgagcucuccaacaucaaggagaacaagugcaacggcaccgacgccaaggucaagcucaucaagcaggagcucgacaaguacaagaacgccgucaccgagcuccagcuccucaugcaguccacccccgccaccaacaaccgcgcccgccgcgagcucccccgcuucaugaacuacacccucaacaacgccaagaagaccaacgucacccucuccaagaagcgcaagcgccgcuuccucggcuuccuccucggcgucggcuccgccaucgccuccggcgucgccgucugcaagguccuccaccucgagggcgaggucaacaagaucaaguccgcccuccucuccaccaacaaggccgucgucucccucuccaacggcgucuccguccucaccuucaagguccucgaccucaagaacuacaucgacaagcagcuccuccccauccucaacaagcaguccugcuccaucuccaacaucgagaccgucaucgaguuccagcagaagaacaaccgccuccucgagaucacccgcgaguucuccgucaacgccggcgucaccacccccgucuccaccuacaugcucaccaacuccgagcuccucucccucaucaacgacaugcccaucaccaacgaccagaagaagcucauguccaacaacguccagaucguccgccagcaguccuacuccaucaugugcaucaucaaggaggagguccucgccuacgucguccagcucccccucuacggcgucaucgacacccccugcuggaagcuccacaccuccccccucugcaccaccaacaccaaggagggcuccaacaucugccucacccgcaccgaccgcggcugguacugcgacaacgccggcuccgucuccuucuucccccaggccgagaccugcaagguccaguccaaccgcgucuucugcgacaccaugaacucccucacccuccccuccgaggucaaccucugcaacgucgacaucuucaaccccaaguacgacugcaagaucaugaccuccaagaccgacgucuccuccuccgucaucaccucccucggcgccaucgucuccugcuacggcaagaccaagugcaccgccuccaacaagaaccgcggcaucaucaagaccuucuccaacggcugcgacuacgucuccaacaagggcgucgacaccgucuccgucggcaacacccucuacuacgucaacaagcaggagggcaagucccucuacgucaagggcgagcccaucaucaacuucuacgacccccucgucuuccccuccgacgaguucgacgccuccaucucccaggucaacgagaagaucaaccagucccucgccuucauccgcaaguccgacgagcuccuccacaacgucaacgccggcaaguccaccaccaacaucaugaucaccaccaucaucaucgucaucaucgucauccuccucucccucaucgccgucggccuccuccucuacugcaaggcccgcuccacccccgucacccucuccaaggaccagcucuccggcaucaacaacaucgccuucuccaacugaggacuaguguccaccugucccuccugggcugcuggauugucucguuuuccugccaaauaaacaggaucagcgcuuuacagaucuaaaaaaaaaaaaaaaaaaaaaaaaaaaaaaaaaaaaaaaaaaaaaaaaaaaaaaaaaaaaaaaaugcaucccccccccccccccccccccccccccccccaaaggcucuuuucagagccaccagaauu

SEQ ID NO: 1086 - RNA, 2006 nt, Artificial Sequence
  mRNA product Design e-3 comprising derived and/or modified sequence from HRSV(A2)__F0_DSCav1 (opt3)
gggagacuuucccauucuguagcagaauuugguguugccuguggucuuggucccgcggagaagcuuaccauggagcugcucauccuuaaggccaacgcuauuaccacaauacugacugcagugacguucugcuuugccagcggccagaauaucaccgaagaguucuaccaauccacauguucugcggucucaaaaggguauuugagugcuuuaagaacuggaugguacaccagcguuauuacaaucgaacuguccaacauuaaggagaauaaaugcaacgguaccgacgccaaggugaaacuaaucaagcaggaacucgauaaguauaaaaaugcaguaacugagcugcagcuucugaugcagucuacacccgccaccaacaauagggcucggcgcgaguugccucgauuuaugaacuacacgcucaauaacgcaaagaaaacuaaugugacccugucgaagaaacguaagagaagguuccugggcuuucucuuaggggucggaucagccauagcuagcggcguggccguuuguaaggugcugcaccuugaaggugaggucaacaaaaucaagagugcguugcuguccacaaauaaagcagugguaucucuaagcaacgggguuuccgugcucacuuucaagguccuggaccuuaaaaauuauauugauaagcaacuguugccaauccucaacaaacagucaugcaguauuagcaacaucgaaaccgugauagaguuucagcagaagaauaaccggcuguuagagauuacacgcgaguucucugugaaugccggagucaccacgccgguuuccacuuacaugcugacaaacucagaacuccuuagccugaucaaugacaugcccauuaccaacgaucaaaagaaauugaugaguaauaacgugcagaucguaagacagcagucuuauuccaucauguguauuauaaaggaagaggugcuagcuuacgucgugcaacugccucucuacggcguuaucgacacuccaugcuggaaacugcauacaagcccccuuuguaccacgaauaccaaggaaggcucgaacauuugccugacaaggacugaucgggggugguauugugacaaugccggaucuguguccuuuuucccucaggcagagaccugcaaaguccagucaaaccgcguguuuugugauacaaugaauaguuugacucucccaagcgagguaaaccugugcaauguugacaucuucaaccccaaguacgauugcaagauaaugaccuccaaaacagacgugucuagcucagucauuaccaguuuaggugcuaucguguccuguuauggcaagacuaaaugcacggccagcaacaagaaucgagggaucauuaaaacauuuucuaacggaugugauuacgucucaaauaagggcguggacaccguuaguguggguaacacucuguauuacguaaauaagcaagaagggaaaagccuauaugucaagggagagccuaucauuaacuucuacgacccacucguguucccguccgaugaauuugacgcgucuauaucgcagguuaaugagaaaaucaaccagagccuggccuucauuagaaaguccgaugaacuuuugcacaaugugaacgcaggcaaaucaaccacaaauaucaugaucaccacuauuauaaucgucauuaucgugauucugcucagucugaucgcuguaggccuucuguuguacugcaaggccaggucuacacccgugacgcucagcaaggaccagcuguccgggauaaacaauaucgcuuuuucaaacugaggacuaguguccaccugucccuccugggcugcuggauugucucguuuuccugccaaauaaacaggaucagcgcuuuacagaucuaaaaaaaaaaaaaaaaaaaaaaaaaaaaaaaaaaaaaaaaaaaaaaaaaaaaaaaaaaaaaaaaugcaucccccccccccccccccccccccccccccccaaaggcucuuuucagagccaccagaauu

SEQ ID NO: 1087 - RNA, 2006 nt, Artificial Sequence
  mRNA product Design e-3 comprising derived and/or modified sequence from HRSV(A2)__F0_DSCav1 (opt4)
gggagacuuucccauucuguagcagaauuugguguugccuguggucuuggucccgcggagaagcuuaccauggagcugcugauccugaaggccaacgccaucaccaccauccugaccgccgugaccuucugcuucgccagcggccagaacaucaccgaggaguucuaccagagcaccugcagcgccgugagcaagggcuaccugagcgcccugagaaccggcugguacaccagcgugaucaccaucgagcugagcaacaucaaggagaacaagugcaacggcaccgacgccaaggugaagcugaucaagcaggagcuggacaaguacaagaacgccgugaccgagcugcagcugcugaugcagagcacccccgccaccaacaacagagccagaagagagcugcccagauucaugaacuacacccugaacaacgccaagaagaccaacgugacccugagcaagaagagaaagagaagauuccugggcuuccugcugggcgugggcagcgccaucgccagcggcguggccgugugcaaggugcugcaccuggagggcgaggugaacaagaucaagagcgcccugcugagcaccaacaaggccguggugagccugagcaacggcgugagcgugcugaccuucaaggugcuggaccugaagaacuacaucgacaagcagcugcugcccauccugaacaagcagagcugcagcaucagcaacaucgagaccgugaucgaguuccagcagaagaacaacagacugcuggagaucaccagagaguucagcgugaacgccggcgugaccacccccgugagcaccuacaugcugaccaacagcgagcugcugagccugaucaacgacaugcccaucaccaacgaccagaagaagcugaugagcaacaacgugcagaucgugagacagcagagcuacagcaucaugugcaucaucaaggaggaggugcuggccuacguggugcagcugccccuguacggcgugaucgacacccccugcuggaagcugcacaccagcccccugugcaccaccaacaccaaggagggcagcaacaucugccugaccagaaccgacagaggcugguacugcgacaacgccggcagcgugagcuucuucccccaggccgagaccugcaaggugcagagcaacagaguguucugcgacaccaugaacagccugacccugcccagcgaggugaaccugugcaacguggacaucuucaaccccaaguacgacugcaagaucaugaccagcaagaccgacgugagcagcagcgugaucaccagccugggcgccaucgugagcugcuacggcaagaccaagugcaccgccagcaacaagaacagaggcaucaucaagaccuucagcaacggcugcgacuacgugagcaacaagggcguggacaccgugagcgugggcaacacccuguacuacgugaacaagcaggagggcaagagccuguacgugaagggcgagcccaucaucaacuucuacgacccccugguguuccccagcgacgaguucgacgccagcaucagccaggugaacgagaagaucaaccagagccuggccuucaucagaaagagcgacgagcugcugcacaacgugaacgccggcaagagcaccaccaacaucaugaucaccaccaucaucaucgugaucaucgugauccugcugagccugaucgccgugggccugcugcuguacugcaaggccagaagcacccccgugacccugagcaaggaccagcugagcggcaucaacaacaucgccuucagcaacugaggacuaguguccaccugucccuccugggcugcuggauugucucguuuuccugccaaauaaacaggaucagcgcuuuacagaucuaaaaaaaaaaaaaaaaaaaaaaaaaaaaaaaaaaaaaaaaaaaaaaaaaaaaaaaaaaaaaaaaugcaucccccccccccccccccccccccccccccccaaaggcucuuuucagagccaccagaauu

SEQ ID NO: 1088 - RNA, 2006 nt, Artificial Sequence
  mRNA product Design e-3 comprising derived and/or modified sequence from HRSV(A2)__F0_DSCav1 (opt5)
gggagacuuucccauucuguagcagaauuugguguugccuguggucuuggucccgcggagaagcuuaccauggagcugcucauccugaaggccaacgcuauuaccacaauccuuacggccgugaccuucugcuuugcgagcggccagaauauuacagaagaguucuaccaauccaccuguucugcugucagcaaaggguaucuguccgcccucagaacaggaugguacaccucuguuaucacaauugaacugagcaacaucaaggagaauaaaugcaacggcaccgacgccaaggugaaacuuaucaagcaggaacuggauaaguauaaaaaugcugugacggagcuccagcugcugaugcaguccacccccgccacaaacaaucgggcucgcagagagcucccucgguuuaugaacuacacccugaauaacgccaagaaaacaaaugucacccuuucuaagaaacgcaagagacgguuccugggguuucuccugggagugggcagcgcgauugccuccgggguugcuguguguaagguccuucaccuggaaggagaggugaacaaaaucaagagcgcccuccugucuacgaauaaagcuguugugucccugagcaacggcgucucugugcucacauucaaggugcuggaccuuaaaaauuauauugauaagcaacugcucccgauccugaacaaacaguccugcagcauuucuaacaucgaaaccgucauugaguuucagcagaagaauaaccgccuucuggagaucacaagagaauuuuccguuaaugccggcgugaccacccccgugagcacauacaugcucacgaacuccgagcugcugucucucaucaaugacaugccuauuaccaacgaucaaaagaaacugaugagcaauaacguccagaucgugcggcagcaguccuauagcauuauguguaucauuaaggaagagguucuugcguacgugguccaacugccccucuacggggugaucgacacaccuugcuggaaacugcauaccucuccccuuuguacaaccaauacgaaggaaggauccaacaucugccugacacgcaccgauagaggcugguauugugacaaugccgggagcguuucuuucuucccucaggcugagaccugcaaagugcagagcaaccgggucuuuugugauacaaugaacucccucacccugccgucugaggugaaucugugcaaugucgacauuuucaaccccaaguacgauugcaagaucaugacaagcaaaacggacguguccagcucuguuauuaccucccucggagccaucgugagcuguuauggcaagacaaaaugcaccgcuucuaacaagaaucgcgggauuaucaaaacauuuuccaacggaugugauuacgucagcaauaagggcguggacaccguuuccgugggcaacacgcuguauuacgucaauaagcaagaagggaaaucucuuuaugugaagggagagccuaucauuaacuucuacgacccccugguguucccuagcgaugaauuugacgccuccaucucucagguuaaugagaaaauuaaccagagccucgccuucaucagaaaguccgaugaacugcugcacaaugucaacgcuggcaaaagcaccacaaauauuaugaucaccacaauuaucaucgugauuaucgugauucuucucucucugaucgcggucgggcugcuccuguacugcaaggcccgguccacccccgugacgcuuagcaaggaccagcugucuggaauuaacaauaucgcuuuuuccaacugaggacuaguguccaccugucccuccugggcugcuggauugucucguuuuccugccaaauaaacaggaucagcgcuuuacagaucuaaaaaaaaaaaaaaaaaaaaaaaaaaaaaaaaaaaaaaaaaaaaaaaaaaaaaaaaaaaaaaaaugcaucccccccccccccccccccccccccccccccaaaggcucuuuucagagccaccagaauu

SEQ ID NO: 1089 - RNA, 2006 nt, Artificial Sequence
  mRNA product Design e-3 comprising derived and/or modified sequence from HRSV(A2)__F0_DSCav1 (opt6)
gggagacuuucccauucuguagcagaauuugguguugccuguggucuuggucccgcggagaagcuuaccauggaauuauuaauccucaaagcgaacgcuauuacuaccauucuaacagcagucacauucugcuucgccucaggccaaaacauuacagaagaauuuuaccaaucaacaugcucugccguaucaaaaggcuaccuauccgcccuacgaacaggcugguacacaagcguaauaacaaucgaacuaucaaacauaaaagaaaacaaaugcaacgguacagacgccaaaguuaaacuaauaaaacaagaacucgauaaauacaaaaacgcaguaacagaauuacaacuacuaaugcaaucaacaccugcaacaaacaauagagccaggagagaauuaccucgauucaugaauuacacacucaauaacgcaaaaaaaaccaacguuacacuaucaaaaaaaagaaaacgacgauucuuaggauuccuacucggagucggaucagcaauagcaucuggcguugcaguaugcaaaguauuacacuuagaaggugaagucaauaaaauaaaaagcgcgcuacuaaguacaaacaaagcagucgucucccuaucaaacggagucucaguccuaacauucaaaguacucgaccuaaaaaauuacauagauaaacaacuacuuccaauauuaaacaaacaauccuguagcaucagcaauauagaaacaguaauagaauuucaacaaaaaaacaaccgauuauuagaaaucacucgagaauuuuccguaaacgccgggguaacaacuccagucucaaccuacaugcuaaccaauucagaacuauugagcuuaauaaacgacaugccaauaaccaacgaccaaaaaaaacuaaugucuaacaauguucaaaucgucagacaacaaaguuacaguauaauguguauaaucaaagaagaaguccuagcauacguaguccaacucccacuauauggaguuaucgacacaccauguuggaaauuacacaccucaccauuaugcacaaccaauacaaaagaaggaucaaacauaugccuuacacggacagaccgcggaugguauugugacaacgcuggcucagucuccuuuuucccacaagcagaaacaugcaaaguacaaucaaacagagucuuuugcgauaccaugaacucacuuacauuaccaagcgaaguaaaucuuuguaacgucgacaucuucaauccuaaauaugacugcaaaaucaugaccucaaaaacagacguuagcucuucaguaaucacuagcuuaggagcaaucguaucaugcuacggcaaaacaaaauguacagcaucaaauaaaaacagaggaaucauaaaaacauuuucaaacggaugcgauuauguaagcaacaaaggaguagauacuguaagcguaggaaacacauuguacuauguaaacaaacaagaaggaaaaucacucuauguaaaaggagaaccuauaaucaauuucuacgauccauuaguguucccaucagaugaauuugacgccucaauaucacaaguuaaugaaaaaauaaaucaaucgcuagcauucauacguaaaucagaugaauuacuacauaacguaaacgcaggcaaauccacaacaaauaucaugaucacaacaauuauaauaguaauaauaguaauacuacuaucacuaauagccguaggacuccuacuauacugcaaagcaagaucuacuccaguaacccucucaaaagaucaacuaagcggaauuaauaacaucgcauucagcaacuaaggacuaguguccaccugucccuccugggcugcuggauugucucguuuuccugccaaauaaacaggaucagcgcuuuacagaucuaaaaaaaaaaaaaaaaaaaaaaaaaaaaaaaaaaaaaaaaaaaaaaaaaaaaaaaaaaaaaaaaugcaucccccccccccccccccccccccccccccccaaaggcucuuuucagagccaccagaauu

SEQ ID NO: 1090 - RNA, 2006 nt, Artificial Sequence
  mRNA product Design e-3 comprising derived and/or modified sequence from HRSV(A2)__F0_DSCav1 (opt11)
gggagacuuucccauucuguagcagaauuugguguugccuguggucuuggucccgcggagaagcuuaccauggaacuacuuauccucaaagccaacgccaucaccaccauccucacagcaguaaccuuuugcuucgccucaggccaaaauaucacagaagaauuuuaccagaguaccugcuccgccguauccaaaggauaccucagcgcgcuccgcaccggcugguacacuucaguaaucacaaucgaacuauccaacaucaaagaaaacaaaugcaacggcaccgacgcgaaagucaaacucaucaaacaagaacuagacaaauacaaaaaugccguaacagaacuacaacuguuaaugcagagcacacccgccaccaacaaccgcgcccgccgggaacucccccgauucaugaacuacacacucaacaacgccaaaaagacgaacgucacccucagcaagaaacgaaaacgcagauuccucgguuuccuacuaggcguaggcucagcaauagccuccggaguagccgucugcaaaguccugcacuuagaaggcgaagucaacaaaaucaaauccgcccuacucuccacgaacaaagccgucgucucccuguccaacggugucuccguuuuaaccuucaaaguucuggaccucaaaaacuacauagacaaacagcuucuccccauccucaacaaacaauccuguagcaucuccaacaucgaaaccgucauagaauuucaacagaaaaacaacagacugcucgaaaucacccgcgaguucuccgucaacgccggcgucacgacucccgucuccaccuauaugcucacgaacucggaacuccuuucccuaaucaacgacaugccgaucaccaacgaccaaaagaaacucaugucaaacaacguacaaauuguccgccaacaaucauacuccaucaugugcauaauuaaagaagaaguccucgcauacguaguccaacucccccucuacggcgucaucgacacccccugcuggaaacuccacaccuccccacucugcacaaccaacaccaaagaaggcucaaacauaugccuaacgcgcaccgaucgcgguugguacugcgacaacgccgguuccgucagcuucuucccccaagcagagacaugcaaaguccaaucaaaccgcgucuucugcgacaccaugaacucacuaacccuuccaagcgaagucaaccucugcaacguugacaucuucaaccccaaauacgacuguaaaaucaugaccuccaagaccgacguauccucuuccgucaucacaucccuaggcgcuaucguauccugcuaugguaaaaccaaaugcaccgccuccaacaaaaaccgcggcaucaucaagacauuuuccaacggcugcgacuacgugagcaacaaaggcgucgacaccgucuccguaggcaacacccucuacuauguaaacaaacaagagggcaaaucacucuacgucaaaggggaacccaucaucaacuucuacgacccgcucguauuccccagcgaugaguucgacgccuccaucucccaggucaacgaaaagauaaaccaaucacucgcauucauucguaaauccgacgaacuccuacacaacgugaaugcaggcaaaucgaccacuaacaucaugaucaccaccaucaucaucgucaucauagucauccuccugucccuuaucgccgucggucuuuuauuauacugcaaagcccgcagcacccccgucacccucucuaaggaccaacucagcggcaucaauaacaucgcauucucuaacuaaggacuaguguccaccugucccuccugggcugcuggauugucucguuuuccugccaaauaaacaggaucagcgcuuuacagaucuaaaaaaaaaaaaaaaaaaaaaaaaaaaaaaaaaaaaaaaaaaaaaaaaaaaaaaaaaaaaaaaaugcaucccccccccccccccccccccccccccccccaaaggcucuuuucagagccaccagaauu

SEQ ID NO: 1091 - RNA, 2060 nt, Artificial Sequence
  mRNA product Design e-4 comprising derived and/or modified sequence from HRSV(A2)__F0_DSCav1 (opt1)
gggagacuccugucgggcggaaguaggaggaguagaguuuaaaaacaguacucuuuuuccgguucgggacguaguugaagcaacgacaagccggauaaccgcucuugagacaggaagcuuaccauggagcugcucauccugaaggccaacgccaucaccaccauccugacggcggugaccuucugcuucgccagcggccagaacaucaccgaggaguucuaccaguccacgugcagcgccgucuccaagggguaccucagcgcccugcggaccggcugguacaccuccgugaucaccaucgagcugagcaacaucaaggagaacaagugcaacgggaccgacgccaaggugaagcucaucaagcaggagcuggacaaguacaagaacgcggucacggagcugcagcuccugaugcaguccaccccggcaaccaacaaccgcgcccggcgcgagcugccccgguucaugaacuacacccucaacaacgccaagaagacgaacgugacccugagcaagaagcgcaagcggcgcuuccugggcuuccuccugggggugggcuccgccaucgcgagcggcgucgccgugugcaaggugcugcaccucgagggggaggucaacaagaucaagagcgcccugcuguccaccaacaaggccguggugagccucuccaacggcgucagcgugcugaccuucaaggugcuggaccucaagaacuacaucgacaagcagcugcugcccauccugaacaagcagagcugcuccaucagcaacaucgagacggugaucgaguuccagcagaagaacaaccggcuccuggagaucacccgcgaguucagcgugaacgccggggucaccacccccguguccacguacaugcugaccaacagcgagcuccugucccugaucaacgacaugccgaucaccaacgaccagaagaagcucaugagcaacaacgugcagaucguccggcagcaguccuacagcaucaugugcaucaucaaggaggaggugcuggcguacgugguccagcugccccucuacggcgugaucgacacccccugcuggaagcugcacacgagcccccugugcaccaccaacaccaaggagggguccaacaucugccucacgcgcaccgaccggggcugguacugcgacaacgccggcagcgucuccuucuucccgcaggccgagaccugcaaggugcagagcaaccgcguguucugcgacaccaugaacucccugacgcugcccagcgagguaaaccucugcaacgucgacaucuucaaccccaaguacgacugcaagaucaugaccuccaagaccgacgugagcuccagcgugaucaccucccugggggccaucgucagcugcuacggcaagacgaagugcaccgccagcaacaagaaccgggggaucaucaagaccuucuccaacggcugcgacuacgugagcaacaagggcguggacaccguguccgucgggaacacccuguacuacgugaacaagcaggagggcaagagccucuacgugaagggggagcccaucaucaacuucuacgacccgcuggucuuccccuccgacgaguucgacgcgagcaucucccaggugaacgagaagaucaaccagagccuggccuucauccgcaaguccgacgagcugcuccacaacgugaacgccggcaagagcacgaccaacaucaugaucaccaccaucaucaucgucaucaucgugauccugcugucccucaucgccguggggcugcugcucuacugcaaggcccggagcacgcccgucacccuguccaaggaccagcugagcggcaucaacaacaucgcguucuccaacugaggacuaguguccaccugucccuccugggcugcuggauugucucguuuuccugccaaauaaacaggaucagcgcuuuacagaucuaaaaaaaaaaaaaaaaaaaaaaaaaaaaaaaaaaaaaaaaaaaaaaaaaaaaaaaaaaaaaaaaugcaucccccccccccccccccccccccccccccccaaaggcucuuuucagagccaccagaauu

SEQ ID NO: 1092 - RNA, 2060 nt, Artificial Sequence
  mRNA product Design e-4 comprising derived and/or modified sequence from HRSV(A2)__F0_DSCav1 (opt1)
gggagacuccugucgggcggaaguaggaggaguagaguuuaaaaacaguacucuuuuuccgguucgggacguaguugaagcaacgacaagccggauaaccgcucuugagacaggaagcuuaccauggagcugcucauccugaaggccaacgccaucaccaccauccugacggcggugaccuucugcuucgccagcggccagaacaucaccgaggaguucuaccaguccacgugcagcgccgucuccaagggguaccucagcgcccugcgcaccggcugguacaccuccgugaucaccaucgagcugagcaacaucaaggagaacaagugcaacgggaccgacgccaaggugaagcucaucaagcaggagcuggacaaguacaagaacgcggucacggagcugcagcuccugaugcaguccacccccgccaccaacaaccgggcccgccgggagcugccgcgcuucaugaacuacacccucaacaacgccaagaagacgaacgugacccugagcaagaagcggaagcgccgguuccugggcuuccuccugggggugggcuccgcgaucgccagcggcgucgccgugugcaaggugcugcaccucgagggggaggucaacaagaucaaguccgcccugcugagcaccaacaaggccguggugucccucagcaacggcgucuccgugcugaccuucaaggugcuggaccucaagaacuacaucgacaagcagcugcugcccauccucaacaagcagagcugcuccaucagcaacaucgagacggucaucgaguuccagcagaagaacaaccgccugcuggagaucacccgggaguucuccgugaacgcgggggugaccacccccgucagcacguacaugcucaccaacagcgagcugcugucccucaucaacgacaugcccaucaccaacgaccagaagaagcugaugagcaacaacgugcagaucgugcgccagcaguccuacagcaucaugugcaucaucaaggaggagguccuggccuacguggugcagcucccgcuguacggcgucaucgacacccccugcuggaagcugcacacgagcccccucugcaccaccaacaccaaggaggggagcaacaucugccugacgcggaccgaccgcggcugguacugcgacaacgccggcuccgugagcuucuucccccaggccgagaccugcaagguccaguccaaccggguguucugcgacaccaugaacagccugacgcucccguccgaggugaaccugugcaacgucgacaucuucaaccccaaguacgacugcaagaucaugaccagcaagaccgacguguccagcuccgugaucaccagccugggggccaucgucuccugcuacggcaagacgaagugcaccgcgagcaacaagaaccgcgggaucaucaagaccuucuccaacggcugcgacuacgugagcaacaagggcguggacaccgucagcguggggaacacccucuacuacgugaacaagcaggagggcaagucccuguacgucaagggggagcccaucaucaacuucuacgacccccugguguucccgagcgacgaguucgacgccuccaucagccaggugaacgagaagaucaaccagucccucgccuucauccggaaguccgacgagcugcugcacaacgucaacgccggcaaguccacgaccaacaucaugaucaccaccaucaucaucgugaucaucgugauccugcucagccugaucgccgucgggcugcuccuguacugcaaggcgcgcuccacgcccgugacccugagcaaggaccagcucuccggcaucaacaacaucgccuucagcaacugaggacuaguguccaccugucccuccugggcugcuggauugucucguuuuccugccaaauaaacaggaucagcgcuuuacagaucuaaaaaaaaaaaaaaaaaaaaaaaaaaaaaaaaaaaaaaaaaaaaaaaaaaaaaaaaaaaaaaaaugcaucccccccccccccccccccccccccccccccaaaggcucuuuucagagccaccagaauu

SEQ ID NO: 1093 - RNA, 2060 nt, Artificial Sequence
  mRNA product Design e-4 comprising derived and/or modified sequence from HRSV(A2)__F0_DSCav1 (opt2)
gggagacuccugucgggcggaaguaggaggaguagaguuuaaaaacaguacucuuuuuccgguucgggacguaguugaagcaacgacaagccggauaaccgcucuugagacaggaagcuuaccauggagcuccucauccucaaggccaacgccaucaccaccauccucaccgccgucaccuucugcuucgccuccggccagaacaucaccgaggaguucuaccaguccaccugcuccgccgucuccaagggcuaccucuccgcccuccgcaccggcugguacaccuccgucaucaccaucgagcucuccaacaucaaggagaacaagugcaacggcaccgacgccaaggucaagcucaucaagcaggagcucgacaaguacaagaacgccgucaccgagcuccagcuccucaugcaguccacccccgccaccaacaaccgcgcccgccgcgagcucccccgcuucaugaacuacacccucaacaacgccaagaagaccaacgucacccucuccaagaagcgcaagcgccgcuuccucggcuuccuccucggcgucggcuccgccaucgccuccggcgucgccgucugcaagguccuccaccucgagggcgaggucaacaagaucaaguccgcccuccucuccaccaacaaggccgucgucucccucuccaacggcgucuccguccucaccuucaagguccucgaccucaagaacuacaucgacaagcagcuccuccccauccucaacaagcaguccugcuccaucuccaacaucgagaccgucaucgaguuccagcagaagaacaaccgccuccucgagaucacccgcgaguucuccgucaacgccggcgucaccacccccgucuccaccuacaugcucaccaacuccgagcuccucucccucaucaacgacaugcccaucaccaacgaccagaagaagcucauguccaacaacguccagaucguccgccagcaguccuacuccaucaugugcaucaucaaggaggagguccucgccuacgucguccagcucccccucuacggcgucaucgacacccccugcuggaagcuccacaccuccccccucugcaccaccaacaccaaggagggcuccaacaucugccucacccgcaccgaccgcggcugguacugcgacaacgccggcuccgucuccuucuucccccaggccgagaccugcaagguccaguccaaccgcgucuucugcgacaccaugaacucccucacccuccccuccgaggucaaccucugcaacgucgacaucuucaaccccaaguacgacugcaagaucaugaccuccaagaccgacgucuccuccuccgucaucaccucccucggcgccaucgucuccugcuacggcaagaccaagugcaccgccuccaacaagaaccgcggcaucaucaagaccuucuccaacggcugcgacuacgucuccaacaagggcgucgacaccgucuccgucggcaacacccucuacuacgucaacaagcaggagggcaagucccucuacgucaagggcgagcccaucaucaacuucuacgacccccucgucuuccccuccgacgaguucgacgccuccaucucccaggucaacgagaagaucaaccagucccucgccuucauccgcaaguccgacgagcuccuccacaacgucaacgccggcaaguccaccaccaacaucaugaucaccaccaucaucaucgucaucaucgucauccuccucucccucaucgccgucggccuccuccucuacugcaaggcccgcuccacccccgucacccucuccaaggaccagcucuccggcaucaacaacaucgccuucuccaacugaggacuaguguccaccugucccuccugggcugcuggauugucucguuuuccugccaaauaaacaggaucagcgcuuuacagaucuaaaaaaaaaaaaaaaaaaaaaaaaaaaaaaaaaaaaaaaaaaaaaaaaaaaaaaaaaaaaaaaaugcaucccccccccccccccccccccccccccccccaaaggcucuuuucagagccaccagaauu

SEQ ID NO: 1094 - RNA, 2060 nt, Artificial Sequence
  mRNA product Design e-4 comprising derived and/or modified sequence from HRSV(A2)__F0_DSCav1 (opt3)
gggagacuccugucgggcggaaguaggaggaguagaguuuaaaaacaguacucuuuuuccgguucgggacguaguugaagcaacgacaagccggauaaccgcucuugagacaggaagcuuaccauggagcugcucauccuuaaggccaacgcuauuaccacaauacugacugcagugacguucugcuuugccagcggccagaauaucaccgaagaguucuaccaauccacauguucugcggucucaaaaggguauuugagugcuuuaagaacuggaugguacaccagcguuauuacaaucgaacuguccaacauuaaggagaauaaaugcaacgguaccgacgccaaggugaaacuaaucaagcaggaacucgauaaguauaaaaaugcaguaacugagcugcagcuucugaugcagucuacacccgccaccaacaauagggcucggcgcgaguugccucgauuuaugaacuacacgcucaauaacgcaaagaaaacuaaugugacccugucgaagaaacguaagagaagguuccugggcuuucucuuaggggucggaucagccauagcuagcggcguggccguuuguaaggugcugcaccuugaaggugaggucaacaaaaucaagagugcguugcuguccacaaauaaagcagugguaucucuaagcaacgggguuuccgugcucacuuucaagguccuggaccuuaaaaauuauauugauaagcaacuguugccaauccucaacaaacagucaugcaguauuagcaacaucgaaaccgugauagaguuucagcagaagaauaaccggcuguuagagauuacacgcgaguucucugugaaugccggagucaccacgccgguuuccacuuacaugcugacaaacucagaacuccuuagccugaucaaugacaugcccauuaccaacgaucaaaagaaauugaugaguaauaacgugcagaucguaagacagcagucuuauuccaucauguguauuauaaaggaagaggugcuagcuuacgucgugcaacugccucucuacggcguuaucgacacuccaugcuggaaacugcauacaagcccccuuuguaccacgaauaccaaggaaggcucgaacauuugccugacaaggacugaucgggggugguauugugacaaugccggaucuguguccuuuuucccucaggcagagaccugcaaaguccagucaaaccgcguguuuugugauacaaugaauaguuugacucucccaagcgagguaaaccugugcaauguugacaucuucaaccccaaguacgauugcaagauaaugaccuccaaaacagacgugucuagcucagucauuaccaguuuaggugcuaucguguccuguuauggcaagacuaaaugcacggccagcaacaagaaucgagggaucauuaaaacauuuucuaacggaugugauuacgucucaaauaagggcguggacaccguuaguguggguaacacucuguauuacguaaauaagcaagaagggaaaagccuauaugucaagggagagccuaucauuaacuucuacgacccacucguguucccguccgaugaauuugacgcgucuauaucgcagguuaaugagaaaaucaaccagagccuggccuucauuagaaaguccgaugaacuuuugcacaaugugaacgcaggcaaaucaaccacaaauaucaugaucaccacuauuauaaucgucauuaucgugauucugcucagucugaucgcuguaggccuucuguuguacugcaaggccaggucuacacccgugacgcucagcaaggaccagcuguccgggauaaacaauaucgcuuuuucaaacugaggacuaguguccaccugucccuccugggcugcuggauugucucguuuuccugccaaauaaacaggaucagcgcuuuacagaucuaaaaaaaaaaaaaaaaaaaaaaaaaaaaaaaaaaaaaaaaaaaaaaaaaaaaaaaaaaaaaaaaugcaucccccccccccccccccccccccccccccccaaaggcucuuuucagagccaccagaauu

SEQ ID NO: 1095 - RNA, 2060 nt, Artificial Sequence
  mRNA product Design e-4 comprising derived and/or modified sequence from HRSV(A2)__F0_DSCav1 (opt4)
gggagacuccugucgggcggaaguaggaggaguagaguuuaaaaacaguacucuuuuuccgguucgggacguaguugaagcaacgacaagccggauaaccgcucuugagacaggaagcuuaccauggagcugcugauccugaaggccaacgccaucaccaccauccugaccgccgugaccuucugcuucgccagcggccagaacaucaccgaggaguucuaccagagcaccugcagcgccgugagcaagggcuaccugagcgcccugagaaccggcugguacaccagcgugaucaccaucgagcugagcaacaucaaggagaacaagugcaacggcaccgacgccaaggugaagcugaucaagcaggagcuggacaaguacaagaacgccgugaccgagcugcagcugcugaugcagagcacccccgccaccaacaacagagccagaagagagcugcccagauucaugaacuacacccugaacaacgccaagaagaccaacgugacccugagcaagaagagaaagagaagauuccugggcuuccugcugggcgugggcagcgccaucgccagcggcguggccgugugcaaggugcugcaccuggagggcgaggugaacaagaucaagagcgcccugcugagcaccaacaaggccguggugagccugagcaacggcgugagcgugcugaccuucaaggugcuggaccugaagaacuacaucgacaagcagcugcugcccauccugaacaagcagagcugcagcaucagcaacaucgagaccgugaucgaguuccagcagaagaacaacagacugcuggagaucaccagagaguucagcgugaacgccggcgugaccacccccgugagcaccuacaugcugaccaacagcgagcugcugagccugaucaacgacaugcccaucaccaacgaccagaagaagcugaugagcaacaacgugcagaucgugagacagcagagcuacagcaucaugugcaucaucaaggaggaggugcuggccuacguggugcagcugccccuguacggcgugaucgacacccccugcuggaagcugcacaccagcccccugugcaccaccaacaccaaggagggcagcaacaucugccugaccagaaccgacagaggcugguacugcgacaacgccggcagcgugagcuucuucccccaggccgagaccugcaaggugcagagcaacagaguguucugcgacaccaugaacagccugacccugcccagcgaggugaaccugugcaacguggacaucuucaaccccaaguacgacugcaagaucaugaccagcaagaccgacgugagcagcagcgugaucaccagccugggcgccaucgugagcugcuacggcaagaccaagugcaccgccagcaacaagaacagaggcaucaucaagaccuucagcaacggcugcgacuacgugagcaacaagggcguggacaccgugagcgugggcaacacccuguacuacgugaacaagcaggagggcaagagccuguacgugaagggcgagcccaucaucaacuucuacgacccccugguguuccccagcgacgaguucgacgccagcaucagccaggugaacgagaagaucaaccagagccuggccuucaucagaaagagcgacgagcugcugcacaacgugaacgccggcaagagcaccaccaacaucaugaucaccaccaucaucaucgugaucaucgugauccugcugagccugaucgccgugggccugcugcuguacugcaaggccagaagcacccccgugacccugagcaaggaccagcugagcggcaucaacaacaucgccuucagcaacugaggacuaguguccaccugucccuccugggcugcuggauugucucguuuuccugccaaauaaacaggaucagcgcuuuacagaucuaaaaaaaaaaaaaaaaaaaaaaaaaaaaaaaaaaaaaaaaaaaaaaaaaaaaaaaaaaaaaaaaugcaucccccccccccccccccccccccccccccccaaaggcucuuuucagagccaccagaauu

SEQ ID NO: 1096 - RNA, 2060 nt, Artificial Sequence
  mRNA product Design e-4 comprising derived and/or modified sequence from HRSV(A2)__F0_DSCav1 (opt5)
gggagacuccugucgggcggaaguaggaggaguagaguuuaaaaacaguacucuuuuuccgguucgggacguaguugaagcaacgacaagccggauaaccgcucuugagacaggaagcuuaccauggagcugcucauccugaaggccaacgcuauuaccacaauccuuacggccgugaccuucugcuuugcgagcggccagaauauuacagaagaguucuaccaauccaccuguucugcugucagcaaaggguaucuguccgcccucagaacaggaugguacaccucuguuaucacaauugaacugagcaacaucaaggagaauaaaugcaacggcaccgacgccaaggugaaacuuaucaagcaggaacuggauaaguauaaaaaugcugugacggagcuccagcugcugaugcaguccacccccgccacaaacaaucgggcucgcagagagcucccucgguuuaugaacuacacccugaauaacgccaagaaaacaaaugucacccuuucuaagaaacgcaagagacgguuccugggguuucuccugggagugggcagcgcgauugccuccgggguugcuguguguaagguccuucaccuggaaggagaggugaacaaaaucaagagcgcccuccugucuacgaauaaagcuguugugucccugagcaacggcgucucugugcucacauucaaggugcuggaccuuaaaaauuauauugauaagcaacugcucccgauccugaacaaacaguccugcagcauuucuaacaucgaaaccgucauugaguuucagcagaagaauaaccgccuucuggagaucacaagagaauuuuccguuaaugccggcgugaccacccccgugagcacauacaugcucacgaacuccgagcugcugucucucaucaaugacaugccuauuaccaacgaucaaaagaaacugaugagcaauaacguccagaucgugcggcagcaguccuauagcauuauguguaucauuaaggaagagguucuugcguacgugguccaacugccccucuacggggugaucgacacaccuugcuggaaacugcauaccucuccccuuuguacaaccaauacgaaggaaggauccaacaucugccugacacgcaccgauagaggcugguauugugacaaugccgggagcguuucuuucuucccucaggcugagaccugcaaagugcagagcaaccgggucuuuugugauacaaugaacucccucacccugccgucugaggugaaucugugcaaugucgacauuuucaaccccaaguacgauugcaagaucaugacaagcaaaacggacguguccagcucuguuauuaccucccucggagccaucgugagcuguuauggcaagacaaaaugcaccgcuucuaacaagaaucgcgggauuaucaaaacauuuuccaacggaugugauuacgucagcaauaagggcguggacaccguuuccgugggcaacacgcuguauuacgucaauaagcaagaagggaaaucucuuuaugugaagggagagccuaucauuaacuucuacgacccccugguguucccuagcgaugaauuugacgccuccaucucucagguuaaugagaaaauuaaccagagccucgccuucaucagaaaguccgaugaacugcugcacaaugucaacgcuggcaaaagcaccacaaauauuaugaucaccacaauuaucaucgugauuaucgugauucuucucucucugaucgcggucgggcugcuccuguacugcaaggcccgguccacccccgugacgcuuagcaaggaccagcugucuggaauuaacaauaucgcuuuuuccaacugaggacuaguguccaccugucccuccugggcugcuggauugucucguuuuccugccaaauaaacaggaucagcgcuuuacagaucuaaaaaaaaaaaaaaaaaaaaaaaaaaaaaaaaaaaaaaaaaaaaaaaaaaaaaaaaaaaaaaaaugcaucccccccccccccccccccccccccccccccaaaggcucuuuucagagccaccagaauu

SEQ ID NO: 1097 - RNA, 2060 nt, Artificial Sequence
  mRNA product Design e-4 comprising derived and/or modified sequence from HRSV(A2)__F0_DSCav1 (opt6)
gggagacuccugucgggcggaaguaggaggaguagaguuuaaaaacaguacucuuuuuccgguucgggacguaguugaagcaacgacaagccggauaaccgcucuugagacaggaagcuuaccauggaauuauuaauccucaaagcgaacgcuauuacuaccauucuaacagcagucacauucugcuucgccucaggccaaaacauuacagaagaauuuuaccaaucaacaugcucugccguaucaaaaggcuaccuauccgcccuacgaacaggcugguacacaagcguaauaacaaucgaacuaucaaacauaaaagaaaacaaaugcaacgguacagacgccaaaguuaaacuaauaaaacaagaacucgauaaauacaaaaacgcaguaacagaauuacaacuacuaaugcaaucaacaccugcaacaaacaauagagccaggagagaauuaccucgauucaugaauuacacacucaauaacgcaaaaaaaaccaacguuacacuaucaaaaaaaagaaaacgacgauucuuaggauuccuacucggagucggaucagcaauagcaucuggcguugcaguaugcaaaguauuacacuuagaaggugaagucaauaaaauaaaaagcgcgcuacuaaguacaaacaaagcagucgucucccuaucaaacggagucucaguccuaacauucaaaguacucgaccuaaaaaauuacauagauaaacaacuacuuccaauauuaaacaaacaauccuguagcaucagcaauauagaaacaguaauagaauuucaacaaaaaaacaaccgauuauuagaaaucacucgagaauuuuccguaaacgccgggguaacaacuccagucucaaccuacaugcuaaccaauucagaacuauugagcuuaauaaacgacaugccaauaaccaacgaccaaaaaaaacuaaugucuaacaauguucaaaucgucagacaacaaaguuacaguauaauguguauaaucaaagaagaaguccuagcauacguaguccaacucccacuauauggaguuaucgacacaccauguuggaaauuacacaccucaccauuaugcacaaccaauacaaaagaaggaucaaacauaugccuuacacggacagaccgcggaugguauugugacaacgcuggcucagucuccuuuuucccacaagcagaaacaugcaaaguacaaucaaacagagucuuuugcgauaccaugaacucacuuacauuaccaagcgaaguaaaucuuuguaacgucgacaucuucaauccuaaauaugacugcaaaaucaugaccucaaaaacagacguuagcucuucaguaaucacuagcuuaggagcaaucguaucaugcuacggcaaaacaaaauguacagcaucaaauaaaaacagaggaaucauaaaaacauuuucaaacggaugcgauuauguaagcaacaaaggaguagauacuguaagcguaggaaacacauuguacuauguaaacaaacaagaaggaaaaucacucuauguaaaaggagaaccuauaaucaauuucuacgauccauuaguguucccaucagaugaauuugacgccucaauaucacaaguuaaugaaaaaauaaaucaaucgcuagcauucauacguaaaucagaugaauuacuacauaacguaaacgcaggcaaauccacaacaaauaucaugaucacaacaauuauaauaguaauaauaguaauacuacuaucacuaauagccguaggacuccuacuauacugcaaagcaagaucuacuccaguaacccucucaaaagaucaacuaagcggaauuaauaacaucgcauucagcaacuaaggacuaguguccaccugucccuccugggcugcuggauugucucguuuuccugccaaauaaacaggaucagcgcuuuacagaucuaaaaaaaaaaaaaaaaaaaaaaaaaaaaaaaaaaaaaaaaaaaaaaaaaaaaaaaaaaaaaaaaugcaucccccccccccccccccccccccccccccccaaaggcucuuuucagagccaccagaauu

SEQ ID NO: 1098 - RNA, 2060 nt, Artificial Sequence
  mRNA product Design e-4 comprising derived and/or modified sequence from HRSV(A2)__F0_DSCav1 (opt11)
gggagacuccugucgggcggaaguaggaggaguagaguuuaaaaacaguacucuuuuuccgguucgggacguaguugaagcaacgacaagccggauaaccgcucuugagacaggaagcuuaccauggaacuacuuauccucaaagccaacgccaucaccaccauccucacagcaguaaccuuuugcuucgccucaggccaaaauaucacagaagaauuuuaccagaguaccugcuccgccguauccaaaggauaccucagcgcgcuccgcaccggcugguacacuucaguaaucacaaucgaacuauccaacaucaaagaaaacaaaugcaacggcaccgacgcgaaagucaaacucaucaaacaagaacuagacaaauacaaaaaugccguaacagaacuacaacuguuaaugcagagcacacccgccaccaacaaccgcgcccgccgggaacucccccgauucaugaacuacacacucaacaacgccaaaaagacgaacgucacccucagcaagaaacgaaaacgcagauuccucgguuuccuacuaggcguaggcucagcaauagccuccggaguagccgucugcaaaguccugcacuuagaaggcgaagucaacaaaaucaaauccgcccuacucuccacgaacaaagccgucgucucccuguccaacggugucuccguuuuaaccuucaaaguucuggaccucaaaaacuacauagacaaacagcuucuccccauccucaacaaacaauccuguagcaucuccaacaucgaaaccgucauagaauuucaacagaaaaacaacagacugcucgaaaucacccgcgaguucuccgucaacgccggcgucacgacucccgucuccaccuauaugcucacgaacucggaacuccuuucccuaaucaacgacaugccgaucaccaacgaccaaaagaaacucaugucaaacaacguacaaauuguccgccaacaaucauacuccaucaugugcauaauuaaagaagaaguccucgcauacguaguccaacucccccucuacggcgucaucgacacccccugcuggaaacuccacaccuccccacucugcacaaccaacaccaaagaaggcucaaacauaugccuaacgcgcaccgaucgcgguugguacugcgacaacgccgguuccgucagcuucuucccccaagcagagacaugcaaaguccaaucaaaccgcgucuucugcgacaccaugaacucacuaacccuuccaagcgaagucaaccucugcaacguugacaucuucaaccccaaauacgacuguaaaaucaugaccuccaagaccgacguauccucuuccgucaucacaucccuaggcgcuaucguauccugcuaugguaaaaccaaaugcaccgccuccaacaaaaaccgcggcaucaucaagacauuuuccaacggcugcgacuacgugagcaacaaaggcgucgacaccgucuccguaggcaacacccucuacuauguaaacaaacaagagggcaaaucacucuacgucaaaggggaacccaucaucaacuucuacgacccgcucguauuccccagcgaugaguucgacgccuccaucucccaggucaacgaaaagauaaaccaaucacucgcauucauucguaaauccgacgaacuccuacacaacgugaaugcaggcaaaucgaccacuaacaucaugaucaccaccaucaucaucgucaucauagucauccuccugucccuuaucgccgucggucuuuuauuauacugcaaagcccgcagcacccccgucacccucucuaaggaccaacucagcggcaucaauaacaucgcauucucuaacuaaggacuaguguccaccugucccuccugggcugcuggauugucucguuuuccugccaaauaaacaggaucagcgcuuuacagaucuaaaaaaaaaaaaaaaaaaaaaaaaaaaaaaaaaaaaaaaaaaaaaaaaaaaaaaaaaaaaaaaaugcaucccccccccccccccccccccccccccccccaaaggcucuuuucagagccaccagaauu

SEQ ID NO: 1099 - RNA, 2027 nt, Artificial Sequence
  mRNA product Design e-5 comprising derived and/or modified sequence from HRSV(A2)__F0_DSCav1 (opt1)
gggagagcggcucggccauuuugucccagucaguccggaggcugcggcugcagaaguaccgccugcggaguaacugcaaagaagcuuaccauggagcugcucauccugaaggccaacgccaucaccaccauccugacggcggugaccuucugcuucgccagcggccagaacaucaccgaggaguucuaccaguccacgugcagcgccgucuccaagggguaccucagcgcccugcggaccggcugguacaccuccgugaucaccaucgagcugagcaacaucaaggagaacaagugcaacgggaccgacgccaaggugaagcucaucaagcaggagcuggacaaguacaagaacgcggucacggagcugcagcuccugaugcaguccaccccggcaaccaacaaccgcgcccggcgcgagcugccccgguucaugaacuacacccucaacaacgccaagaagacgaacgugacccugagcaagaagcgcaagcggcgcuuccugggcuuccuccugggggugggcuccgccaucgcgagcggcgucgccgugugcaaggugcugcaccucgagggggaggucaacaagaucaagagcgcccugcuguccaccaacaaggccguggugagccucuccaacggcgucagcgugcugaccuucaaggugcuggaccucaagaacuacaucgacaagcagcugcugcccauccugaacaagcagagcugcuccaucagcaacaucgagacggugaucgaguuccagcagaagaacaaccggcuccuggagaucacccgcgaguucagcgugaacgccggggucaccacccccguguccacguacaugcugaccaacagcgagcuccugucccugaucaacgacaugccgaucaccaacgaccagaagaagcucaugagcaacaacgugcagaucguccggcagcaguccuacagcaucaugugcaucaucaaggaggaggugcuggcguacgugguccagcugccccucuacggcgugaucgacacccccugcuggaagcugcacacgagcccccugugcaccaccaacaccaaggagggguccaacaucugccucacgcgcaccgaccggggcugguacugcgacaacgccggcagcgucuccuucuucccgcaggccgagaccugcaaggugcagagcaaccgcguguucugcgacaccaugaacucccugacgcugcccagcgagguaaaccucugcaacgucgacaucuucaaccccaaguacgacugcaagaucaugaccuccaagaccgacgugagcuccagcgugaucaccucccugggggccaucgucagcugcuacggcaagacgaagugcaccgccagcaacaagaaccgggggaucaucaagaccuucuccaacggcugcgacuacgugagcaacaagggcguggacaccguguccgucgggaacacccuguacuacgugaacaagcaggagggcaagagccucuacgugaagggggagcccaucaucaacuucuacgacccgcuggucuuccccuccgacgaguucgacgcgagcaucucccaggugaacgagaagaucaaccagagccuggccuucauccgcaaguccgacgagcugcuccacaacgugaacgccggcaagagcacgaccaacaucaugaucaccaccaucaucaucgucaucaucgugauccugcugucccucaucgccguggggcugcugcucuacugcaaggcccggagcacgcccgucacccuguccaaggaccagcugagcggcaucaacaacaucgcguucuccaacugaggacuaguguccaccugucccuccugggcugcuggauugucucguuuuccugccaaauaaacaggaucagcgcuuuacagaucuaaaaaaaaaaaaaaaaaaaaaaaaaaaaaaaaaaaaaaaaaaaaaaaaaaaaaaaaaaaaaaaaugcaucccccccccccccccccccccccccccccccaaaggcucuuuucagagccaccagaauu

SEQ ID NO: 1100 - RNA, 2027 nt, Artificial Sequence
  mRNA product Design e-5 comprising derived and/or modified sequence from HRSV(A2)__F0_DSCav1 (opt1)
gggagagcggcucggccauuuugucccagucaguccggaggcugcggcugcagaaguaccgccugcggaguaacugcaaagaagcuuaccauggagcugcucauccugaaggccaacgccaucaccaccauccugacggcggugaccuucugcuucgccagcggccagaacaucaccgaggaguucuaccaguccacgugcagcgccgucuccaagggguaccucagcgcccugcgcaccggcugguacaccuccgugaucaccaucgagcugagcaacaucaaggagaacaagugcaacgggaccgacgccaaggugaagcucaucaagcaggagcuggacaaguacaagaacgcggucacggagcugcagcuccugaugcaguccacccccgccaccaacaaccgggcccgccgggagcugccgcgcuucaugaacuacacccucaacaacgccaagaagacgaacgugacccugagcaagaagcggaagcgccgguuccugggcuuccuccugggggugggcuccgcgaucgccagcggcgucgccgugugcaaggugcugcaccucgagggggaggucaacaagaucaaguccgcccugcugagcaccaacaaggccguggugucccucagcaacggcgucuccgugcugaccuucaaggugcuggaccucaagaacuacaucgacaagcagcugcugcccauccucaacaagcagagcugcuccaucagcaacaucgagacggucaucgaguuccagcagaagaacaaccgccugcuggagaucacccgggaguucuccgugaacgcgggggugaccacccccgucagcacguacaugcucaccaacagcgagcugcugucccucaucaacgacaugcccaucaccaacgaccagaagaagcugaugagcaacaacgugcagaucgugcgccagcaguccuacagcaucaugugcaucaucaaggaggagguccuggccuacguggugcagcucccgcuguacggcgucaucgacacccccugcuggaagcugcacacgagcccccucugcaccaccaacaccaaggaggggagcaacaucugccugacgcggaccgaccgcggcugguacugcgacaacgccggcuccgugagcuucuucccccaggccgagaccugcaagguccaguccaaccggguguucugcgacaccaugaacagccugacgcucccguccgaggugaaccugugcaacgucgacaucuucaaccccaaguacgacugcaagaucaugaccagcaagaccgacguguccagcuccgugaucaccagccugggggccaucgucuccugcuacggcaagacgaagugcaccgcgagcaacaagaaccgcgggaucaucaagaccuucuccaacggcugcgacuacgugagcaacaagggcguggacaccgucagcguggggaacacccucuacuacgugaacaagcaggagggcaagucccuguacgucaagggggagcccaucaucaacuucuacgacccccugguguucccgagcgacgaguucgacgccuccaucagccaggugaacgagaagaucaaccagucccucgccuucauccggaaguccgacgagcugcugcacaacgucaacgccggcaaguccacgaccaacaucaugaucaccaccaucaucaucgugaucaucgugauccugcucagccugaucgccgucgggcugcuccuguacugcaaggcgcgcuccacgcccgugacccugagcaaggaccagcucuccggcaucaacaacaucgccuucagcaacugaggacuaguguccaccugucccuccugggcugcuggauugucucguuuuccugccaaauaaacaggaucagcgcuuuacagaucuaaaaaaaaaaaaaaaaaaaaaaaaaaaaaaaaaaaaaaaaaaaaaaaaaaaaaaaaaaaaaaaaugcaucccccccccccccccccccccccccccccccaaaggcucuuuucagagccaccagaauu

SEQ ID NO: 1101 - RNA, 2027 nt, Artificial Sequence
  mRNA product Design e-5 comprising derived and/or modified sequence from HRSV(A2)__F0_DSCav1 (opt2)
gggagagcggcucggccauuuugucccagucaguccggaggcugcggcugcagaaguaccgccugcggaguaacugcaaagaagcuuaccauggagcuccucauccucaaggccaacgccaucaccaccauccucaccgccgucaccuucugcuucgccuccggccagaacaucaccgaggaguucuaccaguccaccugcuccgccgucuccaagggcuaccucuccgcccuccgcaccggcugguacaccuccgucaucaccaucgagcucuccaacaucaaggagaacaagugcaacggcaccgacgccaaggucaagcucaucaagcaggagcucgacaaguacaagaacgccgucaccgagcuccagcuccucaugcaguccacccccgccaccaacaaccgcgcccgccgcgagcucccccgcuucaugaacuacacccucaacaacgccaagaagaccaacgucacccucuccaagaagcgcaagcgccgcuuccucggcuuccuccucggcgucggcuccgccaucgccuccggcgucgccgucugcaagguccuccaccucgagggcgaggucaacaagaucaaguccgcccuccucuccaccaacaaggccgucgucucccucuccaacggcgucuccguccucaccuucaagguccucgaccucaagaacuacaucgacaagcagcuccuccccauccucaacaagcaguccugcuccaucuccaacaucgagaccgucaucgaguuccagcagaagaacaaccgccuccucgagaucacccgcgaguucuccgucaacgccggcgucaccacccccgucuccaccuacaugcucaccaacuccgagcuccucucccucaucaacgacaugcccaucaccaacgaccagaagaagcucauguccaacaacguccagaucguccgccagcaguccuacuccaucaugugcaucaucaaggaggagguccucgccuacgucguccagcucccccucuacggcgucaucgacacccccugcuggaagcuccacaccuccccccucugcaccaccaacaccaaggagggcuccaacaucugccucacccgcaccgaccgcggcugguacugcgacaacgccggcuccgucuccuucuucccccaggccgagaccugcaagguccaguccaaccgcgucuucugcgacaccaugaacucccucacccuccccuccgaggucaaccucugcaacgucgacaucuucaaccccaaguacgacugcaagaucaugaccuccaagaccgacgucuccuccuccgucaucaccucccucggcgccaucgucuccugcuacggcaagaccaagugcaccgccuccaacaagaaccgcggcaucaucaagaccuucuccaacggcugcgacuacgucuccaacaagggcgucgacaccgucuccgucggcaacacccucuacuacgucaacaagcaggagggcaagucccucuacgucaagggcgagcccaucaucaacuucuacgacccccucgucuuccccuccgacgaguucgacgccuccaucucccaggucaacgagaagaucaaccagucccucgccuucauccgcaaguccgacgagcuccuccacaacgucaacgccggcaaguccaccaccaacaucaugaucaccaccaucaucaucgucaucaucgucauccuccucucccucaucgccgucggccuccuccucuacugcaaggcccgcuccacccccgucacccucuccaaggaccagcucuccggcaucaacaacaucgccuucuccaacugaggacuaguguccaccugucccuccugggcugcuggauugucucguuuuccugccaaauaaacaggaucagcgcuuuacagaucuaaaaaaaaaaaaaaaaaaaaaaaaaaaaaaaaaaaaaaaaaaaaaaaaaaaaaaaaaaaaaaaaugcaucccccccccccccccccccccccccccccccaaaggcucuuuucagagccaccagaauu

SEQ ID NO: 1102 - RNA, 2027 nt, Artificial Sequence
  mRNA product Design e-5 comprising derived and/or modified sequence from HRSV(A2)__F0_DSCav1 (opt3)
gggagagcggcucggccauuuugucccagucaguccggaggcugcggcugcagaaguaccgccugcggaguaacugcaaagaagcuuaccauggagcugcucauccuuaaggccaacgcuauuaccacaauacugacugcagugacguucugcuuugccagcggccagaauaucaccgaagaguucuaccaauccacauguucugcggucucaaaaggguauuugagugcuuuaagaacuggaugguacaccagcguuauuacaaucgaacuguccaacauuaaggagaauaaaugcaacgguaccgacgccaaggugaaacuaaucaagcaggaacucgauaaguauaaaaaugcaguaacugagcugcagcuucugaugcagucuacacccgccaccaacaauagggcucggcgcgaguugccucgauuuaugaacuacacgcucaauaacgcaaagaaaacuaaugugacccugucgaagaaacguaagagaagguuccugggcuuucucuuaggggucggaucagccauagcuagcggcguggccguuuguaaggugcugcaccuugaaggugaggucaacaaaaucaagagugcguugcuguccacaaauaaagcagugguaucucuaagcaacgggguuuccgugcucacuuucaagguccuggaccuuaaaaauuauauugauaagcaacuguugccaauccucaacaaacagucaugcaguauuagcaacaucgaaaccgugauagaguuucagcagaagaauaaccggcuguuagagauuacacgcgaguucucugugaaugccggagucaccacgccgguuuccacuuacaugcugacaaacucagaacuccuuagccugaucaaugacaugcccauuaccaacgaucaaaagaaauugaugaguaauaacgugcagaucguaagacagcagucuuauuccaucauguguauuauaaaggaagaggugcuagcuuacgucgugcaacugccucucuacggcguuaucgacacuccaugcuggaaacugcauacaagcccccuuuguaccacgaauaccaaggaaggcucgaacauuugccugacaaggacugaucgggggugguauugugacaaugccggaucuguguccuuuuucccucaggcagagaccugcaaaguccagucaaaccgcguguuuugugauacaaugaauaguuugacucucccaagcgagguaaaccugugcaauguugacaucuucaaccccaaguacgauugcaagauaaugaccuccaaaacagacgugucuagcucagucauuaccaguuuaggugcuaucguguccuguuauggcaagacuaaaugcacggccagcaacaagaaucgagggaucauuaaaacauuuucuaacggaugugauuacgucucaaauaagggcguggacaccguuaguguggguaacacucuguauuacguaaauaagcaagaagggaaaagccuauaugucaagggagagccuaucauuaacuucuacgacccacucguguucccguccgaugaauuugacgcgucuauaucgcagguuaaugagaaaaucaaccagagccuggccuucauuagaaaguccgaugaacuuuugcacaaugugaacgcaggcaaaucaaccacaaauaucaugaucaccacuauuauaaucgucauuaucgugauucugcucagucugaucgcuguaggccuucuguuguacugcaaggccaggucuacacccgugacgcucagcaaggaccagcuguccgggauaaacaauaucgcuuuuucaaacugaggacuaguguccaccugucccuccugggcugcuggauugucucguuuuccugccaaauaaacaggaucagcgcuuuacagaucuaaaaaaaaaaaaaaaaaaaaaaaaaaaaaaaaaaaaaaaaaaaaaaaaaaaaaaaaaaaaaaaaugcaucccccccccccccccccccccccccccccccaaaggcucuuuucagagccaccagaauu

SEQ ID NO: 1103 - RNA, 2027 nt, Artificial Sequence
  mRNA product Design e-5 comprising derived and/or modified sequence from HRSV(A2)__F0_DSCav1 (opt4)
gggagagcggcucggccauuuugucccagucaguccggaggcugcggcugcagaaguaccgccugcggaguaacugcaaagaagcuuaccauggagcugcugauccugaaggccaacgccaucaccaccauccugaccgccgugaccuucugcuucgccagcggccagaacaucaccgaggaguucuaccagagcaccugcagcgccgugagcaagggcuaccugagcgcccugagaaccggcugguacaccagcgugaucaccaucgagcugagcaacaucaaggagaacaagugcaacggcaccgacgccaaggugaagcugaucaagcaggagcuggacaaguacaagaacgccgugaccgagcugcagcugcugaugcagagcacccccgccaccaacaacagagccagaagagagcugcccagauucaugaacuacacccugaacaacgccaagaagaccaacgugacccugagcaagaagagaaagagaagauuccugggcuuccugcugggcgugggcagcgccaucgccagcggcguggccgugugcaaggugcugcaccuggagggcgaggugaacaagaucaagagcgcccugcugagcaccaacaaggccguggugagccugagcaacggcgugagcgugcugaccuucaaggugcuggaccugaagaacuacaucgacaagcagcugcugcccauccugaacaagcagagcugcagcaucagcaacaucgagaccgugaucgaguuccagcagaagaacaacagacugcuggagaucaccagagaguucagcgugaacgccggcgugaccacccccgugagcaccuacaugcugaccaacagcgagcugcugagccugaucaacgacaugcccaucaccaacgaccagaagaagcugaugagcaacaacgugcagaucgugagacagcagagcuacagcaucaugugcaucaucaaggaggaggugcuggccuacguggugcagcugccccuguacggcgugaucgacacccccugcuggaagcugcacaccagcccccugugcaccaccaacaccaaggagggcagcaacaucugccugaccagaaccgacagaggcugguacugcgacaacgccggcagcgugagcuucuucccccaggccgagaccugcaaggugcagagcaacagaguguucugcgacaccaugaacagccugacccugcccagcgaggugaaccugugcaacguggacaucuucaaccccaaguacgacugcaagaucaugaccagcaagaccgacgugagcagcagcgugaucaccagccugggcgccaucgugagcugcuacggcaagaccaagugcaccgccagcaacaagaacagaggcaucaucaagaccuucagcaacggcugcgacuacgugagcaacaagggcguggacaccgugagcgugggcaacacccuguacuacgugaacaagcaggagggcaagagccuguacgugaagggcgagcccaucaucaacuucuacgacccccugguguuccccagcgacgaguucgacgccagcaucagccaggugaacgagaagaucaaccagagccuggccuucaucagaaagagcgacgagcugcugcacaacgugaacgccggcaagagcaccaccaacaucaugaucaccaccaucaucaucgugaucaucgugauccugcugagccugaucgccgugggccugcugcuguacugcaaggccagaagcacccccgugacccugagcaaggaccagcugagcggcaucaacaacaucgccuucagcaacugaggacuaguguccaccugucccuccugggcugcuggauugucucguuuuccugccaaauaaacaggaucagcgcuuuacagaucuaaaaaaaaaaaaaaaaaaaaaaaaaaaaaaaaaaaaaaaaaaaaaaaaaaaaaaaaaaaaaaaaugcaucccccccccccccccccccccccccccccccaaaggcucuuuucagagccaccagaauu

SEQ ID NO: 1104 - RNA, 2027 nt, Artificial Sequence
  mRNA product Design e-5 comprising derived and/or modified sequence from HRSV(A2)__F0_DSCav1 (opt5)
gggagagcggcucggccauuuugucccagucaguccggaggcugcggcugcagaaguaccgccugcggaguaacugcaaagaagcuuaccauggagcugcucauccugaaggccaacgcuauuaccacaauccuuacggccgugaccuucugcuuugcgagcggccagaauauuacagaagaguucuaccaauccaccuguucugcugucagcaaaggguaucuguccgcccucagaacaggaugguacaccucuguuaucacaauugaacugagcaacaucaaggagaauaaaugcaacggcaccgacgccaaggugaaacuuaucaagcaggaacuggauaaguauaaaaaugcugugacggagcuccagcugcugaugcaguccacccccgccacaaacaaucgggcucgcagagagcucccucgguuuaugaacuacacccugaauaacgccaagaaaacaaaugucacccuuucuaagaaacgcaagagacgguuccugggguuucuccugggagugggcagcgcgauugccuccgggguugcuguguguaagguccuucaccuggaaggagaggugaacaaaaucaagagcgcccuccugucuacgaauaaagcuguugugucccugagcaacggcgucucugugcucacauucaaggugcuggaccuuaaaaauuauauugauaagcaacugcucccgauccugaacaaacaguccugcagcauuucuaacaucgaaaccgucauugaguuucagcagaagaauaaccgccuucuggagaucacaagagaauuuuccguuaaugccggcgugaccacccccgugagcacauacaugcucacgaacuccgagcugcugucucucaucaaugacaugccuauuaccaacgaucaaaagaaacugaugagcaauaacguccagaucgugcggcagcaguccuauagcauuauguguaucauuaaggaagagguucuugcguacgugguccaacugccccucuacggggugaucgacacaccuugcuggaaacugcauaccucuccccuuuguacaaccaauacgaaggaaggauccaacaucugccugacacgcaccgauagaggcugguauugugacaaugccgggagcguuucuuucuucccucaggcugagaccugcaaagugcagagcaaccgggucuuuugugauacaaugaacucccucacccugccgucugaggugaaucugugcaaugucgacauuuucaaccccaaguacgauugcaagaucaugacaagcaaaacggacguguccagcucuguuauuaccucccucggagccaucgugagcuguuauggcaagacaaaaugcaccgcuucuaacaagaaucgcgggauuaucaaaacauuuuccaacggaugugauuacgucagcaauaagggcguggacaccguuuccgugggcaacacgcuguauuacgucaauaagcaagaagggaaaucucuuuaugugaagggagagccuaucauuaacuucuacgacccccugguguucccuagcgaugaauuugacgccuccaucucucagguuaaugagaaaauuaaccagagccucgccuucaucagaaaguccgaugaacugcugcacaaugucaacgcuggcaaaagcaccacaaauauuaugaucaccacaauuaucaucgugauuaucgugauucuucucucucugaucgcggucgggcugcuccuguacugcaaggcccgguccacccccgugacgcuuagcaaggaccagcugucuggaauuaacaauaucgcuuuuuccaacugaggacuaguguccaccugucccuccugggcugcuggauugucucguuuuccugccaaauaaacaggaucagcgcuuuacagaucuaaaaaaaaaaaaaaaaaaaaaaaaaaaaaaaaaaaaaaaaaaaaaaaaaaaaaaaaaaaaaaaaugcaucccccccccccccccccccccccccccccccaaaggcucuuuucagagccaccagaauu

SEQ ID NO: 1105 - RNA, 2027 nt, Artificial Sequence
  mRNA product Design e-5 comprising derived and/or modified sequence from HRSV(A2)__F0_DSCav1 (opt6)
gggagagcggcucggccauuuugucccagucaguccggaggcugcggcugcagaaguaccgccugcggaguaacugcaaagaagcuuaccauggaauuauuaauccucaaagcgaacgcuauuacuaccauucuaacagcagucacauucugcuucgccucaggccaaaacauuacagaagaauuuuaccaaucaacaugcucugccguaucaaaaggcuaccuauccgcccuacgaacaggcugguacacaagcguaauaacaaucgaacuaucaaacauaaaagaaaacaaaugcaacgguacagacgccaaaguuaaacuaauaaaacaagaacucgauaaauacaaaaacgcaguaacagaauuacaacuacuaaugcaaucaacaccugcaacaaacaauagagccaggagagaauuaccucgauucaugaauuacacacucaauaacgcaaaaaaaaccaacguuacacuaucaaaaaaaagaaaacgacgauucuuaggauuccuacucggagucggaucagcaauagcaucuggcguugcaguaugcaaaguauuacacuuagaaggugaagucaauaaaauaaaaagcgcgcuacuaaguacaaacaaagcagucgucucccuaucaaacggagucucaguccuaacauucaaaguacucgaccuaaaaaauuacauagauaaacaacuacuuccaauauuaaacaaacaauccuguagcaucagcaauauagaaacaguaauagaauuucaacaaaaaaacaaccgauuauuagaaaucacucgagaauuuuccguaaacgccgggguaacaacuccagucucaaccuacaugcuaaccaauucagaacuauugagcuuaauaaacgacaugccaauaaccaacgaccaaaaaaaacuaaugucuaacaauguucaaaucgucagacaacaaaguuacaguauaauguguauaaucaaagaagaaguccuagcauacguaguccaacucccacuauauggaguuaucgacacaccauguuggaaauuacacaccucaccauuaugcacaaccaauacaaaagaaggaucaaacauaugccuuacacggacagaccgcggaugguauugugacaacgcuggcucagucuccuuuuucccacaagcagaaacaugcaaaguacaaucaaacagagucuuuugcgauaccaugaacucacuuacauuaccaagcgaaguaaaucuuuguaacgucgacaucuucaauccuaaauaugacugcaaaaucaugaccucaaaaacagacguuagcucuucaguaaucacuagcuuaggagcaaucguaucaugcuacggcaaaacaaaauguacagcaucaaauaaaaacagaggaaucauaaaaacauuuucaaacggaugcgauuauguaagcaacaaaggaguagauacuguaagcguaggaaacacauuguacuauguaaacaaacaagaaggaaaaucacucuauguaaaaggagaaccuauaaucaauuucuacgauccauuaguguucccaucagaugaauuugacgccucaauaucacaaguuaaugaaaaaauaaaucaaucgcuagcauucauacguaaaucagaugaauuacuacauaacguaaacgcaggcaaauccacaacaaauaucaugaucacaacaauuauaauaguaauaauaguaauacuacuaucacuaauagccguaggacuccuacuauacugcaaagcaagaucuacuccaguaacccucucaaaagaucaacuaagcggaauuaauaacaucgcauucagcaacuaaggacuaguguccaccugucccuccugggcugcuggauugucucguuuuccugccaaauaaacaggaucagcgcuuuacagaucuaaaaaaaaaaaaaaaaaaaaaaaaaaaaaaaaaaaaaaaaaaaaaaaaaaaaaaaaaaaaaaaaugcaucccccccccccccccccccccccccccccccaaaggcucuuuucagagccaccagaauu

SEQ ID NO: 1106 - RNA, 2027 nt, Artificial Sequence
  mRNA product Design e-5 comprising derived and/or modified sequence from HRSV(A2)__F0_DSCav1 (opt11)
gggagagcggcucggccauuuugucccagucaguccggaggcugcggcugcagaaguaccgccugcggaguaacugcaaagaagcuuaccauggaacuacuuauccucaaagccaacgccaucaccaccauccucacagcaguaaccuuuugcuucgccucaggccaaaauaucacagaagaauuuuaccagaguaccugcuccgccguauccaaaggauaccucagcgcgcuccgcaccggcugguacacuucaguaaucacaaucgaacuauccaacaucaaagaaaacaaaugcaacggcaccgacgcgaaagucaaacucaucaaacaagaacuagacaaauacaaaaaugccguaacagaacuacaacuguuaaugcagagcacacccgccaccaacaaccgcgcccgccgggaacucccccgauucaugaacuacacacucaacaacgccaaaaagacgaacgucacccucagcaagaaacgaaaacgcagauuccucgguuuccuacuaggcguaggcucagcaauagccuccggaguagccgucugcaaaguccugcacuuagaaggcgaagucaacaaaaucaaauccgcccuacucuccacgaacaaagccgucgucucccuguccaacggugucuccguuuuaaccuucaaaguucuggaccucaaaaacuacauagacaaacagcuucuccccauccucaacaaacaauccuguagcaucuccaacaucgaaaccgucauagaauuucaacagaaaaacaacagacugcucgaaaucacccgcgaguucuccgucaacgccggcgucacgacucccgucuccaccuauaugcucacgaacucggaacuccuuucccuaaucaacgacaugccgaucaccaacgaccaaaagaaacucaugucaaacaacguacaaauuguccgccaacaaucauacuccaucaugugcauaauuaaagaagaaguccucgcauacguaguccaacucccccucuacggcgucaucgacacccccugcuggaaacuccacaccuccccacucugcacaaccaacaccaaagaaggcucaaacauaugccuaacgcgcaccgaucgcgguugguacugcgacaacgccgguuccgucagcuucuucccccaagcagagacaugcaaaguccaaucaaaccgcgucuucugcgacaccaugaacucacuaacccuuccaagcgaagucaaccucugcaacguugacaucuucaaccccaaauacgacuguaaaaucaugaccuccaagaccgacguauccucuuccgucaucacaucccuaggcgcuaucguauccugcuaugguaaaaccaaaugcaccgccuccaacaaaaaccgcggcaucaucaagacauuuuccaacggcugcgacuacgugagcaacaaaggcgucgacaccgucuccguaggcaacacccucuacuauguaaacaaacaagagggcaaaucacucuacgucaaaggggaacccaucaucaacuucuacgacccgcucguauuccccagcgaugaguucgacgccuccaucucccaggucaacgaaaagauaaaccaaucacucgcauucauucguaaauccgacgaacuccuacacaacgugaaugcaggcaaaucgaccacuaacaucaugaucaccaccaucaucaucgucaucauagucauccuccugucccuuaucgccgucggucuuuuauuauacugcaaagcccgcagcacccccgucacccucucuaaggaccaacucagcggcaucaauaacaucgcauucucuaacuaaggacuaguguccaccugucccuccugggcugcuggauugucucguuuuccugccaaauaaacaggaucagcgcuuuacagaucuaaaaaaaaaaaaaaaaaaaaaaaaaaaaaaaaaaaaaaaaaaaaaaaaaaaaaaaaaaaaaaaaugcaucccccccccccccccccccccccccccccccaaaggcucuuuucagagccaccagaauu

SEQ ID NO: 1107 - RNA, 2094 nt, Artificial Sequence
  mRNA product Design e-6 comprising derived and/or modified sequence from HRSV(A2)__F0_DSCav1 (opt1)
gggagagcggcucggccauuuugucccagucaguccggaggcugcggcugcagaaguaccgccugcggaguaacugcaaagaagcuuaccauggagcugcucauccugaaggccaacgccaucaccaccauccugacggcggugaccuucugcuucgccagcggccagaacaucaccgaggaguucuaccaguccacgugcagcgccgucuccaagggguaccucagcgcccugcggaccggcugguacaccuccgugaucaccaucgagcugagcaacaucaaggagaacaagugcaacgggaccgacgccaaggugaagcucaucaagcaggagcuggacaaguacaagaacgcggucacggagcugcagcuccugaugcaguccaccccggcaaccaacaaccgcgcccggcgcgagcugccccgguucaugaacuacacccucaacaacgccaagaagacgaacgugacccugagcaagaagcgcaagcggcgcuuccugggcuuccuccugggggugggcuccgccaucgcgagcggcgucgccgugugcaaggugcugcaccucgagggggaggucaacaagaucaagagcgcccugcuguccaccaacaaggccguggugagccucuccaacggcgucagcgugcugaccuucaaggugcuggaccucaagaacuacaucgacaagcagcugcugcccauccugaacaagcagagcugcuccaucagcaacaucgagacggugaucgaguuccagcagaagaacaaccggcuccuggagaucacccgcgaguucagcgugaacgccggggucaccacccccguguccacguacaugcugaccaacagcgagcuccugucccugaucaacgacaugccgaucaccaacgaccagaagaagcucaugagcaacaacgugcagaucguccggcagcaguccuacagcaucaugugcaucaucaaggaggaggugcuggcguacgugguccagcugccccucuacggcgugaucgacacccccugcuggaagcugcacacgagcccccugugcaccaccaacaccaaggagggguccaacaucugccucacgcgcaccgaccggggcugguacugcgacaacgccggcagcgucuccuucuucccgcaggccgagaccugcaaggugcagagcaaccgcguguucugcgacaccaugaacucccugacgcugcccagcgagguaaaccucugcaacgucgacaucuucaaccccaaguacgacugcaagaucaugaccuccaagaccgacgugagcuccagcgugaucaccucccugggggccaucgucagcugcuacggcaagacgaagugcaccgccagcaacaagaaccgggggaucaucaagaccuucuccaacggcugcgacuacgugagcaacaagggcguggacaccguguccgucgggaacacccuguacuacgugaacaagcaggagggcaagagccucuacgugaagggggagcccaucaucaacuucuacgacccgcuggucuuccccuccgacgaguucgacgcgagcaucucccaggugaacgagaagaucaaccagagccuggccuucauccgcaaguccgacgagcugcuccacaacgugaacgccggcaagagcacgaccaacaucaugaucaccaccaucaucaucgucaucaucgugauccugcugucccucaucgccguggggcugcugcucuacugcaaggcccggagcacgcccgucacccuguccaaggaccagcugagcggcaucaacaacaucgcguucuccaacugaggacuaguacuggcugcaucucccuuuccucuguccuccauccuucucccaggauggugaagggggaccugguacccagugauccccaccccaggauccuaaaucaugacuuaccugcuaauaaaaacucauuggaaaagugagaagaucuaaaaaaaaaaaaaaaaaaaaaaaaaaaaaaaaaaaaaaaaaaaaaaaaaaaaaaaaaaaaaaaaugcaucccccccccccccccccccccccccccccccaaaggcucuuuucagagccaccagaauu

SEQ ID NO: 1108 - RNA, 2094 nt, Artificial Sequence
  mRNA product Design e-6 comprising derived and/or modified sequence from HRSV(A2)__F0_DSCav1 (opt1)
gggagagcggcucggccauuuugucccagucaguccggaggcugcggcugcagaaguaccgccugcggaguaacugcaaagaagcuuaccauggagcugcucauccugaaggccaacgccaucaccaccauccugacggcggugaccuucugcuucgccagcggccagaacaucaccgaggaguucuaccaguccacgugcagcgccgucuccaagggguaccucagcgcccugcgcaccggcugguacaccuccgugaucaccaucgagcugagcaacaucaaggagaacaagugcaacgggaccgacgccaaggugaagcucaucaagcaggagcuggacaaguacaagaacgcggucacggagcugcagcuccugaugcaguccacccccgccaccaacaaccgggcccgccgggagcugccgcgcuucaugaacuacacccucaacaacgccaagaagacgaacgugacccugagcaagaagcggaagcgccgguuccugggcuuccuccugggggugggcuccgcgaucgccagcggcgucgccgugugcaaggugcugcaccucgagggggaggucaacaagaucaaguccgcccugcugagcaccaacaaggccguggugucccucagcaacggcgucuccgugcugaccuucaaggugcuggaccucaagaacuacaucgacaagcagcugcugcccauccucaacaagcagagcugcuccaucagcaacaucgagacggucaucgaguuccagcagaagaacaaccgccugcuggagaucacccgggaguucuccgugaacgcgggggugaccacccccgucagcacguacaugcucaccaacagcgagcugcugucccucaucaacgacaugcccaucaccaacgaccagaagaagcugaugagcaacaacgugcagaucgugcgccagcaguccuacagcaucaugugcaucaucaaggaggagguccuggccuacguggugcagcucccgcuguacggcgucaucgacacccccugcuggaagcugcacacgagcccccucugcaccaccaacaccaaggaggggagcaacaucugccugacgcggaccgaccgcggcugguacugcgacaacgccggcuccgugagcuucuucccccaggccgagaccugcaagguccaguccaaccggguguucugcgacaccaugaacagccugacgcucccguccgaggugaaccugugcaacgucgacaucuucaaccccaaguacgacugcaagaucaugaccagcaagaccgacguguccagcuccgugaucaccagccugggggccaucgucuccugcuacggcaagacgaagugcaccgcgagcaacaagaaccgcgggaucaucaagaccuucuccaacggcugcgacuacgugagcaacaagggcguggacaccgucagcguggggaacacccucuacuacgugaacaagcaggagggcaagucccuguacgucaagggggagcccaucaucaacuucuacgacccccugguguucccgagcgacgaguucgacgccuccaucagccaggugaacgagaagaucaaccagucccucgccuucauccggaaguccgacgagcugcugcacaacgucaacgccggcaaguccacgaccaacaucaugaucaccaccaucaucaucgugaucaucgugauccugcucagccugaucgccgucgggcugcuccuguacugcaaggcgcgcuccacgcccgugacccugagcaaggaccagcucuccggcaucaacaacaucgccuucagcaacugaggacuaguacuggcugcaucucccuuuccucuguccuccauccuucucccaggauggugaagggggaccugguacccagugauccccaccccaggauccuaaaucaugacuuaccugcuaauaaaaacucauuggaaaagugagaagaucuaaaaaaaaaaaaaaaaaaaaaaaaaaaaaaaaaaaaaaaaaaaaaaaaaaaaaaaaaaaaaaaaugcaucccccccccccccccccccccccccccccccaaaggcucuuuucagagccaccagaauu

SEQ ID NO: 1109 - RNA, 2094 nt, Artificial Sequence
  mRNA product Design e-6 comprising derived and/or modified sequence from HRSV(A2)__F0_DSCav1 (opt2)
gggagagcggcucggccauuuugucccagucaguccggaggcugcggcugcagaaguaccgccugcggaguaacugcaaagaagcuuaccauggagcuccucauccucaaggccaacgccaucaccaccauccucaccgccgucaccuucugcuucgccuccggccagaacaucaccgaggaguucuaccaguccaccugcuccgccgucuccaagggcuaccucuccgcccuccgcaccggcugguacaccuccgucaucaccaucgagcucuccaacaucaaggagaacaagugcaacggcaccgacgccaaggucaagcucaucaagcaggagcucgacaaguacaagaacgccgucaccgagcuccagcuccucaugcaguccacccccgccaccaacaaccgcgcccgccgcgagcucccccgcuucaugaacuacacccucaacaacgccaagaagaccaacgucacccucuccaagaagcgcaagcgccgcuuccucggcuuccuccucggcgucggcuccgccaucgccuccggcgucgccgucugcaagguccuccaccucgagggcgaggucaacaagaucaaguccgcccuccucuccaccaacaaggccgucgucucccucuccaacggcgucuccguccucaccuucaagguccucgaccucaagaacuacaucgacaagcagcuccuccccauccucaacaagcaguccugcuccaucuccaacaucgagaccgucaucgaguuccagcagaagaacaaccgccuccucgagaucacccgcgaguucuccgucaacgccggcgucaccacccccgucuccaccuacaugcucaccaacuccgagcuccucucccucaucaacgacaugcccaucaccaacgaccagaagaagcucauguccaacaacguccagaucguccgccagcaguccuacuccaucaugugcaucaucaaggaggagguccucgccuacgucguccagcucccccucuacggcgucaucgacacccccugcuggaagcuccacaccuccccccucugcaccaccaacaccaaggagggcuccaacaucugccucacccgcaccgaccgcggcugguacugcgacaacgccggcuccgucuccuucuucccccaggccgagaccugcaagguccaguccaaccgcgucuucugcgacaccaugaacucccucacccuccccuccgaggucaaccucugcaacgucgacaucuucaaccccaaguacgacugcaagaucaugaccuccaagaccgacgucuccuccuccgucaucaccucccucggcgccaucgucuccugcuacggcaagaccaagugcaccgccuccaacaagaaccgcggcaucaucaagaccuucuccaacggcugcgacuacgucuccaacaagggcgucgacaccgucuccgucggcaacacccucuacuacgucaacaagcaggagggcaagucccucuacgucaagggcgagcccaucaucaacuucuacgacccccucgucuuccccuccgacgaguucgacgccuccaucucccaggucaacgagaagaucaaccagucccucgccuucauccgcaaguccgacgagcuccuccacaacgucaacgccggcaaguccaccaccaacaucaugaucaccaccaucaucaucgucaucaucgucauccuccucucccucaucgccgucggccuccuccucuacugcaaggcccgcuccacccccgucacccucuccaaggaccagcucuccggcaucaacaacaucgccuucuccaacugaggacuaguacuggcugcaucucccuuuccucuguccuccauccuucucccaggauggugaagggggaccugguacccagugauccccaccccaggauccuaaaucaugacuuaccugcuaauaaaaacucauuggaaaagugagaagaucuaaaaaaaaaaaaaaaaaaaaaaaaaaaaaaaaaaaaaaaaaaaaaaaaaaaaaaaaaaaaaaaaugcaucccccccccccccccccccccccccccccccaaaggcucuuuucagagccaccagaauu

SEQ ID NO: 1110 - RNA, 2094 nt, Artificial Sequence
  mRNA product Design e-6 comprising derived and/or modified sequence from HRSV(A2)__F0_DSCav1 (opt3)
gggagagcggcucggccauuuugucccagucaguccggaggcugcggcugcagaaguaccgccugcggaguaacugcaaagaagcuuaccauggagcugcucauccuuaaggccaacgcuauuaccacaauacugacugcagugacguucugcuuugccagcggccagaauaucaccgaagaguucuaccaauccacauguucugcggucucaaaaggguauuugagugcuuuaagaacuggaugguacaccagcguuauuacaaucgaacuguccaacauuaaggagaauaaaugcaacgguaccgacgccaaggugaaacuaaucaagcaggaacucgauaaguauaaaaaugcaguaacugagcugcagcuucugaugcagucuacacccgccaccaacaauagggcucggcgcgaguugccucgauuuaugaacuacacgcucaauaacgcaaagaaaacuaaugugacccugucgaagaaacguaagagaagguuccugggcuuucucuuaggggucggaucagccauagcuagcggcguggccguuuguaaggugcugcaccuugaaggugaggucaacaaaaucaagagugcguugcuguccacaaauaaagcagugguaucucuaagcaacgggguuuccgugcucacuuucaagguccuggaccuuaaaaauuauauugauaagcaacuguugccaauccucaacaaacagucaugcaguauuagcaacaucgaaaccgugauagaguuucagcagaagaauaaccggcuguuagagauuacacgcgaguucucugugaaugccggagucaccacgccgguuuccacuuacaugcugacaaacucagaacuccuuagccugaucaaugacaugcccauuaccaacgaucaaaagaaauugaugaguaauaacgugcagaucguaagacagcagucuuauuccaucauguguauuauaaaggaagaggugcuagcuuacgucgugcaacugccucucuacggcguuaucgacacuccaugcuggaaacugcauacaagcccccuuuguaccacgaauaccaaggaaggcucgaacauuugccugacaaggacugaucgggggugguauugugacaaugccggaucuguguccuuuuucccucaggcagagaccugcaaaguccagucaaaccgcguguuuugugauacaaugaauaguuugacucucccaagcgagguaaaccugugcaauguugacaucuucaaccccaaguacgauugcaagauaaugaccuccaaaacagacgugucuagcucagucauuaccaguuuaggugcuaucguguccuguuauggcaagacuaaaugcacggccagcaacaagaaucgagggaucauuaaaacauuuucuaacggaugugauuacgucucaaauaagggcguggacaccguuaguguggguaacacucuguauuacguaaauaagcaagaagggaaaagccuauaugucaagggagagccuaucauuaacuucuacgacccacucguguucccguccgaugaauuugacgcgucuauaucgcagguuaaugagaaaaucaaccagagccuggccuucauuagaaaguccgaugaacuuuugcacaaugugaacgcaggcaaaucaaccacaaauaucaugaucaccacuauuauaaucgucauuaucgugauucugcucagucugaucgcuguaggccuucuguuguacugcaaggccaggucuacacccgugacgcucagcaaggaccagcuguccgggauaaacaauaucgcuuuuucaaacugaggacuaguacuggcugcaucucccuuuccucuguccuccauccuucucccaggauggugaagggggaccugguacccagugauccccaccccaggauccuaaaucaugacuuaccugcuaauaaaaacucauuggaaaagugagaagaucuaaaaaaaaaaaaaaaaaaaaaaaaaaaaaaaaaaaaaaaaaaaaaaaaaaaaaaaaaaaaaaaaugcaucccccccccccccccccccccccccccccccaaaggcucuuuucagagccaccagaauu

SEQ ID NO: 1111 - RNA, 2094 nt, Artificial Sequence
  mRNA product Design e-6 comprising derived and/or modified sequence from HRSV(A2)__F0_DSCav1 (opt4)
gggagagcggcucggccauuuugucccagucaguccggaggcugcggcugcagaaguaccgccugcggaguaacugcaaagaagcuuaccauggagcugcugauccugaaggccaacgccaucaccaccauccugaccgccgugaccuucugcuucgccagcggccagaacaucaccgaggaguucuaccagagcaccugcagcgccgugagcaagggcuaccugagcgcccugagaaccggcugguacaccagcgugaucaccaucgagcugagcaacaucaaggagaacaagugcaacggcaccgacgccaaggugaagcugaucaagcaggagcuggacaaguacaagaacgccgugaccgagcugcagcugcugaugcagagcacccccgccaccaacaacagagccagaagagagcugcccagauucaugaacuacacccugaacaacgccaagaagaccaacgugacccugagcaagaagagaaagagaagauuccugggcuuccugcugggcgugggcagcgccaucgccagcggcguggccgugugcaaggugcugcaccuggagggcgaggugaacaagaucaagagcgcccugcugagcaccaacaaggccguggugagccugagcaacggcgugagcgugcugaccuucaaggugcuggaccugaagaacuacaucgacaagcagcugcugcccauccugaacaagcagagcugcagcaucagcaacaucgagaccgugaucgaguuccagcagaagaacaacagacugcuggagaucaccagagaguucagcgugaacgccggcgugaccacccccgugagcaccuacaugcugaccaacagcgagcugcugagccugaucaacgacaugcccaucaccaacgaccagaagaagcugaugagcaacaacgugcagaucgugagacagcagagcuacagcaucaugugcaucaucaaggaggaggugcuggccuacguggugcagcugccccuguacggcgugaucgacacccccugcuggaagcugcacaccagcccccugugcaccaccaacaccaaggagggcagcaacaucugccugaccagaaccgacagaggcugguacugcgacaacgccggcagcgugagcuucuucccccaggccgagaccugcaaggugcagagcaacagaguguucugcgacaccaugaacagccugacccugcccagcgaggugaaccugugcaacguggacaucuucaaccccaaguacgacugcaagaucaugaccagcaagaccgacgugagcagcagcgugaucaccagccugggcgccaucgugagcugcuacggcaagaccaagugcaccgccagcaacaagaacagaggcaucaucaagaccuucagcaacggcugcgacuacgugagcaacaagggcguggacaccgugagcgugggcaacacccuguacuacgugaacaagcaggagggcaagagccuguacgugaagggcgagcccaucaucaacuucuacgacccccugguguuccccagcgacgaguucgacgccagcaucagccaggugaacgagaagaucaaccagagccuggccuucaucagaaagagcgacgagcugcugcacaacgugaacgccggcaagagcaccaccaacaucaugaucaccaccaucaucaucgugaucaucgugauccugcugagccugaucgccgugggccugcugcuguacugcaaggccagaagcacccccgugacccugagcaaggaccagcugagcggcaucaacaacaucgccuucagcaacugaggacuaguacuggcugcaucucccuuuccucuguccuccauccuucucccaggauggugaagggggaccugguacccagugauccccaccccaggauccuaaaucaugacuuaccugcuaauaaaaacucauuggaaaagugagaagaucuaaaaaaaaaaaaaaaaaaaaaaaaaaaaaaaaaaaaaaaaaaaaaaaaaaaaaaaaaaaaaaaaugcaucccccccccccccccccccccccccccccccaaaggcucuuuucagagccaccagaauu

SEQ ID NO: 1112 - RNA, 2094 nt, Artificial Sequence
  mRNA product Design e-6 comprising derived and/or modified sequence from HRSV(A2)__F0_DSCav1 (opt5)
gggagagcggcucggccauuuugucccagucaguccggaggcugcggcugcagaaguaccgccugcggaguaacugcaaagaagcuuaccauggagcugcucauccugaaggccaacgcuauuaccacaauccuuacggccgugaccuucugcuuugcgagcggccagaauauuacagaagaguucuaccaauccaccuguucugcugucagcaaaggguaucuguccgcccucagaacaggaugguacaccucuguuaucacaauugaacugagcaacaucaaggagaauaaaugcaacggcaccgacgccaaggugaaacuuaucaagcaggaacuggauaaguauaaaaaugcugugacggagcuccagcugcugaugcaguccacccccgccacaaacaaucgggcucgcagagagcucccucgguuuaugaacuacacccugaauaacgccaagaaaacaaaugucacccuuucuaagaaacgcaagagacgguuccugggguuucuccugggagugggcagcgcgauugccuccgggguugcuguguguaagguccuucaccuggaaggagaggugaacaaaaucaagagcgcccuccugucuacgaauaaagcuguugugucccugagcaacggcgucucugugcucacauucaaggugcuggaccuuaaaaauuauauugauaagcaacugcucccgauccugaacaaacaguccugcagcauuucuaacaucgaaaccgucauugaguuucagcagaagaauaaccgccuucuggagaucacaagagaauuuuccguuaaugccggcgugaccacccccgugagcacauacaugcucacgaacuccgagcugcugucucucaucaaugacaugccuauuaccaacgaucaaaagaaacugaugagcaauaacguccagaucgugcggcagcaguccuauagcauuauguguaucauuaaggaagagguucuugcguacgugguccaacugccccucuacggggugaucgacacaccuugcuggaaacugcauaccucuccccuuuguacaaccaauacgaaggaaggauccaacaucugccugacacgcaccgauagaggcugguauugugacaaugccgggagcguuucuuucuucccucaggcugagaccugcaaagugcagagcaaccgggucuuuugugauacaaugaacucccucacccugccgucugaggugaaucugugcaaugucgacauuuucaaccccaaguacgauugcaagaucaugacaagcaaaacggacguguccagcucuguuauuaccucccucggagccaucgugagcuguuauggcaagacaaaaugcaccgcuucuaacaagaaucgcgggauuaucaaaacauuuuccaacggaugugauuacgucagcaauaagggcguggacaccguuuccgugggcaacacgcuguauuacgucaauaagcaagaagggaaaucucuuuaugugaagggagagccuaucauuaacuucuacgacccccugguguucccuagcgaugaauuugacgccuccaucucucagguuaaugagaaaauuaaccagagccucgccuucaucagaaaguccgaugaacugcugcacaaugucaacgcuggcaaaagcaccacaaauauuaugaucaccacaauuaucaucgugauuaucgugauucuucucucucugaucgcggucgggcugcuccuguacugcaaggcccgguccacccccgugacgcuuagcaaggaccagcugucuggaauuaacaauaucgcuuuuuccaacugaggacuaguacuggcugcaucucccuuuccucuguccuccauccuucucccaggauggugaagggggaccugguacccagugauccccaccccaggauccuaaaucaugacuuaccugcuaauaaaaacucauuggaaaagugagaagaucuaaaaaaaaaaaaaaaaaaaaaaaaaaaaaaaaaaaaaaaaaaaaaaaaaaaaaaaaaaaaaaaaugcaucccccccccccccccccccccccccccccccaaaggcucuuuucagagccaccagaauu

SEQ ID NO: 1113 - RNA, 2094 nt, Artificial Sequence
  mRNA product Design e-6 comprising derived and/or modified sequence from HRSV(A2)__F0_DSCav1 (opt6)
gggagagcggcucggccauuuugucccagucaguccggaggcugcggcugcagaaguaccgccugcggaguaacugcaaagaagcuuaccauggaauuauuaauccucaaagcgaacgcuauuacuaccauucuaacagcagucacauucugcuucgccucaggccaaaacauuacagaagaauuuuaccaaucaacaugcucugccguaucaaaaggcuaccuauccgcccuacgaacaggcugguacacaagcguaauaacaaucgaacuaucaaacauaaaagaaaacaaaugcaacgguacagacgccaaaguuaaacuaauaaaacaagaacucgauaaauacaaaaacgcaguaacagaauuacaacuacuaaugcaaucaacaccugcaacaaacaauagagccaggagagaauuaccucgauucaugaauuacacacucaauaacgcaaaaaaaaccaacguuacacuaucaaaaaaaagaaaacgacgauucuuaggauuccuacucggagucggaucagcaauagcaucuggcguugcaguaugcaaaguauuacacuuagaaggugaagucaauaaaauaaaaagcgcgcuacuaaguacaaacaaagcagucgucucccuaucaaacggagucucaguccuaacauucaaaguacucgaccuaaaaaauuacauagauaaacaacuacuuccaauauuaaacaaacaauccuguagcaucagcaauauagaaacaguaauagaauuucaacaaaaaaacaaccgauuauuagaaaucacucgagaauuuuccguaaacgccgggguaacaacuccagucucaaccuacaugcuaaccaauucagaacuauugagcuuaauaaacgacaugccaauaaccaacgaccaaaaaaaacuaaugucuaacaauguucaaaucgucagacaacaaaguuacaguauaauguguauaaucaaagaagaaguccuagcauacguaguccaacucccacuauauggaguuaucgacacaccauguuggaaauuacacaccucaccauuaugcacaaccaauacaaaagaaggaucaaacauaugccuuacacggacagaccgcggaugguauugugacaacgcuggcucagucuccuuuuucccacaagcagaaacaugcaaaguacaaucaaacagagucuuuugcgauaccaugaacucacuuacauuaccaagcgaaguaaaucuuuguaacgucgacaucuucaauccuaaauaugacugcaaaaucaugaccucaaaaacagacguuagcucuucaguaaucacuagcuuaggagcaaucguaucaugcuacggcaaaacaaaauguacagcaucaaauaaaaacagaggaaucauaaaaacauuuucaaacggaugcgauuauguaagcaacaaaggaguagauacuguaagcguaggaaacacauuguacuauguaaacaaacaagaaggaaaaucacucuauguaaaaggagaaccuauaaucaauuucuacgauccauuaguguucccaucagaugaauuugacgccucaauaucacaaguuaaugaaaaaauaaaucaaucgcuagcauucauacguaaaucagaugaauuacuacauaacguaaacgcaggcaaauccacaacaaauaucaugaucacaacaauuauaauaguaauaauaguaauacuacuaucacuaauagccguaggacuccuacuauacugcaaagcaagaucuacuccaguaacccucucaaaagaucaacuaagcggaauuaauaacaucgcauucagcaacuaaggacuaguacuggcugcaucucccuuuccucuguccuccauccuucucccaggauggugaagggggaccugguacccagugauccccaccccaggauccuaaaucaugacuuaccugcuaauaaaaacucauuggaaaagugagaagaucuaaaaaaaaaaaaaaaaaaaaaaaaaaaaaaaaaaaaaaaaaaaaaaaaaaaaaaaaaaaaaaaaugcaucccccccccccccccccccccccccccccccaaaggcucuuuucagagccaccagaauu

SEQ ID NO: 1114 - RNA, 2094 nt, Artificial Sequence
  mRNA product Design e-6 comprising derived and/or modified sequence from HRSV(A2)__F0_DSCav1 (opt11)
gggagagcggcucggccauuuugucccagucaguccggaggcugcggcugcagaaguaccgccugcggaguaacugcaaagaagcuuaccauggaacuacuuauccucaaagccaacgccaucaccaccauccucacagcaguaaccuuuugcuucgccucaggccaaaauaucacagaagaauuuuaccagaguaccugcuccgccguauccaaaggauaccucagcgcgcuccgcaccggcugguacacuucaguaaucacaaucgaacuauccaacaucaaagaaaacaaaugcaacggcaccgacgcgaaagucaaacucaucaaacaagaacuagacaaauacaaaaaugccguaacagaacuacaacuguuaaugcagagcacacccgccaccaacaaccgcgcccgccgggaacucccccgauucaugaacuacacacucaacaacgccaaaaagacgaacgucacccucagcaagaaacgaaaacgcagauuccucgguuuccuacuaggcguaggcucagcaauagccuccggaguagccgucugcaaaguccugcacuuagaaggcgaagucaacaaaaucaaauccgcccuacucuccacgaacaaagccgucgucucccuguccaacggugucuccguuuuaaccuucaaaguucuggaccucaaaaacuacauagacaaacagcuucuccccauccucaacaaacaauccuguagcaucuccaacaucgaaaccgucauagaauuucaacagaaaaacaacagacugcucgaaaucacccgcgaguucuccgucaacgccggcgucacgacucccgucuccaccuauaugcucacgaacucggaacuccuuucccuaaucaacgacaugccgaucaccaacgaccaaaagaaacucaugucaaacaacguacaaauuguccgccaacaaucauacuccaucaugugcauaauuaaagaagaaguccucgcauacguaguccaacucccccucuacggcgucaucgacacccccugcuggaaacuccacaccuccccacucugcacaaccaacaccaaagaaggcucaaacauaugccuaacgcgcaccgaucgcgguugguacugcgacaacgccgguuccgucagcuucuucccccaagcagagacaugcaaaguccaaucaaaccgcgucuucugcgacaccaugaacucacuaacccuuccaagcgaagucaaccucugcaacguugacaucuucaaccccaaauacgacuguaaaaucaugaccuccaagaccgacguauccucuuccgucaucacaucccuaggcgcuaucguauccugcuaugguaaaaccaaaugcaccgccuccaacaaaaaccgcggcaucaucaagacauuuuccaacggcugcgacuacgugagcaacaaaggcgucgacaccgucuccguaggcaacacccucuacuauguaaacaaacaagagggcaaaucacucuacgucaaaggggaacccaucaucaacuucuacgacccgcucguauuccccagcgaugaguucgacgccuccaucucccaggucaacgaaaagauaaaccaaucacucgcauucauucguaaauccgacgaacuccuacacaacgugaaugcaggcaaaucgaccacuaacaucaugaucaccaccaucaucaucgucaucauagucauccuccugucccuuaucgccgucggucuuuuauuauacugcaaagcccgcagcacccccgucacccucucuaaggaccaacucagcggcaucaauaacaucgcauucucuaacuaaggacuaguacuggcugcaucucccuuuccucuguccuccauccuucucccaggauggugaagggggaccugguacccagugauccccaccccaggauccuaaaucaugacuuaccugcuaauaaaaacucauuggaaaagugagaagaucuaaaaaaaaaaaaaaaaaaaaaaaaaaaaaaaaaaaaaaaaaaaaaaaaaaaaaaaaaaaaaaaaugcaucccccccccccccccccccccccccccccccaaaggcucuuuucagagccaccagaauu

SEQ ID NO: 1115 - RNA, 2310 nt, Artificial Sequence
  mRNA product Design f-1 comprising derived and/or modified sequence from HRSV(A2)__F0_DSCav1 (opt1)
gggagagcggcucggccauuuugucccagucaguccggaggcugcggcugcagaaguaccgccugcggaguaacugcaaagaagcuuaccauggagcugcucauccugaaggccaacgccaucaccaccauccugacggcggugaccuucugcuucgccagcggccagaacaucaccgaggaguucuaccaguccacgugcagcgccgucuccaagggguaccucagcgcccugcggaccggcugguacaccuccgugaucaccaucgagcugagcaacaucaaggagaacaagugcaacgggaccgacgccaaggugaagcucaucaagcaggagcuggacaaguacaagaacgcggucacggagcugcagcuccugaugcaguccaccccggcaaccaacaaccgcgcccggcgcgagcugccccgguucaugaacuacacccucaacaacgccaagaagacgaacgugacccugagcaagaagcgcaagcggcgcuuccugggcuuccuccugggggugggcuccgccaucgcgagcggcgucgccgugugcaaggugcugcaccucgagggggaggucaacaagaucaagagcgcccugcuguccaccaacaaggccguggugagccucuccaacggcgucagcgugcugaccuucaaggugcuggaccucaagaacuacaucgacaagcagcugcugcccauccugaacaagcagagcugcuccaucagcaacaucgagacggugaucgaguuccagcagaagaacaaccggcuccuggagaucacccgcgaguucagcgugaacgccggggucaccacccccguguccacguacaugcugaccaacagcgagcuccugucccugaucaacgacaugccgaucaccaacgaccagaagaagcucaugagcaacaacgugcagaucguccggcagcaguccuacagcaucaugugcaucaucaaggaggaggugcuggcguacgugguccagcugccccucuacggcgugaucgacacccccugcuggaagcugcacacgagcccccugugcaccaccaacaccaaggagggguccaacaucugccucacgcgcaccgaccggggcugguacugcgacaacgccggcagcgucuccuucuucccgcaggccgagaccugcaaggugcagagcaaccgcguguucugcgacaccaugaacucccugacgcugcccagcgagguaaaccucugcaacgucgacaucuucaaccccaaguacgacugcaagaucaugaccuccaagaccgacgugagcuccagcgugaucaccucccugggggccaucgucagcugcuacggcaagacgaagugcaccgccagcaacaagaaccgggggaucaucaagaccuucuccaacggcugcgacuacgugagcaacaagggcguggacaccguguccgucgggaacacccuguacuacgugaacaagcaggagggcaagagccucuacgugaagggggagcccaucaucaacuucuacgacccgcuggucuuccccuccgacgaguucgacgcgagcaucucccaggugaacgagaagaucaaccagagccuggccuucauccgcaaguccgacgagcugcuccacaacgugaacgccggcaagagcacgaccaacaucaugaucaccaccaucaucaucgucaucaucgugauccugcugucccucaucgccguggggcugcugcucuacugcaaggcccggagcacgcccgucacccuguccaaggaccagcugagcggcaucaacaacaucgcguucuccaacugaggacuagugaagggaacacccaaauuuaauucagccuuaagcacaauuaauuaagagugaaacguaauuguacaagcaguuggucacccaccauagggcaugaucaacaccgcaaccuuuccuuuuucccccagugauucugaaaaaccccucuucccuucagcuugcuuagauguuccaaauuuaguaagcuuaaggcggccuacagaagaaaaagaaaaaaaaggccacaaaaguucccucucacuuucaguaaauaaaauaaaagcagcaacagaaauaaagaaauaaaugaaauucaaaaugaaauaaauauuguguugugcagcauuaaaaaaucaauaaaaauuaaaaaugagcaagaucuaaaaaaaaaaaaaaaaaaaaaaaaaaaaaaaaaaaaaaaaaaaaaaaaaaaaaaaaaaaaaaaaugcaucccccccccccccccccccccccccccccccaaaggcucuuuucagagccaccagaauu

SEQ ID NO: 1116 - RNA, 2310 nt, Artificial Sequence
  mRNA product Design f-1 comprising derived and/or modified sequence from HRSV(A2)__F0_DSCav1 (opt1)
gggagagcggcucggccauuuugucccagucaguccggaggcugcggcugcagaaguaccgccugcggaguaacugcaaagaagcuuaccauggagcugcucauccugaaggccaacgccaucaccaccauccugacggcggugaccuucugcuucgccagcggccagaacaucaccgaggaguucuaccaguccacgugcagcgccgucuccaagggguaccucagcgcccugcgcaccggcugguacaccuccgugaucaccaucgagcugagcaacaucaaggagaacaagugcaacgggaccgacgccaaggugaagcucaucaagcaggagcuggacaaguacaagaacgcggucacggagcugcagcuccugaugcaguccacccccgccaccaacaaccgggcccgccgggagcugccgcgcuucaugaacuacacccucaacaacgccaagaagacgaacgugacccugagcaagaagcggaagcgccgguuccugggcuuccuccugggggugggcuccgcgaucgccagcggcgucgccgugugcaaggugcugcaccucgagggggaggucaacaagaucaaguccgcccugcugagcaccaacaaggccguggugucccucagcaacggcgucuccgugcugaccuucaaggugcuggaccucaagaacuacaucgacaagcagcugcugcccauccucaacaagcagagcugcuccaucagcaacaucgagacggucaucgaguuccagcagaagaacaaccgccugcuggagaucacccgggaguucuccgugaacgcgggggugaccacccccgucagcacguacaugcucaccaacagcgagcugcugucccucaucaacgacaugcccaucaccaacgaccagaagaagcugaugagcaacaacgugcagaucgugcgccagcaguccuacagcaucaugugcaucaucaaggaggagguccuggccuacguggugcagcucccgcuguacggcgucaucgacacccccugcuggaagcugcacacgagcccccucugcaccaccaacaccaaggaggggagcaacaucugccugacgcggaccgaccgcggcugguacugcgacaacgccggcuccgugagcuucuucccccaggccgagaccugcaagguccaguccaaccggguguucugcgacaccaugaacagccugacgcucccguccgaggugaaccugugcaacgucgacaucuucaaccccaaguacgacugcaagaucaugaccagcaagaccgacguguccagcuccgugaucaccagccugggggccaucgucuccugcuacggcaagacgaagugcaccgcgagcaacaagaaccgcgggaucaucaagaccuucuccaacggcugcgacuacgugagcaacaagggcguggacaccgucagcguggggaacacccucuacuacgugaacaagcaggagggcaagucccuguacgucaagggggagcccaucaucaacuucuacgacccccugguguucccgagcgacgaguucgacgccuccaucagccaggugaacgagaagaucaaccagucccucgccuucauccggaaguccgacgagcugcugcacaacgucaacgccggcaaguccacgaccaacaucaugaucaccaccaucaucaucgugaucaucgugauccugcucagccugaucgccgucgggcugcuccuguacugcaaggcgcgcuccacgcccgugacccugagcaaggaccagcucuccggcaucaacaacaucgccuucagcaacugaggacuagugaagggaacacccaaauuuaauucagccuuaagcacaauuaauuaagagugaaacguaauuguacaagcaguuggucacccaccauagggcaugaucaacaccgcaaccuuuccuuuuucccccagugauucugaaaaaccccucuucccuucagcuugcuuagauguuccaaauuuaguaagcuuaaggcggccuacagaagaaaaagaaaaaaaaggccacaaaaguucccucucacuuucaguaaauaaaauaaaagcagcaacagaaauaaagaaauaaaugaaauucaaaaugaaauaaauauuguguugugcagcauuaaaaaaucaauaaaaauuaaaaaugagcaagaucuaaaaaaaaaaaaaaaaaaaaaaaaaaaaaaaaaaaaaaaaaaaaaaaaaaaaaaaaaaaaaaaaugcaucccccccccccccccccccccccccccccccaaaggcucuuuucagagccaccagaauu

SEQ ID NO: 1117 - RNA, 2310 nt, Artificial Sequence
  mRNA product Design f-1 comprising derived and/or modified sequence from HRSV(A2)__F0_DSCav1 (opt2)
gggagagcggcucggccauuuugucccagucaguccggaggcugcggcugcagaaguaccgccugcggaguaacugcaaagaagcuuaccauggagcuccucauccucaaggccaacgccaucaccaccauccucaccgccgucaccuucugcuucgccuccggccagaacaucaccgaggaguucuaccaguccaccugcuccgccgucuccaagggcuaccucuccgcccuccgcaccggcugguacaccuccgucaucaccaucgagcucuccaacaucaaggagaacaagugcaacggcaccgacgccaaggucaagcucaucaagcaggagcucgacaaguacaagaacgccgucaccgagcuccagcuccucaugcaguccacccccgccaccaacaaccgcgcccgccgcgagcucccccgcuucaugaacuacacccucaacaacgccaagaagaccaacgucacccucuccaagaagcgcaagcgccgcuuccucggcuuccuccucggcgucggcuccgccaucgccuccggcgucgccgucugcaagguccuccaccucgagggcgaggucaacaagaucaaguccgcccuccucuccaccaacaaggccgucgucucccucuccaacggcgucuccguccucaccuucaagguccucgaccucaagaacuacaucgacaagcagcuccuccccauccucaacaagcaguccugcuccaucuccaacaucgagaccgucaucgaguuccagcagaagaacaaccgccuccucgagaucacccgcgaguucuccgucaacgccggcgucaccacccccgucuccaccuacaugcucaccaacuccgagcuccucucccucaucaacgacaugcccaucaccaacgaccagaagaagcucauguccaacaacguccagaucguccgccagcaguccuacuccaucaugugcaucaucaaggaggagguccucgccuacgucguccagcucccccucuacggcgucaucgacacccccugcuggaagcuccacaccuccccccucugcaccaccaacaccaaggagggcuccaacaucugccucacccgcaccgaccgcggcugguacugcgacaacgccggcuccgucuccuucuucccccaggccgagaccugcaagguccaguccaaccgcgucuucugcgacaccaugaacucccucacccuccccuccgaggucaaccucugcaacgucgacaucuucaaccccaaguacgacugcaagaucaugaccuccaagaccgacgucuccuccuccgucaucaccucccucggcgccaucgucuccugcuacggcaagaccaagugcaccgccuccaacaagaaccgcggcaucaucaagaccuucuccaacggcugcgacuacgucuccaacaagggcgucgacaccgucuccgucggcaacacccucuacuacgucaacaagcaggagggcaagucccucuacgucaagggcgagcccaucaucaacuucuacgacccccucgucuuccccuccgacgaguucgacgccuccaucucccaggucaacgagaagaucaaccagucccucgccuucauccgcaaguccgacgagcuccuccacaacgucaacgccggcaaguccaccaccaacaucaugaucaccaccaucaucaucgucaucaucgucauccuccucucccucaucgccgucggccuccuccucuacugcaaggcccgcuccacccccgucacccucuccaaggaccagcucuccggcaucaacaacaucgccuucuccaacugaggacuagugaagggaacacccaaauuuaauucagccuuaagcacaauuaauuaagagugaaacguaauuguacaagcaguuggucacccaccauagggcaugaucaacaccgcaaccuuuccuuuuucccccagugauucugaaaaaccccucuucccuucagcuugcuuagauguuccaaauuuaguaagcuuaaggcggccuacagaagaaaaagaaaaaaaaggccacaaaaguucccucucacuuucaguaaauaaaauaaaagcagcaacagaaauaaagaaauaaaugaaauucaaaaugaaauaaauauuguguugugcagcauuaaaaaaucaauaaaaauuaaaaaugagcaagaucuaaaaaaaaaaaaaaaaaaaaaaaaaaaaaaaaaaaaaaaaaaaaaaaaaaaaaaaaaaaaaaaaugcaucccccccccccccccccccccccccccccccaaaggcucuuuucagagccaccagaauu

SEQ ID NO: 1118 - RNA, 2310 nt, Artificial Sequence
  mRNA product Design f-1 comprising derived and/or modified sequence from HRSV(A2)__F0_DSCav1 (opt3)
gggagagcggcucggccauuuugucccagucaguccggaggcugcggcugcagaaguaccgccugcggaguaacugcaaagaagcuuaccauggagcugcucauccuuaaggccaacgcuauuaccacaauacugacugcagugacguucugcuuugccagcggccagaauaucaccgaagaguucuaccaauccacauguucugcggucucaaaaggguauuugagugcuuuaagaacuggaugguacaccagcguuauuacaaucgaacuguccaacauuaaggagaauaaaugcaacgguaccgacgccaaggugaaacuaaucaagcaggaacucgauaaguauaaaaaugcaguaacugagcugcagcuucugaugcagucuacacccgccaccaacaauagggcucggcgcgaguugccucgauuuaugaacuacacgcucaauaacgcaaagaaaacuaaugugacccugucgaagaaacguaagagaagguuccugggcuuucucuuaggggucggaucagccauagcuagcggcguggccguuuguaaggugcugcaccuugaaggugaggucaacaaaaucaagagugcguugcuguccacaaauaaagcagugguaucucuaagcaacgggguuuccgugcucacuuucaagguccuggaccuuaaaaauuauauugauaagcaacuguugccaauccucaacaaacagucaugcaguauuagcaacaucgaaaccgugauagaguuucagcagaagaauaaccggcuguuagagauuacacgcgaguucucugugaaugccggagucaccacgccgguuuccacuuacaugcugacaaacucagaacuccuuagccugaucaaugacaugcccauuaccaacgaucaaaagaaauugaugaguaauaacgugcagaucguaagacagcagucuuauuccaucauguguauuauaaaggaagaggugcuagcuuacgucgugcaacugccucucuacggcguuaucgacacuccaugcuggaaacugcauacaagcccccuuuguaccacgaauaccaaggaaggcucgaacauuugccugacaaggacugaucgggggugguauugugacaaugccggaucuguguccuuuuucccucaggcagagaccugcaaaguccagucaaaccgcguguuuugugauacaaugaauaguuugacucucccaagcgagguaaaccugugcaauguugacaucuucaaccccaaguacgauugcaagauaaugaccuccaaaacagacgugucuagcucagucauuaccaguuuaggugcuaucguguccuguuauggcaagacuaaaugcacggccagcaacaagaaucgagggaucauuaaaacauuuucuaacggaugugauuacgucucaaauaagggcguggacaccguuaguguggguaacacucuguauuacguaaauaagcaagaagggaaaagccuauaugucaagggagagccuaucauuaacuucuacgacccacucguguucccguccgaugaauuugacgcgucuauaucgcagguuaaugagaaaaucaaccagagccuggccuucauuagaaaguccgaugaacuuuugcacaaugugaacgcaggcaaaucaaccacaaauaucaugaucaccacuauuauaaucgucauuaucgugauucugcucagucugaucgcuguaggccuucuguuguacugcaaggccaggucuacacccgugacgcucagcaaggaccagcuguccgggauaaacaauaucgcuuuuucaaacugaggacuagugaagggaacacccaaauuuaauucagccuuaagcacaauuaauuaagagugaaacguaauuguacaagcaguuggucacccaccauagggcaugaucaacaccgcaaccuuuccuuuuucccccagugauucugaaaaaccccucuucccuucagcuugcuuagauguuccaaauuuaguaagcuuaaggcggccuacagaagaaaaagaaaaaaaaggccacaaaaguucccucucacuuucaguaaauaaaauaaaagcagcaacagaaauaaagaaauaaaugaaauucaaaaugaaauaaauauuguguugugcagcauuaaaaaaucaauaaaaauuaaaaaugagcaagaucuaaaaaaaaaaaaaaaaaaaaaaaaaaaaaaaaaaaaaaaaaaaaaaaaaaaaaaaaaaaaaaaaugcaucccccccccccccccccccccccccccccccaaaggcucuuuucagagccaccagaauu

SEQ ID NO: 1119 - RNA, 2310 nt, Artificial Sequence
  mRNA product Design f-1 comprising derived and/or modified sequence from HRSV(A2)__F0_DSCav1 (opt4)
gggagagcggcucggccauuuugucccagucaguccggaggcugcggcugcagaaguaccgccugcggaguaacugcaaagaagcuuaccauggagcugcugauccugaaggccaacgccaucaccaccauccugaccgccgugaccuucugcuucgccagcggccagaacaucaccgaggaguucuaccagagcaccugcagcgccgugagcaagggcuaccugagcgcccugagaaccggcugguacaccagcgugaucaccaucgagcugagcaacaucaaggagaacaagugcaacggcaccgacgccaaggugaagcugaucaagcaggagcuggacaaguacaagaacgccgugaccgagcugcagcugcugaugcagagcacccccgccaccaacaacagagccagaagagagcugcccagauucaugaacuacacccugaacaacgccaagaagaccaacgugacccugagcaagaagagaaagagaagauuccugggcuuccugcugggcgugggcagcgccaucgccagcggcguggccgugugcaaggugcugcaccuggagggcgaggugaacaagaucaagagcgcccugcugagcaccaacaaggccguggugagccugagcaacggcgugagcgugcugaccuucaaggugcuggaccugaagaacuacaucgacaagcagcugcugcccauccugaacaagcagagcugcagcaucagcaacaucgagaccgugaucgaguuccagcagaagaacaacagacugcuggagaucaccagagaguucagcgugaacgccggcgugaccacccccgugagcaccuacaugcugaccaacagcgagcugcugagccugaucaacgacaugcccaucaccaacgaccagaagaagcugaugagcaacaacgugcagaucgugagacagcagagcuacagcaucaugugcaucaucaaggaggaggugcuggccuacguggugcagcugccccuguacggcgugaucgacacccccugcuggaagcugcacaccagcccccugugcaccaccaacaccaaggagggcagcaacaucugccugaccagaaccgacagaggcugguacugcgacaacgccggcagcgugagcuucuucccccaggccgagaccugcaaggugcagagcaacagaguguucugcgacaccaugaacagccugacccugcccagcgaggugaaccugugcaacguggacaucuucaaccccaaguacgacugcaagaucaugaccagcaagaccgacgugagcagcagcgugaucaccagccugggcgccaucgugagcugcuacggcaagaccaagugcaccgccagcaacaagaacagaggcaucaucaagaccuucagcaacggcugcgacuacgugagcaacaagggcguggacaccgugagcgugggcaacacccuguacuacgugaacaagcaggagggcaagagccuguacgugaagggcgagcccaucaucaacuucuacgacccccugguguuccccagcgacgaguucgacgccagcaucagccaggugaacgagaagaucaaccagagccuggccuucaucagaaagagcgacgagcugcugcacaacgugaacgccggcaagagcaccaccaacaucaugaucaccaccaucaucaucgugaucaucgugauccugcugagccugaucgccgugggccugcugcuguacugcaaggccagaagcacccccgugacccugagcaaggaccagcugagcggcaucaacaacaucgccuucagcaacugaggacuagugaagggaacacccaaauuuaauucagccuuaagcacaauuaauuaagagugaaacguaauuguacaagcaguuggucacccaccauagggcaugaucaacaccgcaaccuuuccuuuuucccccagugauucugaaaaaccccucuucccuucagcuugcuuagauguuccaaauuuaguaagcuuaaggcggccuacagaagaaaaagaaaaaaaaggccacaaaaguucccucucacuuucaguaaauaaaauaaaagcagcaacagaaauaaagaaauaaaugaaauucaaaaugaaauaaauauuguguugugcagcauuaaaaaaucaauaaaaauuaaaaaugagcaagaucuaaaaaaaaaaaaaaaaaaaaaaaaaaaaaaaaaaaaaaaaaaaaaaaaaaaaaaaaaaaaaaaaugcaucccccccccccccccccccccccccccccccaaaggcucuuuucagagccaccagaauu

SEQ ID NO: 1120 - RNA, 2310 nt, Artificial Sequence
  mRNA product Design f-1 comprising derived and/or modified sequence from HRSV(A2)__F0_DSCav1 (opt5)
gggagagcggcucggccauuuugucccagucaguccggaggcugcggcugcagaaguaccgccugcggaguaacugcaaagaagcuuaccauggagcugcucauccugaaggccaacgcuauuaccacaauccuuacggccgugaccuucugcuuugcgagcggccagaauauuacagaagaguucuaccaauccaccuguucugcugucagcaaaggguaucuguccgcccucagaacaggaugguacaccucuguuaucacaauugaacugagcaacaucaaggagaauaaaugcaacggcaccgacgccaaggugaaacuuaucaagcaggaacuggauaaguauaaaaaugcugugacggagcuccagcugcugaugcaguccacccccgccacaaacaaucgggcucgcagagagcucccucgguuuaugaacuacacccugaauaacgccaagaaaacaaaugucacccuuucuaagaaacgcaagagacgguuccugggguuucuccugggagugggcagcgcgauugccuccgggguugcuguguguaagguccuucaccuggaaggagaggugaacaaaaucaagagcgcccuccugucuacgaauaaagcuguugugucccugagcaacggcgucucugugcucacauucaaggugcuggaccuuaaaaauuauauugauaagcaacugcucccgauccugaacaaacaguccugcagcauuucuaacaucgaaaccgucauugaguuucagcagaagaauaaccgccuucuggagaucacaagagaauuuuccguuaaugccggcgugaccacccccgugagcacauacaugcucacgaacuccgagcugcugucucucaucaaugacaugccuauuaccaacgaucaaaagaaacugaugagcaauaacguccagaucgugcggcagcaguccuauagcauuauguguaucauuaaggaagagguucuugcguacgugguccaacugccccucuacggggugaucgacacaccuugcuggaaacugcauaccucuccccuuuguacaaccaauacgaaggaaggauccaacaucugccugacacgcaccgauagaggcugguauugugacaaugccgggagcguuucuuucuucccucaggcugagaccugcaaagugcagagcaaccgggucuuuugugauacaaugaacucccucacccugccgucugaggugaaucugugcaaugucgacauuuucaaccccaaguacgauugcaagaucaugacaagcaaaacggacguguccagcucuguuauuaccucccucggagccaucgugagcuguuauggcaagacaaaaugcaccgcuucuaacaagaaucgcgggauuaucaaaacauuuuccaacggaugugauuacgucagcaauaagggcguggacaccguuuccgugggcaacacgcuguauuacgucaauaagcaagaagggaaaucucuuuaugugaagggagagccuaucauuaacuucuacgacccccugguguucccuagcgaugaauuugacgccuccaucucucagguuaaugagaaaauuaaccagagccucgccuucaucagaaaguccgaugaacugcugcacaaugucaacgcuggcaaaagcaccacaaauauuaugaucaccacaauuaucaucgugauuaucgugauucuucucucucugaucgcggucgggcugcuccuguacugcaaggcccgguccacccccgugacgcuuagcaaggaccagcugucuggaauuaacaauaucgcuuuuuccaacugaggacuagugaagggaacacccaaauuuaauucagccuuaagcacaauuaauuaagagugaaacguaauuguacaagcaguuggucacccaccauagggcaugaucaacaccgcaaccuuuccuuuuucccccagugauucugaaaaaccccucuucccuucagcuugcuuagauguuccaaauuuaguaagcuuaaggcggccuacagaagaaaaagaaaaaaaaggccacaaaaguucccucucacuuucaguaaauaaaauaaaagcagcaacagaaauaaagaaauaaaugaaauucaaaaugaaauaaauauuguguugugcagcauuaaaaaaucaauaaaaauuaaaaaugagcaagaucuaaaaaaaaaaaaaaaaaaaaaaaaaaaaaaaaaaaaaaaaaaaaaaaaaaaaaaaaaaaaaaaaugcaucccccccccccccccccccccccccccccccaaaggcucuuuucagagccaccagaauu

SEQ ID NO: 1121 - RNA, 2310 nt, Artificial Sequence
  mRNA product Design f-1 comprising derived and/or modified sequence from HRSV(A2)__F0_DSCav1 (opt6)
gggagagcggcucggccauuuugucccagucaguccggaggcugcggcugcagaaguaccgccugcggaguaacugcaaagaagcuuaccauggaauuauuaauccucaaagcgaacgcuauuacuaccauucuaacagcagucacauucugcuucgccucaggccaaaacauuacagaagaauuuuaccaaucaacaugcucugccguaucaaaaggcuaccuauccgcccuacgaacaggcugguacacaagcguaauaacaaucgaacuaucaaacauaaaagaaaacaaaugcaacgguacagacgccaaaguuaaacuaauaaaacaagaacucgauaaauacaaaaacgcaguaacagaauuacaacuacuaaugcaaucaacaccugcaacaaacaauagagccaggagagaauuaccucgauucaugaauuacacacucaauaacgcaaaaaaaaccaacguuacacuaucaaaaaaaagaaaacgacgauucuuaggauuccuacucggagucggaucagcaauagcaucuggcguugcaguaugcaaaguauuacacuuagaaggugaagucaauaaaauaaaaagcgcgcuacuaaguacaaacaaagcagucgucucccuaucaaacggagucucaguccuaacauucaaaguacucgaccuaaaaaauuacauagauaaacaacuacuuccaauauuaaacaaacaauccuguagcaucagcaauauagaaacaguaauagaauuucaacaaaaaaacaaccgauuauuagaaaucacucgagaauuuuccguaaacgccgggguaacaacuccagucucaaccuacaugcuaaccaauucagaacuauugagcuuaauaaacgacaugccaauaaccaacgaccaaaaaaaacuaaugucuaacaauguucaaaucgucagacaacaaaguuacaguauaauguguauaaucaaagaagaaguccuagcauacguaguccaacucccacuauauggaguuaucgacacaccauguuggaaauuacacaccucaccauuaugcacaaccaauacaaaagaaggaucaaacauaugccuuacacggacagaccgcggaugguauugugacaacgcuggcucagucuccuuuuucccacaagcagaaacaugcaaaguacaaucaaacagagucuuuugcgauaccaugaacucacuuacauuaccaagcgaaguaaaucuuuguaacgucgacaucuucaauccuaaauaugacugcaaaaucaugaccucaaaaacagacguuagcucuucaguaaucacuagcuuaggagcaaucguaucaugcuacggcaaaacaaaauguacagcaucaaauaaaaacagaggaaucauaaaaacauuuucaaacggaugcgauuauguaagcaacaaaggaguagauacuguaagcguaggaaacacauuguacuauguaaacaaacaagaaggaaaaucacucuauguaaaaggagaaccuauaaucaauuucuacgauccauuaguguucccaucagaugaauuugacgccucaauaucacaaguuaaugaaaaaauaaaucaaucgcuagcauucauacguaaaucagaugaauuacuacauaacguaaacgcaggcaaauccacaacaaauaucaugaucacaacaauuauaauaguaauaauaguaauacuacuaucacuaauagccguaggacuccuacuauacugcaaagcaagaucuacuccaguaacccucucaaaagaucaacuaagcggaauuaauaacaucgcauucagcaacuaaggacuagugaagggaacacccaaauuuaauucagccuuaagcacaauuaauuaagagugaaacguaauuguacaagcaguuggucacccaccauagggcaugaucaacaccgcaaccuuuccuuuuucccccagugauucugaaaaaccccucuucccuucagcuugcuuagauguuccaaauuuaguaagcuuaaggcggccuacagaagaaaaagaaaaaaaaggccacaaaaguucccucucacuuucaguaaauaaaauaaaagcagcaacagaaauaaagaaauaaaugaaauucaaaaugaaauaaauauuguguugugcagcauuaaaaaaucaauaaaaauuaaaaaugagcaagaucuaaaaaaaaaaaaaaaaaaaaaaaaaaaaaaaaaaaaaaaaaaaaaaaaaaaaaaaaaaaaaaaaugcaucccccccccccccccccccccccccccccccaaaggcucuuuucagagccaccagaauu

SEQ ID NO: 1122 - RNA, 2310 nt, Artificial Sequence
  mRNA product Design f-1 comprising derived and/or modified sequence from HRSV(A2)__F0_DSCav1 (opt11)
gggagagcggcucggccauuuugucccagucaguccggaggcugcggcugcagaaguaccgccugcggaguaacugcaaagaagcuuaccauggaacuacuuauccucaaagccaacgccaucaccaccauccucacagcaguaaccuuuugcuucgccucaggccaaaauaucacagaagaauuuuaccagaguaccugcuccgccguauccaaaggauaccucagcgcgcuccgcaccggcugguacacuucaguaaucacaaucgaacuauccaacaucaaagaaaacaaaugcaacggcaccgacgcgaaagucaaacucaucaaacaagaacuagacaaauacaaaaaugccguaacagaacuacaacuguuaaugcagagcacacccgccaccaacaaccgcgcccgccgggaacucccccgauucaugaacuacacacucaacaacgccaaaaagacgaacgucacccucagcaagaaacgaaaacgcagauuccucgguuuccuacuaggcguaggcucagcaauagccuccggaguagccgucugcaaaguccugcacuuagaaggcgaagucaacaaaaucaaauccgcccuacucuccacgaacaaagccgucgucucccuguccaacggugucuccguuuuaaccuucaaaguucuggaccucaaaaacuacauagacaaacagcuucuccccauccucaacaaacaauccuguagcaucuccaacaucgaaaccgucauagaauuucaacagaaaaacaacagacugcucgaaaucacccgcgaguucuccgucaacgccggcgucacgacucccgucuccaccuauaugcucacgaacucggaacuccuuucccuaaucaacgacaugccgaucaccaacgaccaaaagaaacucaugucaaacaacguacaaauuguccgccaacaaucauacuccaucaugugcauaauuaaagaagaaguccucgcauacguaguccaacucccccucuacggcgucaucgacacccccugcuggaaacuccacaccuccccacucugcacaaccaacaccaaagaaggcucaaacauaugccuaacgcgcaccgaucgcgguugguacugcgacaacgccgguuccgucagcuucuucccccaagcagagacaugcaaaguccaaucaaaccgcgucuucugcgacaccaugaacucacuaacccuuccaagcgaagucaaccucugcaacguugacaucuucaaccccaaauacgacuguaaaaucaugaccuccaagaccgacguauccucuuccgucaucacaucccuaggcgcuaucguauccugcuaugguaaaaccaaaugcaccgccuccaacaaaaaccgcggcaucaucaagacauuuuccaacggcugcgacuacgugagcaacaaaggcgucgacaccgucuccguaggcaacacccucuacuauguaaacaaacaagagggcaaaucacucuacgucaaaggggaacccaucaucaacuucuacgacccgcucguauuccccagcgaugaguucgacgccuccaucucccaggucaacgaaaagauaaaccaaucacucgcauucauucguaaauccgacgaacuccuacacaacgugaaugcaggcaaaucgaccacuaacaucaugaucaccaccaucaucaucgucaucauagucauccuccugucccuuaucgccgucggucuuuuauuauacugcaaagcccgcagcacccccgucacccucucuaaggaccaacucagcggcaucaauaacaucgcauucucuaacuaaggacuagugaagggaacacccaaauuuaauucagccuuaagcacaauuaauuaagagugaaacguaauuguacaagcaguuggucacccaccauagggcaugaucaacaccgcaaccuuuccuuuuucccccagugauucugaaaaaccccucuucccuucagcuugcuuagauguuccaaauuuaguaagcuuaaggcggccuacagaagaaaaagaaaaaaaaggccacaaaaguucccucucacuuucaguaaauaaaauaaaagcagcaacagaaauaaagaaauaaaugaaauucaaaaugaaauaaauauuguguugugcagcauuaaaaaaucaauaaaaauuaaaaaugagcaagaucuaaaaaaaaaaaaaaaaaaaaaaaaaaaaaaaaaaaaaaaaaaaaaaaaaaaaaaaaaaaaaaaaugcaucccccccccccccccccccccccccccccccaaaggcucuuuucagagccaccagaauu

SEQ ID NO: 1123 - RNA, 2090 nt, Artificial Sequence
  mRNA product Design f-2 comprising derived and/or modified sequence from HRSV(A2)__F0_DSCav1 (opt1)
gggagagcggcucggccauuuugucccagucaguccggaggcugcggcugcagaaguaccgccugcggaguaacugcaaagaagcuuaccauggagcugcucauccugaaggccaacgccaucaccaccauccugacggcggugaccuucugcuucgccagcggccagaacaucaccgaggaguucuaccaguccacgugcagcgccgucuccaagggguaccucagcgcccugcggaccggcugguacaccuccgugaucaccaucgagcugagcaacaucaaggagaacaagugcaacgggaccgacgccaaggugaagcucaucaagcaggagcuggacaaguacaagaacgcggucacggagcugcagcuccugaugcaguccaccccggcaaccaacaaccgcgcccggcgcgagcugccccgguucaugaacuacacccucaacaacgccaagaagacgaacgugacccugagcaagaagcgcaagcggcgcuuccugggcuuccuccugggggugggcuccgccaucgcgagcggcgucgccgugugcaaggugcugcaccucgagggggaggucaacaagaucaagagcgcccugcuguccaccaacaaggccguggugagccucuccaacggcgucagcgugcugaccuucaaggugcuggaccucaagaacuacaucgacaagcagcugcugcccauccugaacaagcagagcugcuccaucagcaacaucgagacggugaucgaguuccagcagaagaacaaccggcuccuggagaucacccgcgaguucagcgugaacgccggggucaccacccccguguccacguacaugcugaccaacagcgagcuccugucccugaucaacgacaugccgaucaccaacgaccagaagaagcucaugagcaacaacgugcagaucguccggcagcaguccuacagcaucaugugcaucaucaaggaggaggugcuggcguacgugguccagcugccccucuacggcgugaucgacacccccugcuggaagcugcacacgagcccccugugcaccaccaacaccaaggagggguccaacaucugccucacgcgcaccgaccggggcugguacugcgacaacgccggcagcgucuccuucuucccgcaggccgagaccugcaaggugcagagcaaccgcguguucugcgacaccaugaacucccugacgcugcccagcgagguaaaccucugcaacgucgacaucuucaaccccaaguacgacugcaagaucaugaccuccaagaccgacgugagcuccagcgugaucaccucccugggggccaucgucagcugcuacggcaagacgaagugcaccgccagcaacaagaaccgggggaucaucaagaccuucuccaacggcugcgacuacgugagcaacaagggcguggacaccguguccgucgggaacacccuguacuacgugaacaagcaggagggcaagagccucuacgugaagggggagcccaucaucaacuucuacgacccgcuggucuuccccuccgacgaguucgacgcgagcaucucccaggugaacgagaagaucaaccagagccuggccuucauccgcaaguccgacgagcugcuccacaacgugaacgccggcaagagcacgaccaacaucaugaucaccaccaucaucaucgucaucaucgugauccugcugucccucaucgccguggggcugcugcucuacugcaaggcccggagcacgcccgucacccuguccaaggaccagcugagcggcaucaacaacaucgcguucuccaacugaggacuaguggaagcauuuuccuggcugauuaaaagaaauuacucagcuauggucaucuguuccuguuagaaggcuaugcagcauauuauauacuaugcgcauguuaugaaaugcauaauaaaaaauuuuaaaaaaucuaaaagaucuaaaaaaaaaaaaaaaaaaaaaaaaaaaaaaaaaaaaaaaaaaaaaaaaaaaaaaaaaaaaaaaaugcaucccccccccccccccccccccccccccccccaaaggcucuuuucagagccaccagaauu

SEQ ID NO: 1124 - RNA, 2090 nt, Artificial Sequence
  mRNA product Design f-2 comprising derived and/or modified sequence from HRSV(A2)__F0_DSCav1 (opt1)
gggagagcggcucggccauuuugucccagucaguccggaggcugcggcugcagaaguaccgccugcggaguaacugcaaagaagcuuaccauggagcugcucauccugaaggccaacgccaucaccaccauccugacggcggugaccuucugcuucgccagcggccagaacaucaccgaggaguucuaccaguccacgugcagcgccgucuccaagggguaccucagcgcccugcgcaccggcugguacaccuccgugaucaccaucgagcugagcaacaucaaggagaacaagugcaacgggaccgacgccaaggugaagcucaucaagcaggagcuggacaaguacaagaacgcggucacggagcugcagcuccugaugcaguccacccccgccaccaacaaccgggcccgccgggagcugccgcgcuucaugaacuacacccucaacaacgccaagaagacgaacgugacccugagcaagaagcggaagcgccgguuccugggcuuccuccugggggugggcuccgcgaucgccagcggcgucgccgugugcaaggugcugcaccucgagggggaggucaacaagaucaaguccgcccugcugagcaccaacaaggccguggugucccucagcaacggcgucuccgugcugaccuucaaggugcuggaccucaagaacuacaucgacaagcagcugcugcccauccucaacaagcagagcugcuccaucagcaacaucgagacggucaucgaguuccagcagaagaacaaccgccugcuggagaucacccgggaguucuccgugaacgcgggggugaccacccccgucagcacguacaugcucaccaacagcgagcugcugucccucaucaacgacaugcccaucaccaacgaccagaagaagcugaugagcaacaacgugcagaucgugcgccagcaguccuacagcaucaugugcaucaucaaggaggagguccuggccuacguggugcagcucccgcuguacggcgucaucgacacccccugcuggaagcugcacacgagcccccucugcaccaccaacaccaaggaggggagcaacaucugccugacgcggaccgaccgcggcugguacugcgacaacgccggcuccgugagcuucuucccccaggccgagaccugcaagguccaguccaaccggguguucugcgacaccaugaacagccugacgcucccguccgaggugaaccugugcaacgucgacaucuucaaccccaaguacgacugcaagaucaugaccagcaagaccgacguguccagcuccgugaucaccagccugggggccaucgucuccugcuacggcaagacgaagugcaccgcgagcaacaagaaccgcgggaucaucaagaccuucuccaacggcugcgacuacgugagcaacaagggcguggacaccgucagcguggggaacacccucuacuacgugaacaagcaggagggcaagucccuguacgucaagggggagcccaucaucaacuucuacgacccccugguguucccgagcgacgaguucgacgccuccaucagccaggugaacgagaagaucaaccagucccucgccuucauccggaaguccgacgagcugcugcacaacgucaacgccggcaaguccacgaccaacaucaugaucaccaccaucaucaucgugaucaucgugauccugcucagccugaucgccgucgggcugcuccuguacugcaaggcgcgcuccacgcccgugacccugagcaaggaccagcucuccggcaucaacaacaucgccuucagcaacugaggacuaguggaagcauuuuccuggcugauuaaaagaaauuacucagcuauggucaucuguuccuguuagaaggcuaugcagcauauuauauacuaugcgcauguuaugaaaugcauaauaaaaaauuuuaaaaaaucuaaaagaucuaaaaaaaaaaaaaaaaaaaaaaaaaaaaaaaaaaaaaaaaaaaaaaaaaaaaaaaaaaaaaaaaugcaucccccccccccccccccccccccccccccccaaaggcucuuuucagagccaccagaauu

SEQ ID NO: 1125 - RNA, 2090 nt, Artificial Sequence
  mRNA product Design f-2 comprising derived and/or modified sequence from HRSV(A2)__F0_DSCav1 (opt2)
gggagagcggcucggccauuuugucccagucaguccggaggcugcggcugcagaaguaccgccugcggaguaacugcaaagaagcuuaccauggagcuccucauccucaaggccaacgccaucaccaccauccucaccgccgucaccuucugcuucgccuccggccagaacaucaccgaggaguucuaccaguccaccugcuccgccgucuccaagggcuaccucuccgcccuccgcaccggcugguacaccuccgucaucaccaucgagcucuccaacaucaaggagaacaagugcaacggcaccgacgccaaggucaagcucaucaagcaggagcucgacaaguacaagaacgccgucaccgagcuccagcuccucaugcaguccacccccgccaccaacaaccgcgcccgccgcgagcucccccgcuucaugaacuacacccucaacaacgccaagaagaccaacgucacccucuccaagaagcgcaagcgccgcuuccucggcuuccuccucggcgucggcuccgccaucgccuccggcgucgccgucugcaagguccuccaccucgagggcgaggucaacaagaucaaguccgcccuccucuccaccaacaaggccgucgucucccucuccaacggcgucuccguccucaccuucaagguccucgaccucaagaacuacaucgacaagcagcuccuccccauccucaacaagcaguccugcuccaucuccaacaucgagaccgucaucgaguuccagcagaagaacaaccgccuccucgagaucacccgcgaguucuccgucaacgccggcgucaccacccccgucuccaccuacaugcucaccaacuccgagcuccucucccucaucaacgacaugcccaucaccaacgaccagaagaagcucauguccaacaacguccagaucguccgccagcaguccuacuccaucaugugcaucaucaaggaggagguccucgccuacgucguccagcucccccucuacggcgucaucgacacccccugcuggaagcuccacaccuccccccucugcaccaccaacaccaaggagggcuccaacaucugccucacccgcaccgaccgcggcugguacugcgacaacgccggcuccgucuccuucuucccccaggccgagaccugcaagguccaguccaaccgcgucuucugcgacaccaugaacucccucacccuccccuccgaggucaaccucugcaacgucgacaucuucaaccccaaguacgacugcaagaucaugaccuccaagaccgacgucuccuccuccgucaucaccucccucggcgccaucgucuccugcuacggcaagaccaagugcaccgccuccaacaagaaccgcggcaucaucaagaccuucuccaacggcugcgacuacgucuccaacaagggcgucgacaccgucuccgucggcaacacccucuacuacgucaacaagcaggagggcaagucccucuacgucaagggcgagcccaucaucaacuucuacgacccccucgucuuccccuccgacgaguucgacgccuccaucucccaggucaacgagaagaucaaccagucccucgccuucauccgcaaguccgacgagcuccuccacaacgucaacgccggcaaguccaccaccaacaucaugaucaccaccaucaucaucgucaucaucgucauccuccucucccucaucgccgucggccuccuccucuacugcaaggcccgcuccacccccgucacccucuccaaggaccagcucuccggcaucaacaacaucgccuucuccaacugaggacuaguggaagcauuuuccuggcugauuaaaagaaauuacucagcuauggucaucuguuccuguuagaaggcuaugcagcauauuauauacuaugcgcauguuaugaaaugcauaauaaaaaauuuuaaaaaaucuaaaagaucuaaaaaaaaaaaaaaaaaaaaaaaaaaaaaaaaaaaaaaaaaaaaaaaaaaaaaaaaaaaaaaaaugcaucccccccccccccccccccccccccccccccaaaggcucuuuucagagccaccagaauu

SEQ ID NO: 1126 - RNA, 2090 nt, Artificial Sequence
  mRNA product Design f-2 comprising derived and/or modified sequence from HRSV(A2)__F0_DSCav1 (opt3)
gggagagcggcucggccauuuugucccagucaguccggaggcugcggcugcagaaguaccgccugcggaguaacugcaaagaagcuuaccauggagcugcucauccuuaaggccaacgcuauuaccacaauacugacugcagugacguucugcuuugccagcggccagaauaucaccgaagaguucuaccaauccacauguucugcggucucaaaaggguauuugagugcuuuaagaacuggaugguacaccagcguuauuacaaucgaacuguccaacauuaaggagaauaaaugcaacgguaccgacgccaaggugaaacuaaucaagcaggaacucgauaaguauaaaaaugcaguaacugagcugcagcuucugaugcagucuacacccgccaccaacaauagggcucggcgcgaguugccucgauuuaugaacuacacgcucaauaacgcaaagaaaacuaaugugacccugucgaagaaacguaagagaagguuccugggcuuucucuuaggggucggaucagccauagcuagcggcguggccguuuguaaggugcugcaccuugaaggugaggucaacaaaaucaagagugcguugcuguccacaaauaaagcagugguaucucuaagcaacgggguuuccgugcucacuuucaagguccuggaccuuaaaaauuauauugauaagcaacuguugccaauccucaacaaacagucaugcaguauuagcaacaucgaaaccgugauagaguuucagcagaagaauaaccggcuguuagagauuacacgcgaguucucugugaaugccggagucaccacgccgguuuccacuuacaugcugacaaacucagaacuccuuagccugaucaaugacaugcccauuaccaacgaucaaaagaaauugaugaguaauaacgugcagaucguaagacagcagucuuauuccaucauguguauuauaaaggaagaggugcuagcuuacgucgugcaacugccucucuacggcguuaucgacacuccaugcuggaaacugcauacaagcccccuuuguaccacgaauaccaaggaaggcucgaacauuugccugacaaggacugaucgggggugguauugugacaaugccggaucuguguccuuuuucccucaggcagagaccugcaaaguccagucaaaccgcguguuuugugauacaaugaauaguuugacucucccaagcgagguaaaccugugcaauguugacaucuucaaccccaaguacgauugcaagauaaugaccuccaaaacagacgugucuagcucagucauuaccaguuuaggugcuaucguguccuguuauggcaagacuaaaugcacggccagcaacaagaaucgagggaucauuaaaacauuuucuaacggaugugauuacgucucaaauaagggcguggacaccguuaguguggguaacacucuguauuacguaaauaagcaagaagggaaaagccuauaugucaagggagagccuaucauuaacuucuacgacccacucguguucccguccgaugaauuugacgcgucuauaucgcagguuaaugagaaaaucaaccagagccuggccuucauuagaaaguccgaugaacuuuugcacaaugugaacgcaggcaaaucaaccacaaauaucaugaucaccacuauuauaaucgucauuaucgugauucugcucagucugaucgcuguaggccuucuguuguacugcaaggccaggucuacacccgugacgcucagcaaggaccagcuguccgggauaaacaauaucgcuuuuucaaacugaggacuaguggaagcauuuuccuggcugauuaaaagaaauuacucagcuauggucaucuguuccuguuagaaggcuaugcagcauauuauauacuaugcgcauguuaugaaaugcauaauaaaaaauuuuaaaaaaucuaaaagaucuaaaaaaaaaaaaaaaaaaaaaaaaaaaaaaaaaaaaaaaaaaaaaaaaaaaaaaaaaaaaaaaaugcaucccccccccccccccccccccccccccccccaaaggcucuuuucagagccaccagaauu

SEQ ID NO: 1127 - RNA, 2090 nt, Artificial Sequence
  mRNA product Design f-2 comprising derived and/or modified sequence from HRSV(A2)__F0_DSCav1 (opt4)
gggagagcggcucggccauuuugucccagucaguccggaggcugcggcugcagaaguaccgccugcggaguaacugcaaagaagcuuaccauggagcugcugauccugaaggccaacgccaucaccaccauccugaccgccgugaccuucugcuucgccagcggccagaacaucaccgaggaguucuaccagagcaccugcagcgccgugagcaagggcuaccugagcgcccugagaaccggcugguacaccagcgugaucaccaucgagcugagcaacaucaaggagaacaagugcaacggcaccgacgccaaggugaagcugaucaagcaggagcuggacaaguacaagaacgccgugaccgagcugcagcugcugaugcagagcacccccgccaccaacaacagagccagaagagagcugcccagauucaugaacuacacccugaacaacgccaagaagaccaacgugacccugagcaagaagagaaagagaagauuccugggcuuccugcugggcgugggcagcgccaucgccagcggcguggccgugugcaaggugcugcaccuggagggcgaggugaacaagaucaagagcgcccugcugagcaccaacaaggccguggugagccugagcaacggcgugagcgugcugaccuucaaggugcuggaccugaagaacuacaucgacaagcagcugcugcccauccugaacaagcagagcugcagcaucagcaacaucgagaccgugaucgaguuccagcagaagaacaacagacugcuggagaucaccagagaguucagcgugaacgccggcgugaccacccccgugagcaccuacaugcugaccaacagcgagcugcugagccugaucaacgacaugcccaucaccaacgaccagaagaagcugaugagcaacaacgugcagaucgugagacagcagagcuacagcaucaugugcaucaucaaggaggaggugcuggccuacguggugcagcugccccuguacggcgugaucgacacccccugcuggaagcugcacaccagcccccugugcaccaccaacaccaaggagggcagcaacaucugccugaccagaaccgacagaggcugguacugcgacaacgccggcagcgugagcuucuucccccaggccgagaccugcaaggugcagagcaacagaguguucugcgacaccaugaacagccugacccugcccagcgaggugaaccugugcaacguggacaucuucaaccccaaguacgacugcaagaucaugaccagcaagaccgacgugagcagcagcgugaucaccagccugggcgccaucgugagcugcuacggcaagaccaagugcaccgccagcaacaagaacagaggcaucaucaagaccuucagcaacggcugcgacuacgugagcaacaagggcguggacaccgugagcgugggcaacacccuguacuacgugaacaagcaggagggcaagagccuguacgugaagggcgagcccaucaucaacuucuacgacccccugguguuccccagcgacgaguucgacgccagcaucagccaggugaacgagaagaucaaccagagccuggccuucaucagaaagagcgacgagcugcugcacaacgugaacgccggcaagagcaccaccaacaucaugaucaccaccaucaucaucgugaucaucgugauccugcugagccugaucgccgugggccugcugcuguacugcaaggccagaagcacccccgugacccugagcaaggaccagcugagcggcaucaacaacaucgccuucagcaacugaggacuaguggaagcauuuuccuggcugauuaaaagaaauuacucagcuauggucaucuguuccuguuagaaggcuaugcagcauauuauauacuaugcgcauguuaugaaaugcauaauaaaaaauuuuaaaaaaucuaaaagaucuaaaaaaaaaaaaaaaaaaaaaaaaaaaaaaaaaaaaaaaaaaaaaaaaaaaaaaaaaaaaaaaaugcaucccccccccccccccccccccccccccccccaaaggcucuuuucagagccaccagaauu

SEQ ID NO: 1128 - RNA, 2090 nt, Artificial Sequence
  mRNA product Design f-2 comprising derived and/or modified sequence from HRSV(A2)__F0_DSCav1 (opt5)
gggagagcggcucggccauuuugucccagucaguccggaggcugcggcugcagaaguaccgccugcggaguaacugcaaagaagcuuaccauggagcugcucauccugaaggccaacgcuauuaccacaauccuuacggccgugaccuucugcuuugcgagcggccagaauauuacagaagaguucuaccaauccaccuguucugcugucagcaaaggguaucuguccgcccucagaacaggaugguacaccucuguuaucacaauugaacugagcaacaucaaggagaauaaaugcaacggcaccgacgccaaggugaaacuuaucaagcaggaacuggauaaguauaaaaaugcugugacggagcuccagcugcugaugcaguccacccccgccacaaacaaucgggcucgcagagagcucccucgguuuaugaacuacacccugaauaacgccaagaaaacaaaugucacccuuucuaagaaacgcaagagacgguuccugggguuucuccugggagugggcagcgcgauugccuccgggguugcuguguguaagguccuucaccuggaaggagaggugaacaaaaucaagagcgcccuccugucuacgaauaaagcuguugugucccugagcaacggcgucucugugcucacauucaaggugcuggaccuuaaaaauuauauugauaagcaacugcucccgauccugaacaaacaguccugcagcauuucuaacaucgaaaccgucauugaguuucagcagaagaauaaccgccuucuggagaucacaagagaauuuuccguuaaugccggcgugaccacccccgugagcacauacaugcucacgaacuccgagcugcugucucucaucaaugacaugccuauuaccaacgaucaaaagaaacugaugagcaauaacguccagaucgugcggcagcaguccuauagcauuauguguaucauuaaggaagagguucuugcguacgugguccaacugccccucuacggggugaucgacacaccuugcuggaaacugcauaccucuccccuuuguacaaccaauacgaaggaaggauccaacaucugccugacacgcaccgauagaggcugguauugugacaaugccgggagcguuucuuucuucccucaggcugagaccugcaaagugcagagcaaccgggucuuuugugauacaaugaacucccucacccugccgucugaggugaaucugugcaaugucgacauuuucaaccccaaguacgauugcaagaucaugacaagcaaaacggacguguccagcucuguuauuaccucccucggagccaucgugagcuguuauggcaagacaaaaugcaccgcuucuaacaagaaucgcgggauuaucaaaacauuuuccaacggaugugauuacgucagcaauaagggcguggacaccguuuccgugggcaacacgcuguauuacgucaauaagcaagaagggaaaucucuuuaugugaagggagagccuaucauuaacuucuacgacccccugguguucccuagcgaugaauuugacgccuccaucucucagguuaaugagaaaauuaaccagagccucgccuucaucagaaaguccgaugaacugcugcacaaugucaacgcuggcaaaagcaccacaaauauuaugaucaccacaauuaucaucgugauuaucgugauucuucucucucugaucgcggucgggcugcuccuguacugcaaggcccgguccacccccgugacgcuuagcaaggaccagcugucuggaauuaacaauaucgcuuuuuccaacugaggacuaguggaagcauuuuccuggcugauuaaaagaaauuacucagcuauggucaucuguuccuguuagaaggcuaugcagcauauuauauacuaugcgcauguuaugaaaugcauaauaaaaaauuuuaaaaaaucuaaaagaucuaaaaaaaaaaaaaaaaaaaaaaaaaaaaaaaaaaaaaaaaaaaaaaaaaaaaaaaaaaaaaaaaugcaucccccccccccccccccccccccccccccccaaaggcucuuuucagagccaccagaauu

SEQ ID NO: 1129 - RNA, 2090 nt, Artificial Sequence
  mRNA product Design f-2 comprising derived and/or modified sequence from HRSV(A2)__F0_DSCav1 (opt6)
gggagagcggcucggccauuuugucccagucaguccggaggcugcggcugcagaaguaccgccugcggaguaacugcaaagaagcuuaccauggaauuauuaauccucaaagcgaacgcuauuacuaccauucuaacagcagucacauucugcuucgccucaggccaaaacauuacagaagaauuuuaccaaucaacaugcucugccguaucaaaaggcuaccuauccgcccuacgaacaggcugguacacaagcguaauaacaaucgaacuaucaaacauaaaagaaaacaaaugcaacgguacagacgccaaaguuaaacuaauaaaacaagaacucgauaaauacaaaaacgcaguaacagaauuacaacuacuaaugcaaucaacaccugcaacaaacaauagagccaggagagaauuaccucgauucaugaauuacacacucaauaacgcaaaaaaaaccaacguuacacuaucaaaaaaaagaaaacgacgauucuuaggauuccuacucggagucggaucagcaauagcaucuggcguugcaguaugcaaaguauuacacuuagaaggugaagucaauaaaauaaaaagcgcgcuacuaaguacaaacaaagcagucgucucccuaucaaacggagucucaguccuaacauucaaaguacucgaccuaaaaaauuacauagauaaacaacuacuuccaauauuaaacaaacaauccuguagcaucagcaauauagaaacaguaauagaauuucaacaaaaaaacaaccgauuauuagaaaucacucgagaauuuuccguaaacgccgggguaacaacuccagucucaaccuacaugcuaaccaauucagaacuauugagcuuaauaaacgacaugccaauaaccaacgaccaaaaaaaacuaaugucuaacaauguucaaaucgucagacaacaaaguuacaguauaauguguauaaucaaagaagaaguccuagcauacguaguccaacucccacuauauggaguuaucgacacaccauguuggaaauuacacaccucaccauuaugcacaaccaauacaaaagaaggaucaaacauaugccuuacacggacagaccgcggaugguauugugacaacgcuggcucagucuccuuuuucccacaagcagaaacaugcaaaguacaaucaaacagagucuuuugcgauaccaugaacucacuuacauuaccaagcgaaguaaaucuuuguaacgucgacaucuucaauccuaaauaugacugcaaaaucaugaccucaaaaacagacguuagcucuucaguaaucacuagcuuaggagcaaucguaucaugcuacggcaaaacaaaauguacagcaucaaauaaaaacagaggaaucauaaaaacauuuucaaacggaugcgauuauguaagcaacaaaggaguagauacuguaagcguaggaaacacauuguacuauguaaacaaacaagaaggaaaaucacucuauguaaaaggagaaccuauaaucaauuucuacgauccauuaguguucccaucagaugaauuugacgccucaauaucacaaguuaaugaaaaaauaaaucaaucgcuagcauucauacguaaaucagaugaauuacuacauaacguaaacgcaggcaaauccacaacaaauaucaugaucacaacaauuauaauaguaauaauaguaauacuacuaucacuaauagccguaggacuccuacuauacugcaaagcaagaucuacuccaguaacccucucaaaagaucaacuaagcggaauuaauaacaucgcauucagcaacuaaggacuaguggaagcauuuuccuggcugauuaaaagaaauuacucagcuauggucaucuguuccuguuagaaggcuaugcagcauauuauauacuaugcgcauguuaugaaaugcauaauaaaaaauuuuaaaaaaucuaaaagaucuaaaaaaaaaaaaaaaaaaaaaaaaaaaaaaaaaaaaaaaaaaaaaaaaaaaaaaaaaaaaaaaaugcaucccccccccccccccccccccccccccccccaaaggcucuuuucagagccaccagaauu

SEQ ID NO: 1130 - RNA, 2090 nt, Artificial Sequence
  mRNA product Design f-2 comprising derived and/or modified sequence from HRSV(A2)__F0_DSCav1 (opt11)
gggagagcggcucggccauuuugucccagucaguccggaggcugcggcugcagaaguaccgccugcggaguaacugcaaagaagcuuaccauggaacuacuuauccucaaagccaacgccaucaccaccauccucacagcaguaaccuuuugcuucgccucaggccaaaauaucacagaagaauuuuaccagaguaccugcuccgccguauccaaaggauaccucagcgcgcuccgcaccggcugguacacuucaguaaucacaaucgaacuauccaacaucaaagaaaacaaaugcaacggcaccgacgcgaaagucaaacucaucaaacaagaacuagacaaauacaaaaaugccguaacagaacuacaacuguuaaugcagagcacacccgccaccaacaaccgcgcccgccgggaacucccccgauucaugaacuacacacucaacaacgccaaaaagacgaacgucacccucagcaagaaacgaaaacgcagauuccucgguuuccuacuaggcguaggcucagcaauagccuccggaguagccgucugcaaaguccugcacuuagaaggcgaagucaacaaaaucaaauccgcccuacucuccacgaacaaagccgucgucucccuguccaacggugucuccguuuuaaccuucaaaguucuggaccucaaaaacuacauagacaaacagcuucuccccauccucaacaaacaauccuguagcaucuccaacaucgaaaccgucauagaauuucaacagaaaaacaacagacugcucgaaaucacccgcgaguucuccgucaacgccggcgucacgacucccgucuccaccuauaugcucacgaacucggaacuccuuucccuaaucaacgacaugccgaucaccaacgaccaaaagaaacucaugucaaacaacguacaaauuguccgccaacaaucauacuccaucaugugcauaauuaaagaagaaguccucgcauacguaguccaacucccccucuacggcgucaucgacacccccugcuggaaacuccacaccuccccacucugcacaaccaacaccaaagaaggcucaaacauaugccuaacgcgcaccgaucgcgguugguacugcgacaacgccgguuccgucagcuucuucccccaagcagagacaugcaaaguccaaucaaaccgcgucuucugcgacaccaugaacucacuaacccuuccaagcgaagucaaccucugcaacguugacaucuucaaccccaaauacgacuguaaaaucaugaccuccaagaccgacguauccucuuccgucaucacaucccuaggcgcuaucguauccugcuaugguaaaaccaaaugcaccgccuccaacaaaaaccgcggcaucaucaagacauuuuccaacggcugcgacuacgugagcaacaaaggcgucgacaccgucuccguaggcaacacccucuacuauguaaacaaacaagagggcaaaucacucuacgucaaaggggaacccaucaucaacuucuacgacccgcucguauuccccagcgaugaguucgacgccuccaucucccaggucaacgaaaagauaaaccaaucacucgcauucauucguaaauccgacgaacuccuacacaacgugaaugcaggcaaaucgaccacuaacaucaugaucaccaccaucaucaucgucaucauagucauccuccugucccuuaucgccgucggucuuuuauuauacugcaaagcccgcagcacccccgucacccucucuaaggaccaacucagcggcaucaauaacaucgcauucucuaacuaaggacuaguggaagcauuuuccuggcugauuaaaagaaauuacucagcuauggucaucuguuccuguuagaaggcuaugcagcauauuauauacuaugcgcauguuaugaaaugcauaauaaaaaauuuuaaaaaaucuaaaagaucuaaaaaaaaaaaaaaaaaaaaaaaaaaaaaaaaaaaaaaaaaaaaaaaaaaaaaaaaaaaaaaaaugcaucccccccccccccccccccccccccccccccaaaggcucuuuucagagccaccagaauu

SEQ ID NO: 1131 - RNA, 2081 nt, Artificial Sequence
  mRNA product Design f-3 comprising derived and/or modified sequence from HRSV(A2)__F0_DSCav1 (opt1)
gggagagucccgcagucggcguccagcggcucugcuuguucgugugugugucguugcaggccuuauucaagcuuaccauggagcugcucauccugaaggccaacgccaucaccaccauccugacggcggugaccuucugcuucgccagcggccagaacaucaccgaggaguucuaccaguccacgugcagcgccgucuccaagggguaccucagcgcccugcggaccggcugguacaccuccgugaucaccaucgagcugagcaacaucaaggagaacaagugcaacgggaccgacgccaaggugaagcucaucaagcaggagcuggacaaguacaagaacgcggucacggagcugcagcuccugaugcaguccaccccggcaaccaacaaccgcgcccggcgcgagcugccccgguucaugaacuacacccucaacaacgccaagaagacgaacgugacccugagcaagaagcgcaagcggcgcuuccugggcuuccuccugggggugggcuccgccaucgcgagcggcgucgccgugugcaaggugcugcaccucgagggggaggucaacaagaucaagagcgcccugcuguccaccaacaaggccguggugagccucuccaacggcgucagcgugcugaccuucaaggugcuggaccucaagaacuacaucgacaagcagcugcugcccauccugaacaagcagagcugcuccaucagcaacaucgagacggugaucgaguuccagcagaagaacaaccggcuccuggagaucacccgcgaguucagcgugaacgccggggucaccacccccguguccacguacaugcugaccaacagcgagcuccugucccugaucaacgacaugccgaucaccaacgaccagaagaagcucaugagcaacaacgugcagaucguccggcagcaguccuacagcaucaugugcaucaucaaggaggaggugcuggcguacgugguccagcugccccucuacggcgugaucgacacccccugcuggaagcugcacacgagcccccugugcaccaccaacaccaaggagggguccaacaucugccucacgcgcaccgaccggggcugguacugcgacaacgccggcagcgucuccuucuucccgcaggccgagaccugcaaggugcagagcaaccgcguguucugcgacaccaugaacucccugacgcugcccagcgagguaaaccucugcaacgucgacaucuucaaccccaaguacgacugcaagaucaugaccuccaagaccgacgugagcuccagcgugaucaccucccugggggccaucgucagcugcuacggcaagacgaagugcaccgccagcaacaagaaccgggggaucaucaagaccuucuccaacggcugcgacuacgugagcaacaagggcguggacaccguguccgucgggaacacccuguacuacgugaacaagcaggagggcaagagccucuacgugaagggggagcccaucaucaacuucuacgacccgcuggucuuccccuccgacgaguucgacgcgagcaucucccaggugaacgagaagaucaaccagagccuggccuucauccgcaaguccgacgagcugcuccacaacgugaacgccggcaagagcacgaccaacaucaugaucaccaccaucaucaucgucaucaucgugauccugcugucccucaucgccguggggcugcugcucuacugcaaggcccggagcacgcccgucacccuguccaaggaccagcugagcggcaucaacaacaucgcguucuccaacugaggacuaguacuggcugcaucucccuuuccucuguccuccauccuucucccaggauggugaagggggaccugguacccagugauccccaccccaggauccuaaaucaugacuuaccugcuaauaaaaacucauuggaaaagugagaagaucuaaaaaaaaaaaaaaaaaaaaaaaaaaaaaaaaaaaaaaaaaaaaaaaaaaaaaaaaaaaaaaaaugcaucccccccccccccccccccccccccccccccaaaggcucuuuucagagccaccagaauu

SEQ ID NO: 1132 - RNA, 2081 nt, Artificial Sequence
  mRNA product Design f-3 comprising derived and/or modified sequence from HRSV(A2)__F0_DSCav1 (opt1)
gggagagucccgcagucggcguccagcggcucugcuuguucgugugugugucguugcaggccuuauucaagcuuaccauggagcugcucauccugaaggccaacgccaucaccaccauccugacggcggugaccuucugcuucgccagcggccagaacaucaccgaggaguucuaccaguccacgugcagcgccgucuccaagggguaccucagcgcccugcgcaccggcugguacaccuccgugaucaccaucgagcugagcaacaucaaggagaacaagugcaacgggaccgacgccaaggugaagcucaucaagcaggagcuggacaaguacaagaacgcggucacggagcugcagcuccugaugcaguccacccccgccaccaacaaccgggcccgccgggagcugccgcgcuucaugaacuacacccucaacaacgccaagaagacgaacgugacccugagcaagaagcggaagcgccgguuccugggcuuccuccugggggugggcuccgcgaucgccagcggcgucgccgugugcaaggugcugcaccucgagggggaggucaacaagaucaaguccgcccugcugagcaccaacaaggccguggugucccucagcaacggcgucuccgugcugaccuucaaggugcuggaccucaagaacuacaucgacaagcagcugcugcccauccucaacaagcagagcugcuccaucagcaacaucgagacggucaucgaguuccagcagaagaacaaccgccugcuggagaucacccgggaguucuccgugaacgcgggggugaccacccccgucagcacguacaugcucaccaacagcgagcugcugucccucaucaacgacaugcccaucaccaacgaccagaagaagcugaugagcaacaacgugcagaucgugcgccagcaguccuacagcaucaugugcaucaucaaggaggagguccuggccuacguggugcagcucccgcuguacggcgucaucgacacccccugcuggaagcugcacacgagcccccucugcaccaccaacaccaaggaggggagcaacaucugccugacgcggaccgaccgcggcugguacugcgacaacgccggcuccgugagcuucuucccccaggccgagaccugcaagguccaguccaaccggguguucugcgacaccaugaacagccugacgcucccguccgaggugaaccugugcaacgucgacaucuucaaccccaaguacgacugcaagaucaugaccagcaagaccgacguguccagcuccgugaucaccagccugggggccaucgucuccugcuacggcaagacgaagugcaccgcgagcaacaagaaccgcgggaucaucaagaccuucuccaacggcugcgacuacgugagcaacaagggcguggacaccgucagcguggggaacacccucuacuacgugaacaagcaggagggcaagucccuguacgucaagggggagcccaucaucaacuucuacgacccccugguguucccgagcgacgaguucgacgccuccaucagccaggugaacgagaagaucaaccagucccucgccuucauccggaaguccgacgagcugcugcacaacgucaacgccggcaaguccacgaccaacaucaugaucaccaccaucaucaucgugaucaucgugauccugcucagccugaucgccgucgggcugcuccuguacugcaaggcgcgcuccacgcccgugacccugagcaaggaccagcucuccggcaucaacaacaucgccuucagcaacugaggacuaguacuggcugcaucucccuuuccucuguccuccauccuucucccaggauggugaagggggaccugguacccagugauccccaccccaggauccuaaaucaugacuuaccugcuaauaaaaacucauuggaaaagugagaagaucuaaaaaaaaaaaaaaaaaaaaaaaaaaaaaaaaaaaaaaaaaaaaaaaaaaaaaaaaaaaaaaaaugcaucccccccccccccccccccccccccccccccaaaggcucuuuucagagccaccagaauu

SEQ ID NO: 1133 - RNA, 2081 nt, Artificial Sequence
  mRNA product Design f-3 comprising derived and/or modified sequence from HRSV(A2)__F0_DSCav1 (opt2)
gggagagucccgcagucggcguccagcggcucugcuuguucgugugugugucguugcaggccuuauucaagcuuaccauggagcuccucauccucaaggccaacgccaucaccaccauccucaccgccgucaccuucugcuucgccuccggccagaacaucaccgaggaguucuaccaguccaccugcuccgccgucuccaagggcuaccucuccgcccuccgcaccggcugguacaccuccgucaucaccaucgagcucuccaacaucaaggagaacaagugcaacggcaccgacgccaaggucaagcucaucaagcaggagcucgacaaguacaagaacgccgucaccgagcuccagcuccucaugcaguccacccccgccaccaacaaccgcgcccgccgcgagcucccccgcuucaugaacuacacccucaacaacgccaagaagaccaacgucacccucuccaagaagcgcaagcgccgcuuccucggcuuccuccucggcgucggcuccgccaucgccuccggcgucgccgucugcaagguccuccaccucgagggcgaggucaacaagaucaaguccgcccuccucuccaccaacaaggccgucgucucccucuccaacggcgucuccguccucaccuucaagguccucgaccucaagaacuacaucgacaagcagcuccuccccauccucaacaagcaguccugcuccaucuccaacaucgagaccgucaucgaguuccagcagaagaacaaccgccuccucgagaucacccgcgaguucuccgucaacgccggcgucaccacccccgucuccaccuacaugcucaccaacuccgagcuccucucccucaucaacgacaugcccaucaccaacgaccagaagaagcucauguccaacaacguccagaucguccgccagcaguccuacuccaucaugugcaucaucaaggaggagguccucgccuacgucguccagcucccccucuacggcgucaucgacacccccugcuggaagcuccacaccuccccccucugcaccaccaacaccaaggagggcuccaacaucugccucacccgcaccgaccgcggcugguacugcgacaacgccggcuccgucuccuucuucccccaggccgagaccugcaagguccaguccaaccgcgucuucugcgacaccaugaacucccucacccuccccuccgaggucaaccucugcaacgucgacaucuucaaccccaaguacgacugcaagaucaugaccuccaagaccgacgucuccuccuccgucaucaccucccucggcgccaucgucuccugcuacggcaagaccaagugcaccgccuccaacaagaaccgcggcaucaucaagaccuucuccaacggcugcgacuacgucuccaacaagggcgucgacaccgucuccgucggcaacacccucuacuacgucaacaagcaggagggcaagucccucuacgucaagggcgagcccaucaucaacuucuacgacccccucgucuuccccuccgacgaguucgacgccuccaucucccaggucaacgagaagaucaaccagucccucgccuucauccgcaaguccgacgagcuccuccacaacgucaacgccggcaaguccaccaccaacaucaugaucaccaccaucaucaucgucaucaucgucauccuccucucccucaucgccgucggccuccuccucuacugcaaggcccgcuccacccccgucacccucuccaaggaccagcucuccggcaucaacaacaucgccuucuccaacugaggacuaguacuggcugcaucucccuuuccucuguccuccauccuucucccaggauggugaagggggaccugguacccagugauccccaccccaggauccuaaaucaugacuuaccugcuaauaaaaacucauuggaaaagugagaagaucuaaaaaaaaaaaaaaaaaaaaaaaaaaaaaaaaaaaaaaaaaaaaaaaaaaaaaaaaaaaaaaaaugcaucccccccccccccccccccccccccccccccaaaggcucuuuucagagccaccagaauu

SEQ ID NO: 1134 - RNA, 2081 nt, Artificial Sequence
  mRNA product Design f-3 comprising derived and/or modified sequence from HRSV(A2)__F0_DSCav1 (opt3)
gggagagucccgcagucggcguccagcggcucugcuuguucgugugugugucguugcaggccuuauucaagcuuaccauggagcugcucauccuuaaggccaacgcuauuaccacaauacugacugcagugacguucugcuuugccagcggccagaauaucaccgaagaguucuaccaauccacauguucugcggucucaaaaggguauuugagugcuuuaagaacuggaugguacaccagcguuauuacaaucgaacuguccaacauuaaggagaauaaaugcaacgguaccgacgccaaggugaaacuaaucaagcaggaacucgauaaguauaaaaaugcaguaacugagcugcagcuucugaugcagucuacacccgccaccaacaauagggcucggcgcgaguugccucgauuuaugaacuacacgcucaauaacgcaaagaaaacuaaugugacccugucgaagaaacguaagagaagguuccugggcuuucucuuaggggucggaucagccauagcuagcggcguggccguuuguaaggugcugcaccuugaaggugaggucaacaaaaucaagagugcguugcuguccacaaauaaagcagugguaucucuaagcaacgggguuuccgugcucacuuucaagguccuggaccuuaaaaauuauauugauaagcaacuguugccaauccucaacaaacagucaugcaguauuagcaacaucgaaaccgugauagaguuucagcagaagaauaaccggcuguuagagauuacacgcgaguucucugugaaugccggagucaccacgccgguuuccacuuacaugcugacaaacucagaacuccuuagccugaucaaugacaugcccauuaccaacgaucaaaagaaauugaugaguaauaacgugcagaucguaagacagcagucuuauuccaucauguguauuauaaaggaagaggugcuagcuuacgucgugcaacugccucucuacggcguuaucgacacuccaugcuggaaacugcauacaagcccccuuuguaccacgaauaccaaggaaggcucgaacauuugccugacaaggacugaucgggggugguauugugacaaugccggaucuguguccuuuuucccucaggcagagaccugcaaaguccagucaaaccgcguguuuugugauacaaugaauaguuugacucucccaagcgagguaaaccugugcaauguugacaucuucaaccccaaguacgauugcaagauaaugaccuccaaaacagacgugucuagcucagucauuaccaguuuaggugcuaucguguccuguuauggcaagacuaaaugcacggccagcaacaagaaucgagggaucauuaaaacauuuucuaacggaugugauuacgucucaaauaagggcguggacaccguuaguguggguaacacucuguauuacguaaauaagcaagaagggaaaagccuauaugucaagggagagccuaucauuaacuucuacgacccacucguguucccguccgaugaauuugacgcgucuauaucgcagguuaaugagaaaaucaaccagagccuggccuucauuagaaaguccgaugaacuuuugcacaaugugaacgcaggcaaaucaaccacaaauaucaugaucaccacuauuauaaucgucauuaucgugauucugcucagucugaucgcuguaggccuucuguuguacugcaaggccaggucuacacccgugacgcucagcaaggaccagcuguccgggauaaacaauaucgcuuuuucaaacugaggacuaguacuggcugcaucucccuuuccucuguccuccauccuucucccaggauggugaagggggaccugguacccagugauccccaccccaggauccuaaaucaugacuuaccugcuaauaaaaacucauuggaaaagugagaagaucuaaaaaaaaaaaaaaaaaaaaaaaaaaaaaaaaaaaaaaaaaaaaaaaaaaaaaaaaaaaaaaaaugcaucccccccccccccccccccccccccccccccaaaggcucuuuucagagccaccagaauu

SEQ ID NO: 1135 - RNA, 2081 nt, Artificial Sequence
  mRNA product Design f-3 comprising derived and/or modified sequence from HRSV(A2)__F0_DSCav1 (opt4)
gggagagucccgcagucggcguccagcggcucugcuuguucgugugugugucguugcaggccuuauucaagcuuaccauggagcugcugauccugaaggccaacgccaucaccaccauccugaccgccgugaccuucugcuucgccagcggccagaacaucaccgaggaguucuaccagagcaccugcagcgccgugagcaagggcuaccugagcgcccugagaaccggcugguacaccagcgugaucaccaucgagcugagcaacaucaaggagaacaagugcaacggcaccgacgccaaggugaagcugaucaagcaggagcuggacaaguacaagaacgccgugaccgagcugcagcugcugaugcagagcacccccgccaccaacaacagagccagaagagagcugcccagauucaugaacuacacccugaacaacgccaagaagaccaacgugacccugagcaagaagagaaagagaagauuccugggcuuccugcugggcgugggcagcgccaucgccagcggcguggccgugugcaaggugcugcaccuggagggcgaggugaacaagaucaagagcgcccugcugagcaccaacaaggccguggugagccugagcaacggcgugagcgugcugaccuucaaggugcuggaccugaagaacuacaucgacaagcagcugcugcccauccugaacaagcagagcugcagcaucagcaacaucgagaccgugaucgaguuccagcagaagaacaacagacugcuggagaucaccagagaguucagcgugaacgccggcgugaccacccccgugagcaccuacaugcugaccaacagcgagcugcugagccugaucaacgacaugcccaucaccaacgaccagaagaagcugaugagcaacaacgugcagaucgugagacagcagagcuacagcaucaugugcaucaucaaggaggaggugcuggccuacguggugcagcugccccuguacggcgugaucgacacccccugcuggaagcugcacaccagcccccugugcaccaccaacaccaaggagggcagcaacaucugccugaccagaaccgacagaggcugguacugcgacaacgccggcagcgugagcuucuucccccaggccgagaccugcaaggugcagagcaacagaguguucugcgacaccaugaacagccugacccugcccagcgaggugaaccugugcaacguggacaucuucaaccccaaguacgacugcaagaucaugaccagcaagaccgacgugagcagcagcgugaucaccagccugggcgccaucgugagcugcuacggcaagaccaagugcaccgccagcaacaagaacagaggcaucaucaagaccuucagcaacggcugcgacuacgugagcaacaagggcguggacaccgugagcgugggcaacacccuguacuacgugaacaagcaggagggcaagagccuguacgugaagggcgagcccaucaucaacuucuacgacccccugguguuccccagcgacgaguucgacgccagcaucagccaggugaacgagaagaucaaccagagccuggccuucaucagaaagagcgacgagcugcugcacaacgugaacgccggcaagagcaccaccaacaucaugaucaccaccaucaucaucgugaucaucgugauccugcugagccugaucgccgugggccugcugcuguacugcaaggccagaagcacccccgugacccugagcaaggaccagcugagcggcaucaacaacaucgccuucagcaacugaggacuaguacuggcugcaucucccuuuccucuguccuccauccuucucccaggauggugaagggggaccugguacccagugauccccaccccaggauccuaaaucaugacuuaccugcuaauaaaaacucauuggaaaagugagaagaucuaaaaaaaaaaaaaaaaaaaaaaaaaaaaaaaaaaaaaaaaaaaaaaaaaaaaaaaaaaaaaaaaugcaucccccccccccccccccccccccccccccccaaaggcucuuuucagagccaccagaauu

SEQ ID NO: 1136 - RNA, 2081 nt, Artificial Sequence
  mRNA product Design f-3 comprising derived and/or modified sequence from HRSV(A2)__F0_DSCav1 (opt5)
gggagagucccgcagucggcguccagcggcucugcuuguucgugugugugucguugcaggccuuauucaagcuuaccauggagcugcucauccugaaggccaacgcuauuaccacaauccuuacggccgugaccuucugcuuugcgagcggccagaauauuacagaagaguucuaccaauccaccuguucugcugucagcaaaggguaucuguccgcccucagaacaggaugguacaccucuguuaucacaauugaacugagcaacaucaaggagaauaaaugcaacggcaccgacgccaaggugaaacuuaucaagcaggaacuggauaaguauaaaaaugcugugacggagcuccagcugcugaugcaguccacccccgccacaaacaaucgggcucgcagagagcucccucgguuuaugaacuacacccugaauaacgccaagaaaacaaaugucacccuuucuaagaaacgcaagagacgguuccugggguuucuccugggagugggcagcgcgauugccuccgggguugcuguguguaagguccuucaccuggaaggagaggugaacaaaaucaagagcgcccuccugucuacgaauaaagcuguugugucccugagcaacggcgucucugugcucacauucaaggugcuggaccuuaaaaauuauauugauaagcaacugcucccgauccugaacaaacaguccugcagcauuucuaacaucgaaaccgucauugaguuucagcagaagaauaaccgccuucuggagaucacaagagaauuuuccguuaaugccggcgugaccacccccgugagcacauacaugcucacgaacuccgagcugcugucucucaucaaugacaugccuauuaccaacgaucaaaagaaacugaugagcaauaacguccagaucgugcggcagcaguccuauagcauuauguguaucauuaaggaagagguucuugcguacgugguccaacugccccucuacggggugaucgacacaccuugcuggaaacugcauaccucuccccuuuguacaaccaauacgaaggaaggauccaacaucugccugacacgcaccgauagaggcugguauugugacaaugccgggagcguuucuuucuucccucaggcugagaccugcaaagugcagagcaaccgggucuuuugugauacaaugaacucccucacccugccgucugaggugaaucugugcaaugucgacauuuucaaccccaaguacgauugcaagaucaugacaagcaaaacggacguguccagcucuguuauuaccucccucggagccaucgugagcuguuauggcaagacaaaaugcaccgcuucuaacaagaaucgcgggauuaucaaaacauuuuccaacggaugugauuacgucagcaauaagggcguggacaccguuuccgugggcaacacgcuguauuacgucaauaagcaagaagggaaaucucuuuaugugaagggagagccuaucauuaacuucuacgacccccugguguucccuagcgaugaauuugacgccuccaucucucagguuaaugagaaaauuaaccagagccucgccuucaucagaaaguccgaugaacugcugcacaaugucaacgcuggcaaaagcaccacaaauauuaugaucaccacaauuaucaucgugauuaucgugauucuucucucucugaucgcggucgggcugcuccuguacugcaaggcccgguccacccccgugacgcuuagcaaggaccagcugucuggaauuaacaauaucgcuuuuuccaacugaggacuaguacuggcugcaucucccuuuccucuguccuccauccuucucccaggauggugaagggggaccugguacccagugauccccaccccaggauccuaaaucaugacuuaccugcuaauaaaaacucauuggaaaagugagaagaucuaaaaaaaaaaaaaaaaaaaaaaaaaaaaaaaaaaaaaaaaaaaaaaaaaaaaaaaaaaaaaaaaugcaucccccccccccccccccccccccccccccccaaaggcucuuuucagagccaccagaauu

SEQ ID NO: 1137 - RNA, 2081 nt, Artificial Sequence
  mRNA product Design f-3 comprising derived and/or modified sequence from HRSV(A2)__F0_DSCav1 (opt6)
gggagagucccgcagucggcguccagcggcucugcuuguucgugugugugucguugcaggccuuauucaagcuuaccauggaauuauuaauccucaaagcgaacgcuauuacuaccauucuaacagcagucacauucugcuucgccucaggccaaaacauuacagaagaauuuuaccaaucaacaugcucugccguaucaaaaggcuaccuauccgcccuacgaacaggcugguacacaagcguaauaacaaucgaacuaucaaacauaaaagaaaacaaaugcaacgguacagacgccaaaguuaaacuaauaaaacaagaacucgauaaauacaaaaacgcaguaacagaauuacaacuacuaaugcaaucaacaccugcaacaaacaauagagccaggagagaauuaccucgauucaugaauuacacacucaauaacgcaaaaaaaaccaacguuacacuaucaaaaaaaagaaaacgacgauucuuaggauuccuacucggagucggaucagcaauagcaucuggcguugcaguaugcaaaguauuacacuuagaaggugaagucaauaaaauaaaaagcgcgcuacuaaguacaaacaaagcagucgucucccuaucaaacggagucucaguccuaacauucaaaguacucgaccuaaaaaauuacauagauaaacaacuacuuccaauauuaaacaaacaauccuguagcaucagcaauauagaaacaguaauagaauuucaacaaaaaaacaaccgauuauuagaaaucacucgagaauuuuccguaaacgccgggguaacaacuccagucucaaccuacaugcuaaccaauucagaacuauugagcuuaauaaacgacaugccaauaaccaacgaccaaaaaaaacuaaugucuaacaauguucaaaucgucagacaacaaaguuacaguauaauguguauaaucaaagaagaaguccuagcauacguaguccaacucccacuauauggaguuaucgacacaccauguuggaaauuacacaccucaccauuaugcacaaccaauacaaaagaaggaucaaacauaugccuuacacggacagaccgcggaugguauugugacaacgcuggcucagucuccuuuuucccacaagcagaaacaugcaaaguacaaucaaacagagucuuuugcgauaccaugaacucacuuacauuaccaagcgaaguaaaucuuuguaacgucgacaucuucaauccuaaauaugacugcaaaaucaugaccucaaaaacagacguuagcucuucaguaaucacuagcuuaggagcaaucguaucaugcuacggcaaaacaaaauguacagcaucaaauaaaaacagaggaaucauaaaaacauuuucaaacggaugcgauuauguaagcaacaaaggaguagauacuguaagcguaggaaacacauuguacuauguaaacaaacaagaaggaaaaucacucuauguaaaaggagaaccuauaaucaauuucuacgauccauuaguguucccaucagaugaauuugacgccucaauaucacaaguuaaugaaaaaauaaaucaaucgcuagcauucauacguaaaucagaugaauuacuacauaacguaaacgcaggcaaauccacaacaaauaucaugaucacaacaauuauaauaguaauaauaguaauacuacuaucacuaauagccguaggacuccuacuauacugcaaagcaagaucuacuccaguaacccucucaaaagaucaacuaagcggaauuaauaacaucgcauucagcaacuaaggacuaguacuggcugcaucucccuuuccucuguccuccauccuucucccaggauggugaagggggaccugguacccagugauccccaccccaggauccuaaaucaugacuuaccugcuaauaaaaacucauuggaaaagugagaagaucuaaaaaaaaaaaaaaaaaaaaaaaaaaaaaaaaaaaaaaaaaaaaaaaaaaaaaaaaaaaaaaaaugcaucccccccccccccccccccccccccccccccaaaggcucuuuucagagccaccagaauu

SEQ ID NO: 1138 - RNA, 2081 nt, Artificial Sequence
  mRNA product Design f-3 comprising derived and/or modified sequence from HRSV(A2)__F0_DSCav1 (opt11)
gggagagucccgcagucggcguccagcggcucugcuuguucgugugugugucguugcaggccuuauucaagcuuaccauggaacuacuuauccucaaagccaacgccaucaccaccauccucacagcaguaaccuuuugcuucgccucaggccaaaauaucacagaagaauuuuaccagaguaccugcuccgccguauccaaaggauaccucagcgcgcuccgcaccggcugguacacuucaguaaucacaaucgaacuauccaacaucaaagaaaacaaaugcaacggcaccgacgcgaaagucaaacucaucaaacaagaacuagacaaauacaaaaaugccguaacagaacuacaacuguuaaugcagagcacacccgccaccaacaaccgcgcccgccgggaacucccccgauucaugaacuacacacucaacaacgccaaaaagacgaacgucacccucagcaagaaacgaaaacgcagauuccucgguuuccuacuaggcguaggcucagcaauagccuccggaguagccgucugcaaaguccugcacuuagaaggcgaagucaacaaaaucaaauccgcccuacucuccacgaacaaagccgucgucucccuguccaacggugucuccguuuuaaccuucaaaguucuggaccucaaaaacuacauagacaaacagcuucuccccauccucaacaaacaauccuguagcaucuccaacaucgaaaccgucauagaauuucaacagaaaaacaacagacugcucgaaaucacccgcgaguucuccgucaacgccggcgucacgacucccgucuccaccuauaugcucacgaacucggaacuccuuucccuaaucaacgacaugccgaucaccaacgaccaaaagaaacucaugucaaacaacguacaaauuguccgccaacaaucauacuccaucaugugcauaauuaaagaagaaguccucgcauacguaguccaacucccccucuacggcgucaucgacacccccugcuggaaacuccacaccuccccacucugcacaaccaacaccaaagaaggcucaaacauaugccuaacgcgcaccgaucgcgguugguacugcgacaacgccgguuccgucagcuucuucccccaagcagagacaugcaaaguccaaucaaaccgcgucuucugcgacaccaugaacucacuaacccuuccaagcgaagucaaccucugcaacguugacaucuucaaccccaaauacgacuguaaaaucaugaccuccaagaccgacguauccucuuccgucaucacaucccuaggcgcuaucguauccugcuaugguaaaaccaaaugcaccgccuccaacaaaaaccgcggcaucaucaagacauuuuccaacggcugcgacuacgugagcaacaaaggcgucgacaccgucuccguaggcaacacccucuacuauguaaacaaacaagagggcaaaucacucuacgucaaaggggaacccaucaucaacuucuacgacccgcucguauuccccagcgaugaguucgacgccuccaucucccaggucaacgaaaagauaaaccaaucacucgcauucauucguaaauccgacgaacuccuacacaacgugaaugcaggcaaaucgaccacuaacaucaugaucaccaccaucaucaucgucaucauagucauccuccugucccuuaucgccgucggucuuuuauuauacugcaaagcccgcagcacccccgucacccucucuaaggaccaacucagcggcaucaauaacaucgcauucucuaacuaaggacuaguacuggcugcaucucccuuuccucuguccuccauccuucucccaggauggugaagggggaccugguacccagugauccccaccccaggauccuaaaucaugacuuaccugcuaauaaaaacucauuggaaaagugagaagaucuaaaaaaaaaaaaaaaaaaaaaaaaaaaaaaaaaaaaaaaaaaaaaaaaaaaaaaaaaaaaaaaaugcaucccccccccccccccccccccccccccccccaaaggcucuuuucagagccaccagaauu

SEQ ID NO: 1139 - RNA, 2297 nt, Artificial Sequence
  mRNA product Design f-4 comprising derived and/or modified sequence from HRSV(A2)__F0_DSCav1 (opt1)
gggagagucccgcagucggcguccagcggcucugcuuguucgugugugugucguugcaggccuuauucaagcuuaccauggagcugcucauccugaaggccaacgccaucaccaccauccugacggcggugaccuucugcuucgccagcggccagaacaucaccgaggaguucuaccaguccacgugcagcgccgucuccaagggguaccucagcgcccugcggaccggcugguacaccuccgugaucaccaucgagcugagcaacaucaaggagaacaagugcaacgggaccgacgccaaggugaagcucaucaagcaggagcuggacaaguacaagaacgcggucacggagcugcagcuccugaugcaguccaccccggcaaccaacaaccgcgcccggcgcgagcugccccgguucaugaacuacacccucaacaacgccaagaagacgaacgugacccugagcaagaagcgcaagcggcgcuuccugggcuuccuccugggggugggcuccgccaucgcgagcggcgucgccgugugcaaggugcugcaccucgagggggaggucaacaagaucaagagcgcccugcuguccaccaacaaggccguggugagccucuccaacggcgucagcgugcugaccuucaaggugcuggaccucaagaacuacaucgacaagcagcugcugcccauccugaacaagcagagcugcuccaucagcaacaucgagacggugaucgaguuccagcagaagaacaaccggcuccuggagaucacccgcgaguucagcgugaacgccggggucaccacccccguguccacguacaugcugaccaacagcgagcuccugucccugaucaacgacaugccgaucaccaacgaccagaagaagcucaugagcaacaacgugcagaucguccggcagcaguccuacagcaucaugugcaucaucaaggaggaggugcuggcguacgugguccagcugccccucuacggcgugaucgacacccccugcuggaagcugcacacgagcccccugugcaccaccaacaccaaggagggguccaacaucugccucacgcgcaccgaccggggcugguacugcgacaacgccggcagcgucuccuucuucccgcaggccgagaccugcaaggugcagagcaaccgcguguucugcgacaccaugaacucccugacgcugcccagcgagguaaaccucugcaacgucgacaucuucaaccccaaguacgacugcaagaucaugaccuccaagaccgacgugagcuccagcgugaucaccucccugggggccaucgucagcugcuacggcaagacgaagugcaccgccagcaacaagaaccgggggaucaucaagaccuucuccaacggcugcgacuacgugagcaacaagggcguggacaccguguccgucgggaacacccuguacuacgugaacaagcaggagggcaagagccucuacgugaagggggagcccaucaucaacuucuacgacccgcuggucuuccccuccgacgaguucgacgcgagcaucucccaggugaacgagaagaucaaccagagccuggccuucauccgcaaguccgacgagcugcuccacaacgugaacgccggcaagagcacgaccaacaucaugaucaccaccaucaucaucgucaucaucgugauccugcugucccucaucgccguggggcugcugcucuacugcaaggcccggagcacgcccgucacccuguccaaggaccagcugagcggcaucaacaacaucgcguucuccaacugaggacuagugaagggaacacccaaauuuaauucagccuuaagcacaauuaauuaagagugaaacguaauuguacaagcaguuggucacccaccauagggcaugaucaacaccgcaaccuuuccuuuuucccccagugauucugaaaaaccccucuucccuucagcuugcuuagauguuccaaauuuaguaagcuuaaggcggccuacagaagaaaaagaaaaaaaaggccacaaaaguucccucucacuuucaguaaauaaaauaaaagcagcaacagaaauaaagaaauaaaugaaauucaaaaugaaauaaauauuguguugugcagcauuaaaaaaucaauaaaaauuaaaaaugagcaagaucuaaaaaaaaaaaaaaaaaaaaaaaaaaaaaaaaaaaaaaaaaaaaaaaaaaaaaaaaaaaaaaaaugcaucccccccccccccccccccccccccccccccaaaggcucuuuucagagccaccagaauu

SEQ ID NO: 1140 - RNA, 2297 nt, Artificial Sequence
  mRNA product Design f-4 comprising derived and/or modified sequence from HRSV(A2)__F0_DSCav1 (opt1)
gggagagucccgcagucggcguccagcggcucugcuuguucgugugugugucguugcaggccuuauucaagcuuaccauggagcugcucauccugaaggccaacgccaucaccaccauccugacggcggugaccuucugcuucgccagcggccagaacaucaccgaggaguucuaccaguccacgugcagcgccgucuccaagggguaccucagcgcccugcgcaccggcugguacaccuccgugaucaccaucgagcugagcaacaucaaggagaacaagugcaacgggaccgacgccaaggugaagcucaucaagcaggagcuggacaaguacaagaacgcggucacggagcugcagcuccugaugcaguccacccccgccaccaacaaccgggcccgccgggagcugccgcgcuucaugaacuacacccucaacaacgccaagaagacgaacgugacccugagcaagaagcggaagcgccgguuccugggcuuccuccugggggugggcuccgcgaucgccagcggcgucgccgugugcaaggugcugcaccucgagggggaggucaacaagaucaaguccgcccugcugagcaccaacaaggccguggugucccucagcaacggcgucuccgugcugaccuucaaggugcuggaccucaagaacuacaucgacaagcagcugcugcccauccucaacaagcagagcugcuccaucagcaacaucgagacggucaucgaguuccagcagaagaacaaccgccugcuggagaucacccgggaguucuccgugaacgcgggggugaccacccccgucagcacguacaugcucaccaacagcgagcugcugucccucaucaacgacaugcccaucaccaacgaccagaagaagcugaugagcaacaacgugcagaucgugcgccagcaguccuacagcaucaugugcaucaucaaggaggagguccuggccuacguggugcagcucccgcuguacggcgucaucgacacccccugcuggaagcugcacacgagcccccucugcaccaccaacaccaaggaggggagcaacaucugccugacgcggaccgaccgcggcugguacugcgacaacgccggcuccgugagcuucuucccccaggccgagaccugcaagguccaguccaaccggguguucugcgacaccaugaacagccugacgcucccguccgaggugaaccugugcaacgucgacaucuucaaccccaaguacgacugcaagaucaugaccagcaagaccgacguguccagcuccgugaucaccagccugggggccaucgucuccugcuacggcaagacgaagugcaccgcgagcaacaagaaccgcgggaucaucaagaccuucuccaacggcugcgacuacgugagcaacaagggcguggacaccgucagcguggggaacacccucuacuacgugaacaagcaggagggcaagucccuguacgucaagggggagcccaucaucaacuucuacgacccccugguguucccgagcgacgaguucgacgccuccaucagccaggugaacgagaagaucaaccagucccucgccuucauccggaaguccgacgagcugcugcacaacgucaacgccggcaaguccacgaccaacaucaugaucaccaccaucaucaucgugaucaucgugauccugcucagccugaucgccgucgggcugcuccuguacugcaaggcgcgcuccacgcccgugacccugagcaaggaccagcucuccggcaucaacaacaucgccuucagcaacugaggacuagugaagggaacacccaaauuuaauucagccuuaagcacaauuaauuaagagugaaacguaauuguacaagcaguuggucacccaccauagggcaugaucaacaccgcaaccuuuccuuuuucccccagugauucugaaaaaccccucuucccuucagcuugcuuagauguuccaaauuuaguaagcuuaaggcggccuacagaagaaaaagaaaaaaaaggccacaaaaguucccucucacuuucaguaaauaaaauaaaagcagcaacagaaauaaagaaauaaaugaaauucaaaaugaaauaaauauuguguugugcagcauuaaaaaaucaauaaaaauuaaaaaugagcaagaucuaaaaaaaaaaaaaaaaaaaaaaaaaaaaaaaaaaaaaaaaaaaaaaaaaaaaaaaaaaaaaaaaugcaucccccccccccccccccccccccccccccccaaaggcucuuuucagagccaccagaauu

SEQ ID NO: 1141 - RNA, 2297 nt, Artificial Sequence
  mRNA product Design f-4 comprising derived and/or modified sequence from HRSV(A2)__F0_DSCav1 (opt2)
gggagagucccgcagucggcguccagcggcucugcuuguucgugugugugucguugcaggccuuauucaagcuuaccauggagcuccucauccucaaggccaacgccaucaccaccauccucaccgccgucaccuucugcuucgccuccggccagaacaucaccgaggaguucuaccaguccaccugcuccgccgucuccaagggcuaccucuccgcccuccgcaccggcugguacaccuccgucaucaccaucgagcucuccaacaucaaggagaacaagugcaacggcaccgacgccaaggucaagcucaucaagcaggagcucgacaaguacaagaacgccgucaccgagcuccagcuccucaugcaguccacccccgccaccaacaaccgcgcccgccgcgagcucccccgcuucaugaacuacacccucaacaacgccaagaagaccaacgucacccucuccaagaagcgcaagcgccgcuuccucggcuuccuccucggcgucggcuccgccaucgccuccggcgucgccgucugcaagguccuccaccucgagggcgaggucaacaagaucaaguccgcccuccucuccaccaacaaggccgucgucucccucuccaacggcgucuccguccucaccuucaagguccucgaccucaagaacuacaucgacaagcagcuccuccccauccucaacaagcaguccugcuccaucuccaacaucgagaccgucaucgaguuccagcagaagaacaaccgccuccucgagaucacccgcgaguucuccgucaacgccggcgucaccacccccgucuccaccuacaugcucaccaacuccgagcuccucucccucaucaacgacaugcccaucaccaacgaccagaagaagcucauguccaacaacguccagaucguccgccagcaguccuacuccaucaugugcaucaucaaggaggagguccucgccuacgucguccagcucccccucuacggcgucaucgacacccccugcuggaagcuccacaccuccccccucugcaccaccaacaccaaggagggcuccaacaucugccucacccgcaccgaccgcggcugguacugcgacaacgccggcuccgucuccuucuucccccaggccgagaccugcaagguccaguccaaccgcgucuucugcgacaccaugaacucccucacccuccccuccgaggucaaccucugcaacgucgacaucuucaaccccaaguacgacugcaagaucaugaccuccaagaccgacgucuccuccuccgucaucaccucccucggcgccaucgucuccugcuacggcaagaccaagugcaccgccuccaacaagaaccgcggcaucaucaagaccuucuccaacggcugcgacuacgucuccaacaagggcgucgacaccgucuccgucggcaacacccucuacuacgucaacaagcaggagggcaagucccucuacgucaagggcgagcccaucaucaacuucuacgacccccucgucuuccccuccgacgaguucgacgccuccaucucccaggucaacgagaagaucaaccagucccucgccuucauccgcaaguccgacgagcuccuccacaacgucaacgccggcaaguccaccaccaacaucaugaucaccaccaucaucaucgucaucaucgucauccuccucucccucaucgccgucggccuccuccucuacugcaaggcccgcuccacccccgucacccucuccaaggaccagcucuccggcaucaacaacaucgccuucuccaacugaggacuagugaagggaacacccaaauuuaauucagccuuaagcacaauuaauuaagagugaaacguaauuguacaagcaguuggucacccaccauagggcaugaucaacaccgcaaccuuuccuuuuucccccagugauucugaaaaaccccucuucccuucagcuugcuuagauguuccaaauuuaguaagcuuaaggcggccuacagaagaaaaagaaaaaaaaggccacaaaaguucccucucacuuucaguaaauaaaauaaaagcagcaacagaaauaaagaaauaaaugaaauucaaaaugaaauaaauauuguguugugcagcauuaaaaaaucaauaaaaauuaaaaaugagcaagaucuaaaaaaaaaaaaaaaaaaaaaaaaaaaaaaaaaaaaaaaaaaaaaaaaaaaaaaaaaaaaaaaaugcaucccccccccccccccccccccccccccccccaaaggcucuuuucagagccaccagaauu

SEQ ID NO: 1142 - RNA, 2297 nt, Artificial Sequence
  mRNA product Design f-4 comprising derived and/or modified sequence from HRSV(A2)__F0_DSCav1 (opt3)
gggagagucccgcagucggcguccagcggcucugcuuguucgugugugugucguugcaggccuuauucaagcuuaccauggagcugcucauccuuaaggccaacgcuauuaccacaauacugacugcagugacguucugcuuugccagcggccagaauaucaccgaagaguucuaccaauccacauguucugcggucucaaaaggguauuugagugcuuuaagaacuggaugguacaccagcguuauuacaaucgaacuguccaacauuaaggagaauaaaugcaacgguaccgacgccaaggugaaacuaaucaagcaggaacucgauaaguauaaaaaugcaguaacugagcugcagcuucugaugcagucuacacccgccaccaacaauagggcucggcgcgaguugccucgauuuaugaacuacacgcucaauaacgcaaagaaaacuaaugugacccugucgaagaaacguaagagaagguuccugggcuuucucuuaggggucggaucagccauagcuagcggcguggccguuuguaaggugcugcaccuugaaggugaggucaacaaaaucaagagugcguugcuguccacaaauaaagcagugguaucucuaagcaacgggguuuccgugcucacuuucaagguccuggaccuuaaaaauuauauugauaagcaacuguugccaauccucaacaaacagucaugcaguauuagcaacaucgaaaccgugauagaguuucagcagaagaauaaccggcuguuagagauuacacgcgaguucucugugaaugccggagucaccacgccgguuuccacuuacaugcugacaaacucagaacuccuuagccugaucaaugacaugcccauuaccaacgaucaaaagaaauugaugaguaauaacgugcagaucguaagacagcagucuuauuccaucauguguauuauaaaggaagaggugcuagcuuacgucgugcaacugccucucuacggcguuaucgacacuccaugcuggaaacugcauacaagcccccuuuguaccacgaauaccaaggaaggcucgaacauuugccugacaaggacugaucgggggugguauugugacaaugccggaucuguguccuuuuucccucaggcagagaccugcaaaguccagucaaaccgcguguuuugugauacaaugaauaguuugacucucccaagcgagguaaaccugugcaauguugacaucuucaaccccaaguacgauugcaagauaaugaccuccaaaacagacgugucuagcucagucauuaccaguuuaggugcuaucguguccuguuauggcaagacuaaaugcacggccagcaacaagaaucgagggaucauuaaaacauuuucuaacggaugugauuacgucucaaauaagggcguggacaccguuaguguggguaacacucuguauuacguaaauaagcaagaagggaaaagccuauaugucaagggagagccuaucauuaacuucuacgacccacucguguucccguccgaugaauuugacgcgucuauaucgcagguuaaugagaaaaucaaccagagccuggccuucauuagaaaguccgaugaacuuuugcacaaugugaacgcaggcaaaucaaccacaaauaucaugaucaccacuauuauaaucgucauuaucgugauucugcucagucugaucgcuguaggccuucuguuguacugcaaggccaggucuacacccgugacgcucagcaaggaccagcuguccgggauaaacaauaucgcuuuuucaaacugaggacuagugaagggaacacccaaauuuaauucagccuuaagcacaauuaauuaagagugaaacguaauuguacaagcaguuggucacccaccauagggcaugaucaacaccgcaaccuuuccuuuuucccccagugauucugaaaaaccccucuucccuucagcuugcuuagauguuccaaauuuaguaagcuuaaggcggccuacagaagaaaaagaaaaaaaaggccacaaaaguucccucucacuuucaguaaauaaaauaaaagcagcaacagaaauaaagaaauaaaugaaauucaaaaugaaauaaauauuguguugugcagcauuaaaaaaucaauaaaaauuaaaaaugagcaagaucuaaaaaaaaaaaaaaaaaaaaaaaaaaaaaaaaaaaaaaaaaaaaaaaaaaaaaaaaaaaaaaaaugcaucccccccccccccccccccccccccccccccaaaggcucuuuucagagccaccagaauu

SEQ ID NO: 1143 - RNA, 2297 nt, Artificial Sequence
  mRNA product Design f-4 comprising derived and/or modified sequence from HRSV(A2)__F0_DSCav1 (opt4)
gggagagucccgcagucggcguccagcggcucugcuuguucgugugugugucguugcaggccuuauucaagcuuaccauggagcugcugauccugaaggccaacgccaucaccaccauccugaccgccgugaccuucugcuucgccagcggccagaacaucaccgaggaguucuaccagagcaccugcagcgccgugagcaagggcuaccugagcgcccugagaaccggcugguacaccagcgugaucaccaucgagcugagcaacaucaaggagaacaagugcaacggcaccgacgccaaggugaagcugaucaagcaggagcuggacaaguacaagaacgccgugaccgagcugcagcugcugaugcagagcacccccgccaccaacaacagagccagaagagagcugcccagauucaugaacuacacccugaacaacgccaagaagaccaacgugacccugagcaagaagagaaagagaagauuccugggcuuccugcugggcgugggcagcgccaucgccagcggcguggccgugugcaaggugcugcaccuggagggcgaggugaacaagaucaagagcgcccugcugagcaccaacaaggccguggugagccugagcaacggcgugagcgugcugaccuucaaggugcuggaccugaagaacuacaucgacaagcagcugcugcccauccugaacaagcagagcugcagcaucagcaacaucgagaccgugaucgaguuccagcagaagaacaacagacugcuggagaucaccagagaguucagcgugaacgccggcgugaccacccccgugagcaccuacaugcugaccaacagcgagcugcugagccugaucaacgacaugcccaucaccaacgaccagaagaagcugaugagcaacaacgugcagaucgugagacagcagagcuacagcaucaugugcaucaucaaggaggaggugcuggccuacguggugcagcugccccuguacggcgugaucgacacccccugcuggaagcugcacaccagcccccugugcaccaccaacaccaaggagggcagcaacaucugccugaccagaaccgacagaggcugguacugcgacaacgccggcagcgugagcuucuucccccaggccgagaccugcaaggugcagagcaacagaguguucugcgacaccaugaacagccugacccugcccagcgaggugaaccugugcaacguggacaucuucaaccccaaguacgacugcaagaucaugaccagcaagaccgacgugagcagcagcgugaucaccagccugggcgccaucgugagcugcuacggcaagaccaagugcaccgccagcaacaagaacagaggcaucaucaagaccuucagcaacggcugcgacuacgugagcaacaagggcguggacaccgugagcgugggcaacacccuguacuacgugaacaagcaggagggcaagagccuguacgugaagggcgagcccaucaucaacuucuacgacccccugguguuccccagcgacgaguucgacgccagcaucagccaggugaacgagaagaucaaccagagccuggccuucaucagaaagagcgacgagcugcugcacaacgugaacgccggcaagagcaccaccaacaucaugaucaccaccaucaucaucgugaucaucgugauccugcugagccugaucgccgugggccugcugcuguacugcaaggccagaagcacccccgugacccugagcaaggaccagcugagcggcaucaacaacaucgccuucagcaacugaggacuagugaagggaacacccaaauuuaauucagccuuaagcacaauuaauuaagagugaaacguaauuguacaagcaguuggucacccaccauagggcaugaucaacaccgcaaccuuuccuuuuucccccagugauucugaaaaaccccucuucccuucagcuugcuuagauguuccaaauuuaguaagcuuaaggcggccuacagaagaaaaagaaaaaaaaggccacaaaaguucccucucacuuucaguaaauaaaauaaaagcagcaacagaaauaaagaaauaaaugaaauucaaaaugaaauaaauauuguguugugcagcauuaaaaaaucaauaaaaauuaaaaaugagcaagaucuaaaaaaaaaaaaaaaaaaaaaaaaaaaaaaaaaaaaaaaaaaaaaaaaaaaaaaaaaaaaaaaaugcaucccccccccccccccccccccccccccccccaaaggcucuuuucagagccaccagaauu

SEQ ID NO: 1144 - RNA, 2297 nt, Artificial Sequence
  mRNA product Design f-4 comprising derived and/or modified sequence from HRSV(A2)__F0_DSCav1 (opt5)
gggagagucccgcagucggcguccagcggcucugcuuguucgugugugugucguugcaggccuuauucaagcuuaccauggagcugcucauccugaaggccaacgcuauuaccacaauccuuacggccgugaccuucugcuuugcgagcggccagaauauuacagaagaguucuaccaauccaccuguucugcugucagcaaaggguaucuguccgcccucagaacaggaugguacaccucuguuaucacaauugaacugagcaacaucaaggagaauaaaugcaacggcaccgacgccaaggugaaacuuaucaagcaggaacuggauaaguauaaaaaugcugugacggagcuccagcugcugaugcaguccacccccgccacaaacaaucgggcucgcagagagcucccucgguuuaugaacuacacccugaauaacgccaagaaaacaaaugucacccuuucuaagaaacgcaagagacgguuccugggguuucuccugggagugggcagcgcgauugccuccgggguugcuguguguaagguccuucaccuggaaggagaggugaacaaaaucaagagcgcccuccugucuacgaauaaagcuguugugucccugagcaacggcgucucugugcucacauucaaggugcuggaccuuaaaaauuauauugauaagcaacugcucccgauccugaacaaacaguccugcagcauuucuaacaucgaaaccgucauugaguuucagcagaagaauaaccgccuucuggagaucacaagagaauuuuccguuaaugccggcgugaccacccccgugagcacauacaugcucacgaacuccgagcugcugucucucaucaaugacaugccuauuaccaacgaucaaaagaaacugaugagcaauaacguccagaucgugcggcagcaguccuauagcauuauguguaucauuaaggaagagguucuugcguacgugguccaacugccccucuacggggugaucgacacaccuugcuggaaacugcauaccucuccccuuuguacaaccaauacgaaggaaggauccaacaucugccugacacgcaccgauagaggcugguauugugacaaugccgggagcguuucuuucuucccucaggcugagaccugcaaagugcagagcaaccgggucuuuugugauacaaugaacucccucacccugccgucugaggugaaucugugcaaugucgacauuuucaaccccaaguacgauugcaagaucaugacaagcaaaacggacguguccagcucuguuauuaccucccucggagccaucgugagcuguuauggcaagacaaaaugcaccgcuucuaacaagaaucgcgggauuaucaaaacauuuuccaacggaugugauuacgucagcaauaagggcguggacaccguuuccgugggcaacacgcuguauuacgucaauaagcaagaagggaaaucucuuuaugugaagggagagccuaucauuaacuucuacgacccccugguguucccuagcgaugaauuugacgccuccaucucucagguuaaugagaaaauuaaccagagccucgccuucaucagaaaguccgaugaacugcugcacaaugucaacgcuggcaaaagcaccacaaauauuaugaucaccacaauuaucaucgugauuaucgugauucuucucucucugaucgcggucgggcugcuccuguacugcaaggcccgguccacccccgugacgcuuagcaaggaccagcugucuggaauuaacaauaucgcuuuuuccaacugaggacuagugaagggaacacccaaauuuaauucagccuuaagcacaauuaauuaagagugaaacguaauuguacaagcaguuggucacccaccauagggcaugaucaacaccgcaaccuuuccuuuuucccccagugauucugaaaaaccccucuucccuucagcuugcuuagauguuccaaauuuaguaagcuuaaggcggccuacagaagaaaaagaaaaaaaaggccacaaaaguucccucucacuuucaguaaauaaaauaaaagcagcaacagaaauaaagaaauaaaugaaauucaaaaugaaauaaauauuguguugugcagcauuaaaaaaucaauaaaaauuaaaaaugagcaagaucuaaaaaaaaaaaaaaaaaaaaaaaaaaaaaaaaaaaaaaaaaaaaaaaaaaaaaaaaaaaaaaaaugcaucccccccccccccccccccccccccccccccaaaggcucuuuucagagccaccagaauu

SEQ ID NO: 1145 - RNA, 2297 nt, Artificial Sequence
  mRNA product Design f-4 comprising derived and/or modified sequence from HRSV(A2)__F0_DSCav1 (opt6)
gggagagucccgcagucggcguccagcggcucugcuuguucgugugugugucguugcaggccuuauucaagcuuaccauggaauuauuaauccucaaagcgaacgcuauuacuaccauucuaacagcagucacauucugcuucgccucaggccaaaacauuacagaagaauuuuaccaaucaacaugcucugccguaucaaaaggcuaccuauccgcccuacgaacaggcugguacacaagcguaauaacaaucgaacuaucaaacauaaaagaaaacaaaugcaacgguacagacgccaaaguuaaacuaauaaaacaagaacucgauaaauacaaaaacgcaguaacagaauuacaacuacuaaugcaaucaacaccugcaacaaacaauagagccaggagagaauuaccucgauucaugaauuacacacucaauaacgcaaaaaaaaccaacguuacacuaucaaaaaaaagaaaacgacgauucuuaggauuccuacucggagucggaucagcaauagcaucuggcguugcaguaugcaaaguauuacacuuagaaggugaagucaauaaaauaaaaagcgcgcuacuaaguacaaacaaagcagucgucucccuaucaaacggagucucaguccuaacauucaaaguacucgaccuaaaaaauuacauagauaaacaacuacuuccaauauuaaacaaacaauccuguagcaucagcaauauagaaacaguaauagaauuucaacaaaaaaacaaccgauuauuagaaaucacucgagaauuuuccguaaacgccgggguaacaacuccagucucaaccuacaugcuaaccaauucagaacuauugagcuuaauaaacgacaugccaauaaccaacgaccaaaaaaaacuaaugucuaacaauguucaaaucgucagacaacaaaguuacaguauaauguguauaaucaaagaagaaguccuagcauacguaguccaacucccacuauauggaguuaucgacacaccauguuggaaauuacacaccucaccauuaugcacaaccaauacaaaagaaggaucaaacauaugccuuacacggacagaccgcggaugguauugugacaacgcuggcucagucuccuuuuucccacaagcagaaacaugcaaaguacaaucaaacagagucuuuugcgauaccaugaacucacuuacauuaccaagcgaaguaaaucuuuguaacgucgacaucuucaauccuaaauaugacugcaaaaucaugaccucaaaaacagacguuagcucuucaguaaucacuagcuuaggagcaaucguaucaugcuacggcaaaacaaaauguacagcaucaaauaaaaacagaggaaucauaaaaacauuuucaaacggaugcgauuauguaagcaacaaaggaguagauacuguaagcguaggaaacacauuguacuauguaaacaaacaagaaggaaaaucacucuauguaaaaggagaaccuauaaucaauuucuacgauccauuaguguucccaucagaugaauuugacgccucaauaucacaaguuaaugaaaaaauaaaucaaucgcuagcauucauacguaaaucagaugaauuacuacauaacguaaacgcaggcaaauccacaacaaauaucaugaucacaacaauuauaauaguaauaauaguaauacuacuaucacuaauagccguaggacuccuacuauacugcaaagcaagaucuacuccaguaacccucucaaaagaucaacuaagcggaauuaauaacaucgcauucagcaacuaaggacuagugaagggaacacccaaauuuaauucagccuuaagcacaauuaauuaagagugaaacguaauuguacaagcaguuggucacccaccauagggcaugaucaacaccgcaaccuuuccuuuuucccccagugauucugaaaaaccccucuucccuucagcuugcuuagauguuccaaauuuaguaagcuuaaggcggccuacagaagaaaaagaaaaaaaaggccacaaaaguucccucucacuuucaguaaauaaaauaaaagcagcaacagaaauaaagaaauaaaugaaauucaaaaugaaauaaauauuguguugugcagcauuaaaaaaucaauaaaaauuaaaaaugagcaagaucuaaaaaaaaaaaaaaaaaaaaaaaaaaaaaaaaaaaaaaaaaaaaaaaaaaaaaaaaaaaaaaaaugcaucccccccccccccccccccccccccccccccaaaggcucuuuucagagccaccagaauu

SEQ ID NO: 1146 - RNA, 2297 nt, Artificial Sequence
  mRNA product Design f-4 comprising derived and/or modified sequence from HRSV(A2)__F0_DSCav1 (opt11)
gggagagucccgcagucggcguccagcggcucugcuuguucgugugugugucguugcaggccuuauucaagcuuaccauggaacuacuuauccucaaagccaacgccaucaccaccauccucacagcaguaaccuuuugcuucgccucaggccaaaauaucacagaagaauuuuaccagaguaccugcuccgccguauccaaaggauaccucagcgcgcuccgcaccggcugguacacuucaguaaucacaaucgaacuauccaacaucaaagaaaacaaaugcaacggcaccgacgcgaaagucaaacucaucaaacaagaacuagacaaauacaaaaaugccguaacagaacuacaacuguuaaugcagagcacacccgccaccaacaaccgcgcccgccgggaacucccccgauucaugaacuacacacucaacaacgccaaaaagacgaacgucacccucagcaagaaacgaaaacgcagauuccucgguuuccuacuaggcguaggcucagcaauagccuccggaguagccgucugcaaaguccugcacuuagaaggcgaagucaacaaaaucaaauccgcccuacucuccacgaacaaagccgucgucucccuguccaacggugucuccguuuuaaccuucaaaguucuggaccucaaaaacuacauagacaaacagcuucuccccauccucaacaaacaauccuguagcaucuccaacaucgaaaccgucauagaauuucaacagaaaaacaacagacugcucgaaaucacccgcgaguucuccgucaacgccggcgucacgacucccgucuccaccuauaugcucacgaacucggaacuccuuucccuaaucaacgacaugccgaucaccaacgaccaaaagaaacucaugucaaacaacguacaaauuguccgccaacaaucauacuccaucaugugcauaauuaaagaagaaguccucgcauacguaguccaacucccccucuacggcgucaucgacacccccugcuggaaacuccacaccuccccacucugcacaaccaacaccaaagaaggcucaaacauaugccuaacgcgcaccgaucgcgguugguacugcgacaacgccgguuccgucagcuucuucccccaagcagagacaugcaaaguccaaucaaaccgcgucuucugcgacaccaugaacucacuaacccuuccaagcgaagucaaccucugcaacguugacaucuucaaccccaaauacgacuguaaaaucaugaccuccaagaccgacguauccucuuccgucaucacaucccuaggcgcuaucguauccugcuaugguaaaaccaaaugcaccgccuccaacaaaaaccgcggcaucaucaagacauuuuccaacggcugcgacuacgugagcaacaaaggcgucgacaccgucuccguaggcaacacccucuacuauguaaacaaacaagagggcaaaucacucuacgucaaaggggaacccaucaucaacuucuacgacccgcucguauuccccagcgaugaguucgacgccuccaucucccaggucaacgaaaagauaaaccaaucacucgcauucauucguaaauccgacgaacuccuacacaacgugaaugcaggcaaaucgaccacuaacaucaugaucaccaccaucaucaucgucaucauagucauccuccugucccuuaucgccgucggucuuuuauuauacugcaaagcccgcagcacccccgucacccucucuaaggaccaacucagcggcaucaauaacaucgcauucucuaacuaaggacuagugaagggaacacccaaauuuaauucagccuuaagcacaauuaauuaagagugaaacguaauuguacaagcaguuggucacccaccauagggcaugaucaacaccgcaaccuuuccuuuuucccccagugauucugaaaaaccccucuucccuucagcuugcuuagauguuccaaauuuaguaagcuuaaggcggccuacagaagaaaaagaaaaaaaaggccacaaaaguucccucucacuuucaguaaauaaaauaaaagcagcaacagaaauaaagaaauaaaugaaauucaaaaugaaauaaauauuguguugugcagcauuaaaaaaucaauaaaaauuaaaaaugagcaagaucuaaaaaaaaaaaaaaaaaaaaaaaaaaaaaaaaaaaaaaaaaaaaaaaaaaaaaaaaaaaaaaaaugcaucccccccccccccccccccccccccccccccaaaggcucuuuucagagccaccagaauu

SEQ ID NO: 1147 - RNA, 2073 nt, Artificial Sequence
  mRNA product Design f-5 comprising derived and/or modified sequence from HRSV(A2)__F0_DSCav1 (opt1)
gggagacuuucccauucuguagcagaauuugguguugccuguggucuuggucccgcggagaagcuuaccauggagcugcucauccugaaggccaacgccaucaccaccauccugacggcggugaccuucugcuucgccagcggccagaacaucaccgaggaguucuaccaguccacgugcagcgccgucuccaagggguaccucagcgcccugcggaccggcugguacaccuccgugaucaccaucgagcugagcaacaucaaggagaacaagugcaacgggaccgacgccaaggugaagcucaucaagcaggagcuggacaaguacaagaacgcggucacggagcugcagcuccugaugcaguccaccccggcaaccaacaaccgcgcccggcgcgagcugccccgguucaugaacuacacccucaacaacgccaagaagacgaacgugacccugagcaagaagcgcaagcggcgcuuccugggcuuccuccugggggugggcuccgccaucgcgagcggcgucgccgugugcaaggugcugcaccucgagggggaggucaacaagaucaagagcgcccugcuguccaccaacaaggccguggugagccucuccaacggcgucagcgugcugaccuucaaggugcuggaccucaagaacuacaucgacaagcagcugcugcccauccugaacaagcagagcugcuccaucagcaacaucgagacggugaucgaguuccagcagaagaacaaccggcuccuggagaucacccgcgaguucagcgugaacgccggggucaccacccccguguccacguacaugcugaccaacagcgagcuccugucccugaucaacgacaugccgaucaccaacgaccagaagaagcucaugagcaacaacgugcagaucguccggcagcaguccuacagcaucaugugcaucaucaaggaggaggugcuggcguacgugguccagcugccccucuacggcgugaucgacacccccugcuggaagcugcacacgagcccccugugcaccaccaacaccaaggagggguccaacaucugccucacgcgcaccgaccggggcugguacugcgacaacgccggcagcgucuccuucuucccgcaggccgagaccugcaaggugcagagcaaccgcguguucugcgacaccaugaacucccugacgcugcccagcgagguaaaccucugcaacgucgacaucuucaaccccaaguacgacugcaagaucaugaccuccaagaccgacgugagcuccagcgugaucaccucccugggggccaucgucagcugcuacggcaagacgaagugcaccgccagcaacaagaaccgggggaucaucaagaccuucuccaacggcugcgacuacgugagcaacaagggcguggacaccguguccgucgggaacacccuguacuacgugaacaagcaggagggcaagagccucuacgugaagggggagcccaucaucaacuucuacgacccgcuggucuuccccuccgacgaguucgacgcgagcaucucccaggugaacgagaagaucaaccagagccuggccuucauccgcaaguccgacgagcugcuccacaacgugaacgccggcaagagcacgaccaacaucaugaucaccaccaucaucaucgucaucaucgugauccugcugucccucaucgccguggggcugcugcucuacugcaaggcccggagcacgcccgucacccuguccaaggaccagcugagcggcaucaacaacaucgcguucuccaacugaggacuaguacuggcugcaucucccuuuccucuguccuccauccuucucccaggauggugaagggggaccugguacccagugauccccaccccaggauccuaaaucaugacuuaccugcuaauaaaaacucauuggaaaagugagaagaucuaaaaaaaaaaaaaaaaaaaaaaaaaaaaaaaaaaaaaaaaaaaaaaaaaaaaaaaaaaaaaaaaugcaucccccccccccccccccccccccccccccccaaaggcucuuuucagagccaccagaauu

SEQ ID NO: 1148 - RNA, 2073 nt, Artificial Sequence
  mRNA product Design f-5 comprising derived and/or modified sequence from HRSV(A2)__F0_DSCav1 (opt1)
gggagacuuucccauucuguagcagaauuugguguugccuguggucuuggucccgcggagaagcuuaccauggagcugcucauccugaaggccaacgccaucaccaccauccugacggcggugaccuucugcuucgccagcggccagaacaucaccgaggaguucuaccaguccacgugcagcgccgucuccaagggguaccucagcgcccugcgcaccggcugguacaccuccgugaucaccaucgagcugagcaacaucaaggagaacaagugcaacgggaccgacgccaaggugaagcucaucaagcaggagcuggacaaguacaagaacgcggucacggagcugcagcuccugaugcaguccacccccgccaccaacaaccgggcccgccgggagcugccgcgcuucaugaacuacacccucaacaacgccaagaagacgaacgugacccugagcaagaagcggaagcgccgguuccugggcuuccuccugggggugggcuccgcgaucgccagcggcgucgccgugugcaaggugcugcaccucgagggggaggucaacaagaucaaguccgcccugcugagcaccaacaaggccguggugucccucagcaacggcgucuccgugcugaccuucaaggugcuggaccucaagaacuacaucgacaagcagcugcugcccauccucaacaagcagagcugcuccaucagcaacaucgagacggucaucgaguuccagcagaagaacaaccgccugcuggagaucacccgggaguucuccgugaacgcgggggugaccacccccgucagcacguacaugcucaccaacagcgagcugcugucccucaucaacgacaugcccaucaccaacgaccagaagaagcugaugagcaacaacgugcagaucgugcgccagcaguccuacagcaucaugugcaucaucaaggaggagguccuggccuacguggugcagcucccgcuguacggcgucaucgacacccccugcuggaagcugcacacgagcccccucugcaccaccaacaccaaggaggggagcaacaucugccugacgcggaccgaccgcggcugguacugcgacaacgccggcuccgugagcuucuucccccaggccgagaccugcaagguccaguccaaccggguguucugcgacaccaugaacagccugacgcucccguccgaggugaaccugugcaacgucgacaucuucaaccccaaguacgacugcaagaucaugaccagcaagaccgacguguccagcuccgugaucaccagccugggggccaucgucuccugcuacggcaagacgaagugcaccgcgagcaacaagaaccgcgggaucaucaagaccuucuccaacggcugcgacuacgugagcaacaagggcguggacaccgucagcguggggaacacccucuacuacgugaacaagcaggagggcaagucccuguacgucaagggggagcccaucaucaacuucuacgacccccugguguucccgagcgacgaguucgacgccuccaucagccaggugaacgagaagaucaaccagucccucgccuucauccggaaguccgacgagcugcugcacaacgucaacgccggcaaguccacgaccaacaucaugaucaccaccaucaucaucgugaucaucgugauccugcucagccugaucgccgucgggcugcuccuguacugcaaggcgcgcuccacgcccgugacccugagcaaggaccagcucuccggcaucaacaacaucgccuucagcaacugaggacuaguacuggcugcaucucccuuuccucuguccuccauccuucucccaggauggugaagggggaccugguacccagugauccccaccccaggauccuaaaucaugacuuaccugcuaauaaaaacucauuggaaaagugagaagaucuaaaaaaaaaaaaaaaaaaaaaaaaaaaaaaaaaaaaaaaaaaaaaaaaaaaaaaaaaaaaaaaaugcaucccccccccccccccccccccccccccccccaaaggcucuuuucagagccaccagaauu

SEQ ID NO: 1149 - RNA, 2073 nt, Artificial Sequence
  mRNA product Design f-5 comprising derived and/or modified sequence from HRSV(A2)__F0_DSCav1 (opt2)
gggagacuuucccauucuguagcagaauuugguguugccuguggucuuggucccgcggagaagcuuaccauggagcuccucauccucaaggccaacgccaucaccaccauccucaccgccgucaccuucugcuucgccuccggccagaacaucaccgaggaguucuaccaguccaccugcuccgccgucuccaagggcuaccucuccgcccuccgcaccggcugguacaccuccgucaucaccaucgagcucuccaacaucaaggagaacaagugcaacggcaccgacgccaaggucaagcucaucaagcaggagcucgacaaguacaagaacgccgucaccgagcuccagcuccucaugcaguccacccccgccaccaacaaccgcgcccgccgcgagcucccccgcuucaugaacuacacccucaacaacgccaagaagaccaacgucacccucuccaagaagcgcaagcgccgcuuccucggcuuccuccucggcgucggcuccgccaucgccuccggcgucgccgucugcaagguccuccaccucgagggcgaggucaacaagaucaaguccgcccuccucuccaccaacaaggccgucgucucccucuccaacggcgucuccguccucaccuucaagguccucgaccucaagaacuacaucgacaagcagcuccuccccauccucaacaagcaguccugcuccaucuccaacaucgagaccgucaucgaguuccagcagaagaacaaccgccuccucgagaucacccgcgaguucuccgucaacgccggcgucaccacccccgucuccaccuacaugcucaccaacuccgagcuccucucccucaucaacgacaugcccaucaccaacgaccagaagaagcucauguccaacaacguccagaucguccgccagcaguccuacuccaucaugugcaucaucaaggaggagguccucgccuacgucguccagcucccccucuacggcgucaucgacacccccugcuggaagcuccacaccuccccccucugcaccaccaacaccaaggagggcuccaacaucugccucacccgcaccgaccgcggcugguacugcgacaacgccggcuccgucuccuucuucccccaggccgagaccugcaagguccaguccaaccgcgucuucugcgacaccaugaacucccucacccuccccuccgaggucaaccucugcaacgucgacaucuucaaccccaaguacgacugcaagaucaugaccuccaagaccgacgucuccuccuccgucaucaccucccucggcgccaucgucuccugcuacggcaagaccaagugcaccgccuccaacaagaaccgcggcaucaucaagaccuucuccaacggcugcgacuacgucuccaacaagggcgucgacaccgucuccgucggcaacacccucuacuacgucaacaagcaggagggcaagucccucuacgucaagggcgagcccaucaucaacuucuacgacccccucgucuuccccuccgacgaguucgacgccuccaucucccaggucaacgagaagaucaaccagucccucgccuucauccgcaaguccgacgagcuccuccacaacgucaacgccggcaaguccaccaccaacaucaugaucaccaccaucaucaucgucaucaucgucauccuccucucccucaucgccgucggccuccuccucuacugcaaggcccgcuccacccccgucacccucuccaaggaccagcucuccggcaucaacaacaucgccuucuccaacugaggacuaguacuggcugcaucucccuuuccucuguccuccauccuucucccaggauggugaagggggaccugguacccagugauccccaccccaggauccuaaaucaugacuuaccugcuaauaaaaacucauuggaaaagugagaagaucuaaaaaaaaaaaaaaaaaaaaaaaaaaaaaaaaaaaaaaaaaaaaaaaaaaaaaaaaaaaaaaaaugcaucccccccccccccccccccccccccccccccaaaggcucuuuucagagccaccagaauu

SEQ ID NO: 1150 - RNA, 2073 nt, Artificial Sequence
  mRNA product Design f-5 comprising derived and/or modified sequence from HRSV(A2)__F0_DSCav1 (opt3)
gggagacuuucccauucuguagcagaauuugguguugccuguggucuuggucccgcggagaagcuuaccauggagcugcucauccuuaaggccaacgcuauuaccacaauacugacugcagugacguucugcuuugccagcggccagaauaucaccgaagaguucuaccaauccacauguucugcggucucaaaaggguauuugagugcuuuaagaacuggaugguacaccagcguuauuacaaucgaacuguccaacauuaaggagaauaaaugcaacgguaccgacgccaaggugaaacuaaucaagcaggaacucgauaaguauaaaaaugcaguaacugagcugcagcuucugaugcagucuacacccgccaccaacaauagggcucggcgcgaguugccucgauuuaugaacuacacgcucaauaacgcaaagaaaacuaaugugacccugucgaagaaacguaagagaagguuccugggcuuucucuuaggggucggaucagccauagcuagcggcguggccguuuguaaggugcugcaccuugaaggugaggucaacaaaaucaagagugcguugcuguccacaaauaaagcagugguaucucuaagcaacgggguuuccgugcucacuuucaagguccuggaccuuaaaaauuauauugauaagcaacuguugccaauccucaacaaacagucaugcaguauuagcaacaucgaaaccgugauagaguuucagcagaagaauaaccggcuguuagagauuacacgcgaguucucugugaaugccggagucaccacgccgguuuccacuuacaugcugacaaacucagaacuccuuagccugaucaaugacaugcccauuaccaacgaucaaaagaaauugaugaguaauaacgugcagaucguaagacagcagucuuauuccaucauguguauuauaaaggaagaggugcuagcuuacgucgugcaacugccucucuacggcguuaucgacacuccaugcuggaaacugcauacaagcccccuuuguaccacgaauaccaaggaaggcucgaacauuugccugacaaggacugaucgggggugguauugugacaaugccggaucuguguccuuuuucccucaggcagagaccugcaaaguccagucaaaccgcguguuuugugauacaaugaauaguuugacucucccaagcgagguaaaccugugcaauguugacaucuucaaccccaaguacgauugcaagauaaugaccuccaaaacagacgugucuagcucagucauuaccaguuuaggugcuaucguguccuguuauggcaagacuaaaugcacggccagcaacaagaaucgagggaucauuaaaacauuuucuaacggaugugauuacgucucaaauaagggcguggacaccguuaguguggguaacacucuguauuacguaaauaagcaagaagggaaaagccuauaugucaagggagagccuaucauuaacuucuacgacccacucguguucccguccgaugaauuugacgcgucuauaucgcagguuaaugagaaaaucaaccagagccuggccuucauuagaaaguccgaugaacuuuugcacaaugugaacgcaggcaaaucaaccacaaauaucaugaucaccacuauuauaaucgucauuaucgugauucugcucagucugaucgcuguaggccuucuguuguacugcaaggccaggucuacacccgugacgcucagcaaggaccagcuguccgggauaaacaauaucgcuuuuucaaacugaggacuaguacuggcugcaucucccuuuccucuguccuccauccuucucccaggauggugaagggggaccugguacccagugauccccaccccaggauccuaaaucaugacuuaccugcuaauaaaaacucauuggaaaagugagaagaucuaaaaaaaaaaaaaaaaaaaaaaaaaaaaaaaaaaaaaaaaaaaaaaaaaaaaaaaaaaaaaaaaugcaucccccccccccccccccccccccccccccccaaaggcucuuuucagagccaccagaauu

SEQ ID NO: 1151 - RNA, 2073 nt, Artificial Sequence
  mRNA product Design f-5 comprising derived and/or modified sequence from HRSV(A2)__F0_DSCav1 (opt4)
gggagacuuucccauucuguagcagaauuugguguugccuguggucuuggucccgcggagaagcuuaccauggagcugcugauccugaaggccaacgccaucaccaccauccugaccgccgugaccuucugcuucgccagcggccagaacaucaccgaggaguucuaccagagcaccugcagcgccgugagcaagggcuaccugagcgcccugagaaccggcugguacaccagcgugaucaccaucgagcugagcaacaucaaggagaacaagugcaacggcaccgacgccaaggugaagcugaucaagcaggagcuggacaaguacaagaacgccgugaccgagcugcagcugcugaugcagagcacccccgccaccaacaacagagccagaagagagcugcccagauucaugaacuacacccugaacaacgccaagaagaccaacgugacccugagcaagaagagaaagagaagauuccugggcuuccugcugggcgugggcagcgccaucgccagcggcguggccgugugcaaggugcugcaccuggagggcgaggugaacaagaucaagagcgcccugcugagcaccaacaaggccguggugagccugagcaacggcgugagcgugcugaccuucaaggugcuggaccugaagaacuacaucgacaagcagcugcugcccauccugaacaagcagagcugcagcaucagcaacaucgagaccgugaucgaguuccagcagaagaacaacagacugcuggagaucaccagagaguucagcgugaacgccggcgugaccacccccgugagcaccuacaugcugaccaacagcgagcugcugagccugaucaacgacaugcccaucaccaacgaccagaagaagcugaugagcaacaacgugcagaucgugagacagcagagcuacagcaucaugugcaucaucaaggaggaggugcuggccuacguggugcagcugccccuguacggcgugaucgacacccccugcuggaagcugcacaccagcccccugugcaccaccaacaccaaggagggcagcaacaucugccugaccagaaccgacagaggcugguacugcgacaacgccggcagcgugagcuucuucccccaggccgagaccugcaaggugcagagcaacagaguguucugcgacaccaugaacagccugacccugcccagcgaggugaaccugugcaacguggacaucuucaaccccaaguacgacugcaagaucaugaccagcaagaccgacgugagcagcagcgugaucaccagccugggcgccaucgugagcugcuacggcaagaccaagugcaccgccagcaacaagaacagaggcaucaucaagaccuucagcaacggcugcgacuacgugagcaacaagggcguggacaccgugagcgugggcaacacccuguacuacgugaacaagcaggagggcaagagccuguacgugaagggcgagcccaucaucaacuucuacgacccccugguguuccccagcgacgaguucgacgccagcaucagccaggugaacgagaagaucaaccagagccuggccuucaucagaaagagcgacgagcugcugcacaacgugaacgccggcaagagcaccaccaacaucaugaucaccaccaucaucaucgugaucaucgugauccugcugagccugaucgccgugggccugcugcuguacugcaaggccagaagcacccccgugacccugagcaaggaccagcugagcggcaucaacaacaucgccuucagcaacugaggacuaguacuggcugcaucucccuuuccucuguccuccauccuucucccaggauggugaagggggaccugguacccagugauccccaccccaggauccuaaaucaugacuuaccugcuaauaaaaacucauuggaaaagugagaagaucuaaaaaaaaaaaaaaaaaaaaaaaaaaaaaaaaaaaaaaaaaaaaaaaaaaaaaaaaaaaaaaaaugcaucccccccccccccccccccccccccccccccaaaggcucuuuucagagccaccagaauu

SEQ ID NO: 1152 - RNA, 2073 nt, Artificial Sequence
  mRNA product Design f-5 comprising derived and/or modified sequence from HRSV(A2)__F0_DSCav1 (opt5)
gggagacuuucccauucuguagcagaauuugguguugccuguggucuuggucccgcggagaagcuuaccauggagcugcucauccugaaggccaacgcuauuaccacaauccuuacggccgugaccuucugcuuugcgagcggccagaauauuacagaagaguucuaccaauccaccuguucugcugucagcaaaggguaucuguccgcccucagaacaggaugguacaccucuguuaucacaauugaacugagcaacaucaaggagaauaaaugcaacggcaccgacgccaaggugaaacuuaucaagcaggaacuggauaaguauaaaaaugcugugacggagcuccagcugcugaugcaguccacccccgccacaaacaaucgggcucgcagagagcucccucgguuuaugaacuacacccugaauaacgccaagaaaacaaaugucacccuuucuaagaaacgcaagagacgguuccugggguuucuccugggagugggcagcgcgauugccuccgggguugcuguguguaagguccuucaccuggaaggagaggugaacaaaaucaagagcgcccuccugucuacgaauaaagcuguugugucccugagcaacggcgucucugugcucacauucaaggugcuggaccuuaaaaauuauauugauaagcaacugcucccgauccugaacaaacaguccugcagcauuucuaacaucgaaaccgucauugaguuucagcagaagaauaaccgccuucuggagaucacaagagaauuuuccguuaaugccggcgugaccacccccgugagcacauacaugcucacgaacuccgagcugcugucucucaucaaugacaugccuauuaccaacgaucaaaagaaacugaugagcaauaacguccagaucgugcggcagcaguccuauagcauuauguguaucauuaaggaagagguucuugcguacgugguccaacugccccucuacggggugaucgacacaccuugcuggaaacugcauaccucuccccuuuguacaaccaauacgaaggaaggauccaacaucugccugacacgcaccgauagaggcugguauugugacaaugccgggagcguuucuuucuucccucaggcugagaccugcaaagugcagagcaaccgggucuuuugugauacaaugaacucccucacccugccgucugaggugaaucugugcaaugucgacauuuucaaccccaaguacgauugcaagaucaugacaagcaaaacggacguguccagcucuguuauuaccucccucggagccaucgugagcuguuauggcaagacaaaaugcaccgcuucuaacaagaaucgcgggauuaucaaaacauuuuccaacggaugugauuacgucagcaauaagggcguggacaccguuuccgugggcaacacgcuguauuacgucaauaagcaagaagggaaaucucuuuaugugaagggagagccuaucauuaacuucuacgacccccugguguucccuagcgaugaauuugacgccuccaucucucagguuaaugagaaaauuaaccagagccucgccuucaucagaaaguccgaugaacugcugcacaaugucaacgcuggcaaaagcaccacaaauauuaugaucaccacaauuaucaucgugauuaucgugauucuucucucucugaucgcggucgggcugcuccuguacugcaaggcccgguccacccccgugacgcuuagcaaggaccagcugucuggaauuaacaauaucgcuuuuuccaacugaggacuaguacuggcugcaucucccuuuccucuguccuccauccuucucccaggauggugaagggggaccugguacccagugauccccaccccaggauccuaaaucaugacuuaccugcuaauaaaaacucauuggaaaagugagaagaucuaaaaaaaaaaaaaaaaaaaaaaaaaaaaaaaaaaaaaaaaaaaaaaaaaaaaaaaaaaaaaaaaugcaucccccccccccccccccccccccccccccccaaaggcucuuuucagagccaccagaauu

SEQ ID NO: 1153 - RNA, 2073 nt, Artificial Sequence
  mRNA product Design f-5 comprising derived and/or modified sequence from HRSV(A2)__F0_DSCav1 (opt6)
gggagacuuucccauucuguagcagaauuugguguugccuguggucuuggucccgcggagaagcuuaccauggaauuauuaauccucaaagcgaacgcuauuacuaccauucuaacagcagucacauucugcuucgccucaggccaaaacauuacagaagaauuuuaccaaucaacaugcucugccguaucaaaaggcuaccuauccgcccuacgaacaggcugguacacaagcguaauaacaaucgaacuaucaaacauaaaagaaaacaaaugcaacgguacagacgccaaaguuaaacuaauaaaacaagaacucgauaaauacaaaaacgcaguaacagaauuacaacuacuaaugcaaucaacaccugcaacaaacaauagagccaggagagaauuaccucgauucaugaauuacacacucaauaacgcaaaaaaaaccaacguuacacuaucaaaaaaaagaaaacgacgauucuuaggauuccuacucggagucggaucagcaauagcaucuggcguugcaguaugcaaaguauuacacuuagaaggugaagucaauaaaauaaaaagcgcgcuacuaaguacaaacaaagcagucgucucccuaucaaacggagucucaguccuaacauucaaaguacucgaccuaaaaaauuacauagauaaacaacuacuuccaauauuaaacaaacaauccuguagcaucagcaauauagaaacaguaauagaauuucaacaaaaaaacaaccgauuauuagaaaucacucgagaauuuuccguaaacgccgggguaacaacuccagucucaaccuacaugcuaaccaauucagaacuauugagcuuaauaaacgacaugccaauaaccaacgaccaaaaaaaacuaaugucuaacaauguucaaaucgucagacaacaaaguuacaguauaauguguauaaucaaagaagaaguccuagcauacguaguccaacucccacuauauggaguuaucgacacaccauguuggaaauuacacaccucaccauuaugcacaaccaauacaaaagaaggaucaaacauaugccuuacacggacagaccgcggaugguauugugacaacgcuggcucagucuccuuuuucccacaagcagaaacaugcaaaguacaaucaaacagagucuuuugcgauaccaugaacucacuuacauuaccaagcgaaguaaaucuuuguaacgucgacaucuucaauccuaaauaugacugcaaaaucaugaccucaaaaacagacguuagcucuucaguaaucacuagcuuaggagcaaucguaucaugcuacggcaaaacaaaauguacagcaucaaauaaaaacagaggaaucauaaaaacauuuucaaacggaugcgauuauguaagcaacaaaggaguagauacuguaagcguaggaaacacauuguacuauguaaacaaacaagaaggaaaaucacucuauguaaaaggagaaccuauaaucaauuucuacgauccauuaguguucccaucagaugaauuugacgccucaauaucacaaguuaaugaaaaaauaaaucaaucgcuagcauucauacguaaaucagaugaauuacuacauaacguaaacgcaggcaaauccacaacaaauaucaugaucacaacaauuauaauaguaauaauaguaauacuacuaucacuaauagccguaggacuccuacuauacugcaaagcaagaucuacuccaguaacccucucaaaagaucaacuaagcggaauuaauaacaucgcauucagcaacuaaggacuaguacuggcugcaucucccuuuccucuguccuccauccuucucccaggauggugaagggggaccugguacccagugauccccaccccaggauccuaaaucaugacuuaccugcuaauaaaaacucauuggaaaagugagaagaucuaaaaaaaaaaaaaaaaaaaaaaaaaaaaaaaaaaaaaaaaaaaaaaaaaaaaaaaaaaaaaaaaugcaucccccccccccccccccccccccccccccccaaaggcucuuuucagagccaccagaauu

SEQ ID NO: 1154 - RNA, 2073 nt, Artificial Sequence
  mRNA product Design f-5 comprising derived and/or modified sequence from HRSV(A2)__F0_DSCav1 (opt11)
gggagacuuucccauucuguagcagaauuugguguugccuguggucuuggucccgcggagaagcuuaccauggaacuacuuauccucaaagccaacgccaucaccaccauccucacagcaguaaccuuuugcuucgccucaggccaaaauaucacagaagaauuuuaccagaguaccugcuccgccguauccaaaggauaccucagcgcgcuccgcaccggcugguacacuucaguaaucacaaucgaacuauccaacaucaaagaaaacaaaugcaacggcaccgacgcgaaagucaaacucaucaaacaagaacuagacaaauacaaaaaugccguaacagaacuacaacuguuaaugcagagcacacccgccaccaacaaccgcgcccgccgggaacucccccgauucaugaacuacacacucaacaacgccaaaaagacgaacgucacccucagcaagaaacgaaaacgcagauuccucgguuuccuacuaggcguaggcucagcaauagccuccggaguagccgucugcaaaguccugcacuuagaaggcgaagucaacaaaaucaaauccgcccuacucuccacgaacaaagccgucgucucccuguccaacggugucuccguuuuaaccuucaaaguucuggaccucaaaaacuacauagacaaacagcuucuccccauccucaacaaacaauccuguagcaucuccaacaucgaaaccgucauagaauuucaacagaaaaacaacagacugcucgaaaucacccgcgaguucuccgucaacgccggcgucacgacucccgucuccaccuauaugcucacgaacucggaacuccuuucccuaaucaacgacaugccgaucaccaacgaccaaaagaaacucaugucaaacaacguacaaauuguccgccaacaaucauacuccaucaugugcauaauuaaagaagaaguccucgcauacguaguccaacucccccucuacggcgucaucgacacccccugcuggaaacuccacaccuccccacucugcacaaccaacaccaaagaaggcucaaacauaugccuaacgcgcaccgaucgcgguugguacugcgacaacgccgguuccgucagcuucuucccccaagcagagacaugcaaaguccaaucaaaccgcgucuucugcgacaccaugaacucacuaacccuuccaagcgaagucaaccucugcaacguugacaucuucaaccccaaauacgacuguaaaaucaugaccuccaagaccgacguauccucuuccgucaucacaucccuaggcgcuaucguauccugcuaugguaaaaccaaaugcaccgccuccaacaaaaaccgcggcaucaucaagacauuuuccaacggcugcgacuacgugagcaacaaaggcgucgacaccgucuccguaggcaacacccucuacuauguaaacaaacaagagggcaaaucacucuacgucaaaggggaacccaucaucaacuucuacgacccgcucguauuccccagcgaugaguucgacgccuccaucucccaggucaacgaaaagauaaaccaaucacucgcauucauucguaaauccgacgaacuccuacacaacgugaaugcaggcaaaucgaccacuaacaucaugaucaccaccaucaucaucgucaucauagucauccuccugucccuuaucgccgucggucuuuuauuauacugcaaagcccgcagcacccccgucacccucucuaaggaccaacucagcggcaucaauaacaucgcauucucuaacuaaggacuaguacuggcugcaucucccuuuccucuguccuccauccuucucccaggauggugaagggggaccugguacccagugauccccaccccaggauccuaaaucaugacuuaccugcuaauaaaaacucauuggaaaagugagaagaucuaaaaaaaaaaaaaaaaaaaaaaaaaaaaaaaaaaaaaaaaaaaaaaaaaaaaaaaaaaaaaaaaugcaucccccccccccccccccccccccccccccccaaaggcucuuuucagagccaccagaauu

SEQ ID NO: 1155 - RNA, 2069 nt, Artificial Sequence
  mRNA product Design g-1 comprising derived and/or modified sequence from HRSV(A2)__F0_DSCav1 (opt1)
gggagacuuucccauucuguagcagaauuugguguugccuguggucuuggucccgcggagaagcuuaccauggagcugcucauccugaaggccaacgccaucaccaccauccugacggcggugaccuucugcuucgccagcggccagaacaucaccgaggaguucuaccaguccacgugcagcgccgucuccaagggguaccucagcgcccugcggaccggcugguacaccuccgugaucaccaucgagcugagcaacaucaaggagaacaagugcaacgggaccgacgccaaggugaagcucaucaagcaggagcuggacaaguacaagaacgcggucacggagcugcagcuccugaugcaguccaccccggcaaccaacaaccgcgcccggcgcgagcugccccgguucaugaacuacacccucaacaacgccaagaagacgaacgugacccugagcaagaagcgcaagcggcgcuuccugggcuuccuccugggggugggcuccgccaucgcgagcggcgucgccgugugcaaggugcugcaccucgagggggaggucaacaagaucaagagcgcccugcuguccaccaacaaggccguggugagccucuccaacggcgucagcgugcugaccuucaaggugcuggaccucaagaacuacaucgacaagcagcugcugcccauccugaacaagcagagcugcuccaucagcaacaucgagacggugaucgaguuccagcagaagaacaaccggcuccuggagaucacccgcgaguucagcgugaacgccggggucaccacccccguguccacguacaugcugaccaacagcgagcuccugucccugaucaacgacaugccgaucaccaacgaccagaagaagcucaugagcaacaacgugcagaucguccggcagcaguccuacagcaucaugugcaucaucaaggaggaggugcuggcguacgugguccagcugccccucuacggcgugaucgacacccccugcuggaagcugcacacgagcccccugugcaccaccaacaccaaggagggguccaacaucugccucacgcgcaccgaccggggcugguacugcgacaacgccggcagcgucuccuucuucccgcaggccgagaccugcaaggugcagagcaaccgcguguucugcgacaccaugaacucccugacgcugcccagcgagguaaaccucugcaacgucgacaucuucaaccccaaguacgacugcaagaucaugaccuccaagaccgacgugagcuccagcgugaucaccucccugggggccaucgucagcugcuacggcaagacgaagugcaccgccagcaacaagaaccgggggaucaucaagaccuucuccaacggcugcgacuacgugagcaacaagggcguggacaccguguccgucgggaacacccuguacuacgugaacaagcaggagggcaagagccucuacgugaagggggagcccaucaucaacuucuacgacccgcuggucuuccccuccgacgaguucgacgcgagcaucucccaggugaacgagaagaucaaccagagccuggccuucauccgcaaguccgacgagcugcuccacaacgugaacgccggcaagagcacgaccaacaucaugaucaccaccaucaucaucgucaucaucgugauccugcugucccucaucgccguggggcugcugcucuacugcaaggcccggagcacgcccgucacccuguccaaggaccagcugagcggcaucaacaacaucgcguucuccaacugaggacuaguggaagcauuuuccuggcugauuaaaagaaauuacucagcuauggucaucuguuccuguuagaaggcuaugcagcauauuauauacuaugcgcauguuaugaaaugcauaauaaaaaauuuuaaaaaaucuaaaagaucuaaaaaaaaaaaaaaaaaaaaaaaaaaaaaaaaaaaaaaaaaaaaaaaaaaaaaaaaaaaaaaaaugcaucccccccccccccccccccccccccccccccaaaggcucuuuucagagccaccagaauu

SEQ ID NO: 1156 - RNA, 2069 nt, Artificial Sequence
  mRNA product Design g-1 comprising derived and/or modified sequence from HRSV(A2)__F0_DSCav1 (opt1)
gggagacuuucccauucuguagcagaauuugguguugccuguggucuuggucccgcggagaagcuuaccauggagcugcucauccugaaggccaacgccaucaccaccauccugacggcggugaccuucugcuucgccagcggccagaacaucaccgaggaguucuaccaguccacgugcagcgccgucuccaagggguaccucagcgcccugcgcaccggcugguacaccuccgugaucaccaucgagcugagcaacaucaaggagaacaagugcaacgggaccgacgccaaggugaagcucaucaagcaggagcuggacaaguacaagaacgcggucacggagcugcagcuccugaugcaguccacccccgccaccaacaaccgggcccgccgggagcugccgcgcuucaugaacuacacccucaacaacgccaagaagacgaacgugacccugagcaagaagcggaagcgccgguuccugggcuuccuccugggggugggcuccgcgaucgccagcggcgucgccgugugcaaggugcugcaccucgagggggaggucaacaagaucaaguccgcccugcugagcaccaacaaggccguggugucccucagcaacggcgucuccgugcugaccuucaaggugcuggaccucaagaacuacaucgacaagcagcugcugcccauccucaacaagcagagcugcuccaucagcaacaucgagacggucaucgaguuccagcagaagaacaaccgccugcuggagaucacccgggaguucuccgugaacgcgggggugaccacccccgucagcacguacaugcucaccaacagcgagcugcugucccucaucaacgacaugcccaucaccaacgaccagaagaagcugaugagcaacaacgugcagaucgugcgccagcaguccuacagcaucaugugcaucaucaaggaggagguccuggccuacguggugcagcucccgcuguacggcgucaucgacacccccugcuggaagcugcacacgagcccccucugcaccaccaacaccaaggaggggagcaacaucugccugacgcggaccgaccgcggcugguacugcgacaacgccggcuccgugagcuucuucccccaggccgagaccugcaagguccaguccaaccggguguucugcgacaccaugaacagccugacgcucccguccgaggugaaccugugcaacgucgacaucuucaaccccaaguacgacugcaagaucaugaccagcaagaccgacguguccagcuccgugaucaccagccugggggccaucgucuccugcuacggcaagacgaagugcaccgcgagcaacaagaaccgcgggaucaucaagaccuucuccaacggcugcgacuacgugagcaacaagggcguggacaccgucagcguggggaacacccucuacuacgugaacaagcaggagggcaagucccuguacgucaagggggagcccaucaucaacuucuacgacccccugguguucccgagcgacgaguucgacgccuccaucagccaggugaacgagaagaucaaccagucccucgccuucauccggaaguccgacgagcugcugcacaacgucaacgccggcaaguccacgaccaacaucaugaucaccaccaucaucaucgugaucaucgugauccugcucagccugaucgccgucgggcugcuccuguacugcaaggcgcgcuccacgcccgugacccugagcaaggaccagcucuccggcaucaacaacaucgccuucagcaacugaggacuaguggaagcauuuuccuggcugauuaaaagaaauuacucagcuauggucaucuguuccuguuagaaggcuaugcagcauauuauauacuaugcgcauguuaugaaaugcauaauaaaaaauuuuaaaaaaucuaaaagaucuaaaaaaaaaaaaaaaaaaaaaaaaaaaaaaaaaaaaaaaaaaaaaaaaaaaaaaaaaaaaaaaaugcaucccccccccccccccccccccccccccccccaaaggcucuuuucagagccaccagaauu

SEQ ID NO: 1157 - RNA, 2069 nt, Artificial Sequence
  mRNA product Design g-1 comprising derived and/or modified sequence from HRSV(A2)__F0_DSCav1 (opt2)
gggagacuuucccauucuguagcagaauuugguguugccuguggucuuggucccgcggagaagcuuaccauggagcuccucauccucaaggccaacgccaucaccaccauccucaccgccgucaccuucugcuucgccuccggccagaacaucaccgaggaguucuaccaguccaccugcuccgccgucuccaagggcuaccucuccgcccuccgcaccggcugguacaccuccgucaucaccaucgagcucuccaacaucaaggagaacaagugcaacggcaccgacgccaaggucaagcucaucaagcaggagcucgacaaguacaagaacgccgucaccgagcuccagcuccucaugcaguccacccccgccaccaacaaccgcgcccgccgcgagcucccccgcuucaugaacuacacccucaacaacgccaagaagaccaacgucacccucuccaagaagcgcaagcgccgcuuccucggcuuccuccucggcgucggcuccgccaucgccuccggcgucgccgucugcaagguccuccaccucgagggcgaggucaacaagaucaaguccgcccuccucuccaccaacaaggccgucgucucccucuccaacggcgucuccguccucaccuucaagguccucgaccucaagaacuacaucgacaagcagcuccuccccauccucaacaagcaguccugcuccaucuccaacaucgagaccgucaucgaguuccagcagaagaacaaccgccuccucgagaucacccgcgaguucuccgucaacgccggcgucaccacccccgucuccaccuacaugcucaccaacuccgagcuccucucccucaucaacgacaugcccaucaccaacgaccagaagaagcucauguccaacaacguccagaucguccgccagcaguccuacuccaucaugugcaucaucaaggaggagguccucgccuacgucguccagcucccccucuacggcgucaucgacacccccugcuggaagcuccacaccuccccccucugcaccaccaacaccaaggagggcuccaacaucugccucacccgcaccgaccgcggcugguacugcgacaacgccggcuccgucuccuucuucccccaggccgagaccugcaagguccaguccaaccgcgucuucugcgacaccaugaacucccucacccuccccuccgaggucaaccucugcaacgucgacaucuucaaccccaaguacgacugcaagaucaugaccuccaagaccgacgucuccuccuccgucaucaccucccucggcgccaucgucuccugcuacggcaagaccaagugcaccgccuccaacaagaaccgcggcaucaucaagaccuucuccaacggcugcgacuacgucuccaacaagggcgucgacaccgucuccgucggcaacacccucuacuacgucaacaagcaggagggcaagucccucuacgucaagggcgagcccaucaucaacuucuacgacccccucgucuuccccuccgacgaguucgacgccuccaucucccaggucaacgagaagaucaaccagucccucgccuucauccgcaaguccgacgagcuccuccacaacgucaacgccggcaaguccaccaccaacaucaugaucaccaccaucaucaucgucaucaucgucauccuccucucccucaucgccgucggccuccuccucuacugcaaggcccgcuccacccccgucacccucuccaaggaccagcucuccggcaucaacaacaucgccuucuccaacugaggacuaguggaagcauuuuccuggcugauuaaaagaaauuacucagcuauggucaucuguuccuguuagaaggcuaugcagcauauuauauacuaugcgcauguuaugaaaugcauaauaaaaaauuuuaaaaaaucuaaaagaucuaaaaaaaaaaaaaaaaaaaaaaaaaaaaaaaaaaaaaaaaaaaaaaaaaaaaaaaaaaaaaaaaugcaucccccccccccccccccccccccccccccccaaaggcucuuuucagagccaccagaauu

SEQ ID NO: 1158 - RNA, 2069 nt, Artificial Sequence
  mRNA product Design g-1 comprising derived and/or modified sequence from HRSV(A2)__F0_DSCav1 (opt3)
gggagacuuucccauucuguagcagaauuugguguugccuguggucuuggucccgcggagaagcuuaccauggagcugcucauccuuaaggccaacgcuauuaccacaauacugacugcagugacguucugcuuugccagcggccagaauaucaccgaagaguucuaccaauccacauguucugcggucucaaaaggguauuugagugcuuuaagaacuggaugguacaccagcguuauuacaaucgaacuguccaacauuaaggagaauaaaugcaacgguaccgacgccaaggugaaacuaaucaagcaggaacucgauaaguauaaaaaugcaguaacugagcugcagcuucugaugcagucuacacccgccaccaacaauagggcucggcgcgaguugccucgauuuaugaacuacacgcucaauaacgcaaagaaaacuaaugugacccugucgaagaaacguaagagaagguuccugggcuuucucuuaggggucggaucagccauagcuagcggcguggccguuuguaaggugcugcaccuugaaggugaggucaacaaaaucaagagugcguugcuguccacaaauaaagcagugguaucucuaagcaacgggguuuccgugcucacuuucaagguccuggaccuuaaaaauuauauugauaagcaacuguugccaauccucaacaaacagucaugcaguauuagcaacaucgaaaccgugauagaguuucagcagaagaauaaccggcuguuagagauuacacgcgaguucucugugaaugccggagucaccacgccgguuuccacuuacaugcugacaaacucagaacuccuuagccugaucaaugacaugcccauuaccaacgaucaaaagaaauugaugaguaauaacgugcagaucguaagacagcagucuuauuccaucauguguauuauaaaggaagaggugcuagcuuacgucgugcaacugccucucuacggcguuaucgacacuccaugcuggaaacugcauacaagcccccuuuguaccacgaauaccaaggaaggcucgaacauuugccugacaaggacugaucgggggugguauugugacaaugccggaucuguguccuuuuucccucaggcagagaccugcaaaguccagucaaaccgcguguuuugugauacaaugaauaguuugacucucccaagcgagguaaaccugugcaauguugacaucuucaaccccaaguacgauugcaagauaaugaccuccaaaacagacgugucuagcucagucauuaccaguuuaggugcuaucguguccuguuauggcaagacuaaaugcacggccagcaacaagaaucgagggaucauuaaaacauuuucuaacggaugugauuacgucucaaauaagggcguggacaccguuaguguggguaacacucuguauuacguaaauaagcaagaagggaaaagccuauaugucaagggagagccuaucauuaacuucuacgacccacucguguucccguccgaugaauuugacgcgucuauaucgcagguuaaugagaaaaucaaccagagccuggccuucauuagaaaguccgaugaacuuuugcacaaugugaacgcaggcaaaucaaccacaaauaucaugaucaccacuauuauaaucgucauuaucgugauucugcucagucugaucgcuguaggccuucuguuguacugcaaggccaggucuacacccgugacgcucagcaaggaccagcuguccgggauaaacaauaucgcuuuuucaaacugaggacuaguggaagcauuuuccuggcugauuaaaagaaauuacucagcuauggucaucuguuccuguuagaaggcuaugcagcauauuauauacuaugcgcauguuaugaaaugcauaauaaaaaauuuuaaaaaaucuaaaagaucuaaaaaaaaaaaaaaaaaaaaaaaaaaaaaaaaaaaaaaaaaaaaaaaaaaaaaaaaaaaaaaaaugcaucccccccccccccccccccccccccccccccaaaggcucuuuucagagccaccagaauu

SEQ ID NO: 1159 - RNA, 2069 nt, Artificial Sequence
  mRNA product Design g-1 comprising derived and/or modified sequence from HRSV(A2)__F0_DSCav1 (opt4)
gggagacuuucccauucuguagcagaauuugguguugccuguggucuuggucccgcggagaagcuuaccauggagcugcugauccugaaggccaacgccaucaccaccauccugaccgccgugaccuucugcuucgccagcggccagaacaucaccgaggaguucuaccagagcaccugcagcgccgugagcaagggcuaccugagcgcccugagaaccggcugguacaccagcgugaucaccaucgagcugagcaacaucaaggagaacaagugcaacggcaccgacgccaaggugaagcugaucaagcaggagcuggacaaguacaagaacgccgugaccgagcugcagcugcugaugcagagcacccccgccaccaacaacagagccagaagagagcugcccagauucaugaacuacacccugaacaacgccaagaagaccaacgugacccugagcaagaagagaaagagaagauuccugggcuuccugcugggcgugggcagcgccaucgccagcggcguggccgugugcaaggugcugcaccuggagggcgaggugaacaagaucaagagcgcccugcugagcaccaacaaggccguggugagccugagcaacggcgugagcgugcugaccuucaaggugcuggaccugaagaacuacaucgacaagcagcugcugcccauccugaacaagcagagcugcagcaucagcaacaucgagaccgugaucgaguuccagcagaagaacaacagacugcuggagaucaccagagaguucagcgugaacgccggcgugaccacccccgugagcaccuacaugcugaccaacagcgagcugcugagccugaucaacgacaugcccaucaccaacgaccagaagaagcugaugagcaacaacgugcagaucgugagacagcagagcuacagcaucaugugcaucaucaaggaggaggugcuggccuacguggugcagcugccccuguacggcgugaucgacacccccugcuggaagcugcacaccagcccccugugcaccaccaacaccaaggagggcagcaacaucugccugaccagaaccgacagaggcugguacugcgacaacgccggcagcgugagcuucuucccccaggccgagaccugcaaggugcagagcaacagaguguucugcgacaccaugaacagccugacccugcccagcgaggugaaccugugcaacguggacaucuucaaccccaaguacgacugcaagaucaugaccagcaagaccgacgugagcagcagcgugaucaccagccugggcgccaucgugagcugcuacggcaagaccaagugcaccgccagcaacaagaacagaggcaucaucaagaccuucagcaacggcugcgacuacgugagcaacaagggcguggacaccgugagcgugggcaacacccuguacuacgugaacaagcaggagggcaagagccuguacgugaagggcgagcccaucaucaacuucuacgacccccugguguuccccagcgacgaguucgacgccagcaucagccaggugaacgagaagaucaaccagagccuggccuucaucagaaagagcgacgagcugcugcacaacgugaacgccggcaagagcaccaccaacaucaugaucaccaccaucaucaucgugaucaucgugauccugcugagccugaucgccgugggccugcugcuguacugcaaggccagaagcacccccgugacccugagcaaggaccagcugagcggcaucaacaacaucgccuucagcaacugaggacuaguggaagcauuuuccuggcugauuaaaagaaauuacucagcuauggucaucuguuccuguuagaaggcuaugcagcauauuauauacuaugcgcauguuaugaaaugcauaauaaaaaauuuuaaaaaaucuaaaagaucuaaaaaaaaaaaaaaaaaaaaaaaaaaaaaaaaaaaaaaaaaaaaaaaaaaaaaaaaaaaaaaaaugcaucccccccccccccccccccccccccccccccaaaggcucuuuucagagccaccagaauu

SEQ ID NO: 1160 - RNA, 2069 nt, Artificial Sequence
  mRNA product Design g-1 comprising derived and/or modified sequence from HRSV(A2)__F0_DSCav1 (opt5)
gggagacuuucccauucuguagcagaauuugguguugccuguggucuuggucccgcggagaagcuuaccauggagcugcucauccugaaggccaacgcuauuaccacaauccuuacggccgugaccuucugcuuugcgagcggccagaauauuacagaagaguucuaccaauccaccuguucugcugucagcaaaggguaucuguccgcccucagaacaggaugguacaccucuguuaucacaauugaacugagcaacaucaaggagaauaaaugcaacggcaccgacgccaaggugaaacuuaucaagcaggaacuggauaaguauaaaaaugcugugacggagcuccagcugcugaugcaguccacccccgccacaaacaaucgggcucgcagagagcucccucgguuuaugaacuacacccugaauaacgccaagaaaacaaaugucacccuuucuaagaaacgcaagagacgguuccugggguuucuccugggagugggcagcgcgauugccuccgggguugcuguguguaagguccuucaccuggaaggagaggugaacaaaaucaagagcgcccuccugucuacgaauaaagcuguugugucccugagcaacggcgucucugugcucacauucaaggugcuggaccuuaaaaauuauauugauaagcaacugcucccgauccugaacaaacaguccugcagcauuucuaacaucgaaaccgucauugaguuucagcagaagaauaaccgccuucuggagaucacaagagaauuuuccguuaaugccggcgugaccacccccgugagcacauacaugcucacgaacuccgagcugcugucucucaucaaugacaugccuauuaccaacgaucaaaagaaacugaugagcaauaacguccagaucgugcggcagcaguccuauagcauuauguguaucauuaaggaagagguucuugcguacgugguccaacugccccucuacggggugaucgacacaccuugcuggaaacugcauaccucuccccuuuguacaaccaauacgaaggaaggauccaacaucugccugacacgcaccgauagaggcugguauugugacaaugccgggagcguuucuuucuucccucaggcugagaccugcaaagugcagagcaaccgggucuuuugugauacaaugaacucccucacccugccgucugaggugaaucugugcaaugucgacauuuucaaccccaaguacgauugcaagaucaugacaagcaaaacggacguguccagcucuguuauuaccucccucggagccaucgugagcuguuauggcaagacaaaaugcaccgcuucuaacaagaaucgcgggauuaucaaaacauuuuccaacggaugugauuacgucagcaauaagggcguggacaccguuuccgugggcaacacgcuguauuacgucaauaagcaagaagggaaaucucuuuaugugaagggagagccuaucauuaacuucuacgacccccugguguucccuagcgaugaauuugacgccuccaucucucagguuaaugagaaaauuaaccagagccucgccuucaucagaaaguccgaugaacugcugcacaaugucaacgcuggcaaaagcaccacaaauauuaugaucaccacaauuaucaucgugauuaucgugauucuucucucucugaucgcggucgggcugcuccuguacugcaaggcccgguccacccccgugacgcuuagcaaggaccagcugucuggaauuaacaauaucgcuuuuuccaacugaggacuaguggaagcauuuuccuggcugauuaaaagaaauuacucagcuauggucaucuguuccuguuagaaggcuaugcagcauauuauauacuaugcgcauguuaugaaaugcauaauaaaaaauuuuaaaaaaucuaaaagaucuaaaaaaaaaaaaaaaaaaaaaaaaaaaaaaaaaaaaaaaaaaaaaaaaaaaaaaaaaaaaaaaaugcaucccccccccccccccccccccccccccccccaaaggcucuuuucagagccaccagaauu

SEQ ID NO: 1161 - RNA, 2069 nt, Artificial Sequence
  mRNA product Design g-1 comprising derived and/or modified sequence from HRSV(A2)__F0_DSCav1 (opt6)
gggagacuuucccauucuguagcagaauuugguguugccuguggucuuggucccgcggagaagcuuaccauggaauuauuaauccucaaagcgaacgcuauuacuaccauucuaacagcagucacauucugcuucgccucaggccaaaacauuacagaagaauuuuaccaaucaacaugcucugccguaucaaaaggcuaccuauccgcccuacgaacaggcugguacacaagcguaauaacaaucgaacuaucaaacauaaaagaaaacaaaugcaacgguacagacgccaaaguuaaacuaauaaaacaagaacucgauaaauacaaaaacgcaguaacagaauuacaacuacuaaugcaaucaacaccugcaacaaacaauagagccaggagagaauuaccucgauucaugaauuacacacucaauaacgcaaaaaaaaccaacguuacacuaucaaaaaaaagaaaacgacgauucuuaggauuccuacucggagucggaucagcaauagcaucuggcguugcaguaugcaaaguauuacacuuagaaggugaagucaauaaaauaaaaagcgcgcuacuaaguacaaacaaagcagucgucucccuaucaaacggagucucaguccuaacauucaaaguacucgaccuaaaaaauuacauagauaaacaacuacuuccaauauuaaacaaacaauccuguagcaucagcaauauagaaacaguaauagaauuucaacaaaaaaacaaccgauuauuagaaaucacucgagaauuuuccguaaacgccgggguaacaacuccagucucaaccuacaugcuaaccaauucagaacuauugagcuuaauaaacgacaugccaauaaccaacgaccaaaaaaaacuaaugucuaacaauguucaaaucgucagacaacaaaguuacaguauaauguguauaaucaaagaagaaguccuagcauacguaguccaacucccacuauauggaguuaucgacacaccauguuggaaauuacacaccucaccauuaugcacaaccaauacaaaagaaggaucaaacauaugccuuacacggacagaccgcggaugguauugugacaacgcuggcucagucuccuuuuucccacaagcagaaacaugcaaaguacaaucaaacagagucuuuugcgauaccaugaacucacuuacauuaccaagcgaaguaaaucuuuguaacgucgacaucuucaauccuaaauaugacugcaaaaucaugaccucaaaaacagacguuagcucuucaguaaucacuagcuuaggagcaaucguaucaugcuacggcaaaacaaaauguacagcaucaaauaaaaacagaggaaucauaaaaacauuuucaaacggaugcgauuauguaagcaacaaaggaguagauacuguaagcguaggaaacacauuguacuauguaaacaaacaagaaggaaaaucacucuauguaaaaggagaaccuauaaucaauuucuacgauccauuaguguucccaucagaugaauuugacgccucaauaucacaaguuaaugaaaaaauaaaucaaucgcuagcauucauacguaaaucagaugaauuacuacauaacguaaacgcaggcaaauccacaacaaauaucaugaucacaacaauuauaauaguaauaauaguaauacuacuaucacuaauagccguaggacuccuacuauacugcaaagcaagaucuacuccaguaacccucucaaaagaucaacuaagcggaauuaauaacaucgcauucagcaacuaaggacuaguggaagcauuuuccuggcugauuaaaagaaauuacucagcuauggucaucuguuccuguuagaaggcuaugcagcauauuauauacuaugcgcauguuaugaaaugcauaauaaaaaauuuuaaaaaaucuaaaagaucuaaaaaaaaaaaaaaaaaaaaaaaaaaaaaaaaaaaaaaaaaaaaaaaaaaaaaaaaaaaaaaaaugcaucccccccccccccccccccccccccccccccaaaggcucuuuucagagccaccagaauu

SEQ ID NO: 1162 - RNA, 2069 nt, Artificial Sequence
  mRNA product Design g-1 comprising derived and/or modified sequence from HRSV(A2)__F0_DSCav1 (opt11)
gggagacuuucccauucuguagcagaauuugguguugccuguggucuuggucccgcggagaagcuuaccauggaacuacuuauccucaaagccaacgccaucaccaccauccucacagcaguaaccuuuugcuucgccucaggccaaaauaucacagaagaauuuuaccagaguaccugcuccgccguauccaaaggauaccucagcgcgcuccgcaccggcugguacacuucaguaaucacaaucgaacuauccaacaucaaagaaaacaaaugcaacggcaccgacgcgaaagucaaacucaucaaacaagaacuagacaaauacaaaaaugccguaacagaacuacaacuguuaaugcagagcacacccgccaccaacaaccgcgcccgccgggaacucccccgauucaugaacuacacacucaacaacgccaaaaagacgaacgucacccucagcaagaaacgaaaacgcagauuccucgguuuccuacuaggcguaggcucagcaauagccuccggaguagccgucugcaaaguccugcacuuagaaggcgaagucaacaaaaucaaauccgcccuacucuccacgaacaaagccgucgucucccuguccaacggugucuccguuuuaaccuucaaaguucuggaccucaaaaacuacauagacaaacagcuucuccccauccucaacaaacaauccuguagcaucuccaacaucgaaaccgucauagaauuucaacagaaaaacaacagacugcucgaaaucacccgcgaguucuccgucaacgccggcgucacgacucccgucuccaccuauaugcucacgaacucggaacuccuuucccuaaucaacgacaugccgaucaccaacgaccaaaagaaacucaugucaaacaacguacaaauuguccgccaacaaucauacuccaucaugugcauaauuaaagaagaaguccucgcauacguaguccaacucccccucuacggcgucaucgacacccccugcuggaaacuccacaccuccccacucugcacaaccaacaccaaagaaggcucaaacauaugccuaacgcgcaccgaucgcgguugguacugcgacaacgccgguuccgucagcuucuucccccaagcagagacaugcaaaguccaaucaaaccgcgucuucugcgacaccaugaacucacuaacccuuccaagcgaagucaaccucugcaacguugacaucuucaaccccaaauacgacuguaaaaucaugaccuccaagaccgacguauccucuuccgucaucacaucccuaggcgcuaucguauccugcuaugguaaaaccaaaugcaccgccuccaacaaaaaccgcggcaucaucaagacauuuuccaacggcugcgacuacgugagcaacaaaggcgucgacaccgucuccguaggcaacacccucuacuauguaaacaaacaagagggcaaaucacucuacgucaaaggggaacccaucaucaacuucuacgacccgcucguauuccccagcgaugaguucgacgccuccaucucccaggucaacgaaaagauaaaccaaucacucgcauucauucguaaauccgacgaacuccuacacaacgugaaugcaggcaaaucgaccacuaacaucaugaucaccaccaucaucaucgucaucauagucauccuccugucccuuaucgccgucggucuuuuauuauacugcaaagcccgcagcacccccgucacccucucuaaggaccaacucagcggcaucaauaacaucgcauucucuaacuaaggacuaguggaagcauuuuccuggcugauuaaaagaaauuacucagcuauggucaucuguuccuguuagaaggcuaugcagcauauuauauacuaugcgcauguuaugaaaugcauaauaaaaaauuuuaaaaaaucuaaaagaucuaaaaaaaaaaaaaaaaaaaaaaaaaaaaaaaaaaaaaaaaaaaaaaaaaaaaaaaaaaaaaaaaugcaucccccccccccccccccccccccccccccccaaaggcucuuuucagagccaccagaauu

SEQ ID NO: 1163 - RNA, 2084 nt, Artificial Sequence
  mRNA product Design g-2 comprising derived and/or modified sequence from HRSV(A2)__F0_DSCav1 (opt1)
gggagaguccgcucagccagguugcagaagcggcuuagcguguguccuaaucuucucucugcguguagguaggccugugccgcaaacaagcuuaccauggagcugcucauccugaaggccaacgccaucaccaccauccugacggcggugaccuucugcuucgccagcggccagaacaucaccgaggaguucuaccaguccacgugcagcgccgucuccaagggguaccucagcgcccugcggaccggcugguacaccuccgugaucaccaucgagcugagcaacaucaaggagaacaagugcaacgggaccgacgccaaggugaagcucaucaagcaggagcuggacaaguacaagaacgcggucacggagcugcagcuccugaugcaguccaccccggcaaccaacaaccgcgcccggcgcgagcugccccgguucaugaacuacacccucaacaacgccaagaagacgaacgugacccugagcaagaagcgcaagcggcgcuuccugggcuuccuccugggggugggcuccgccaucgcgagcggcgucgccgugugcaaggugcugcaccucgagggggaggucaacaagaucaagagcgcccugcuguccaccaacaaggccguggugagccucuccaacggcgucagcgugcugaccuucaaggugcuggaccucaagaacuacaucgacaagcagcugcugcccauccugaacaagcagagcugcuccaucagcaacaucgagacggugaucgaguuccagcagaagaacaaccggcuccuggagaucacccgcgaguucagcgugaacgccggggucaccacccccguguccacguacaugcugaccaacagcgagcuccugucccugaucaacgacaugccgaucaccaacgaccagaagaagcucaugagcaacaacgugcagaucguccggcagcaguccuacagcaucaugugcaucaucaaggaggaggugcuggcguacgugguccagcugccccucuacggcgugaucgacacccccugcuggaagcugcacacgagcccccugugcaccaccaacaccaaggagggguccaacaucugccucacgcgcaccgaccggggcugguacugcgacaacgccggcagcgucuccuucuucccgcaggccgagaccugcaaggugcagagcaaccgcguguucugcgacaccaugaacucccugacgcugcccagcgagguaaaccucugcaacgucgacaucuucaaccccaaguacgacugcaagaucaugaccuccaagaccgacgugagcuccagcgugaucaccucccugggggccaucgucagcugcuacggcaagacgaagugcaccgccagcaacaagaaccgggggaucaucaagaccuucuccaacggcugcgacuacgugagcaacaagggcguggacaccguguccgucgggaacacccuguacuacgugaacaagcaggagggcaagagccucuacgugaagggggagcccaucaucaacuucuacgacccgcuggucuuccccuccgacgaguucgacgcgagcaucucccaggugaacgagaagaucaaccagagccuggccuucauccgcaaguccgacgagcugcuccacaacgugaacgccggcaagagcacgaccaacaucaugaucaccaccaucaucaucgucaucaucgugauccugcugucccucaucgccguggggcugcugcucuacugcaaggcccggagcacgcccgucacccuguccaaggaccagcugagcggcaucaacaacaucgcguucuccaacugaggacuaguaauaaggaaacuguaugaaugucugugggcaggaagugaagagauccuucuguaaagguuuuuggaauuaugucugcugaauaauaaacuuuuuugaaauaauaaaucugguagaaaaaugagaucuaaaaaaaaaaaaaaaaaaaaaaaaaaaaaaaaaaaaaaaaaaaaaaaaaaaaaaaaaaaaaaaaugcaucccccccccccccccccccccccccccccccaaaggcucuuuucagagccaccagaauu

SEQ ID NO: 1164 - RNA, 2084 nt, Artificial Sequence
  mRNA product Design g-2 comprising derived and/or modified sequence from HRSV(A2)__F0_DSCav1 (opt1)
gggagaguccgcucagccagguugcagaagcggcuuagcguguguccuaaucuucucucugcguguagguaggccugugccgcaaacaagcuuaccauggagcugcucauccugaaggccaacgccaucaccaccauccugacggcggugaccuucugcuucgccagcggccagaacaucaccgaggaguucuaccaguccacgugcagcgccgucuccaagggguaccucagcgcccugcgcaccggcugguacaccuccgugaucaccaucgagcugagcaacaucaaggagaacaagugcaacgggaccgacgccaaggugaagcucaucaagcaggagcuggacaaguacaagaacgcggucacggagcugcagcuccugaugcaguccacccccgccaccaacaaccgggcccgccgggagcugccgcgcuucaugaacuacacccucaacaacgccaagaagacgaacgugacccugagcaagaagcggaagcgccgguuccugggcuuccuccugggggugggcuccgcgaucgccagcggcgucgccgugugcaaggugcugcaccucgagggggaggucaacaagaucaaguccgcccugcugagcaccaacaaggccguggugucccucagcaacggcgucuccgugcugaccuucaaggugcuggaccucaagaacuacaucgacaagcagcugcugcccauccucaacaagcagagcugcuccaucagcaacaucgagacggucaucgaguuccagcagaagaacaaccgccugcuggagaucacccgggaguucuccgugaacgcgggggugaccacccccgucagcacguacaugcucaccaacagcgagcugcugucccucaucaacgacaugcccaucaccaacgaccagaagaagcugaugagcaacaacgugcagaucgugcgccagcaguccuacagcaucaugugcaucaucaaggaggagguccuggccuacguggugcagcucccgcuguacggcgucaucgacacccccugcuggaagcugcacacgagcccccucugcaccaccaacaccaaggaggggagcaacaucugccugacgcggaccgaccgcggcugguacugcgacaacgccggcuccgugagcuucuucccccaggccgagaccugcaagguccaguccaaccggguguucugcgacaccaugaacagccugacgcucccguccgaggugaaccugugcaacgucgacaucuucaaccccaaguacgacugcaagaucaugaccagcaagaccgacguguccagcuccgugaucaccagccugggggccaucgucuccugcuacggcaagacgaagugcaccgcgagcaacaagaaccgcgggaucaucaagaccuucuccaacggcugcgacuacgugagcaacaagggcguggacaccgucagcguggggaacacccucuacuacgugaacaagcaggagggcaagucccuguacgucaagggggagcccaucaucaacuucuacgacccccugguguucccgagcgacgaguucgacgccuccaucagccaggugaacgagaagaucaaccagucccucgccuucauccggaaguccgacgagcugcugcacaacgucaacgccggcaaguccacgaccaacaucaugaucaccaccaucaucaucgugaucaucgugauccugcucagccugaucgccgucgggcugcuccuguacugcaaggcgcgcuccacgcccgugacccugagcaaggaccagcucuccggcaucaacaacaucgccuucagcaacugaggacuaguaauaaggaaacuguaugaaugucugugggcaggaagugaagagauccuucuguaaagguuuuuggaauuaugucugcugaauaauaaacuuuuuugaaauaauaaaucugguagaaaaaugagaucuaaaaaaaaaaaaaaaaaaaaaaaaaaaaaaaaaaaaaaaaaaaaaaaaaaaaaaaaaaaaaaaaugcaucccccccccccccccccccccccccccccccaaaggcucuuuucagagccaccagaauu

SEQ ID NO: 1165 - RNA, 2084 nt, Artificial Sequence
  mRNA product Design g-2 comprising derived and/or modified sequence from HRSV(A2)__F0_DSCav1 (opt2)
gggagaguccgcucagccagguugcagaagcggcuuagcguguguccuaaucuucucucugcguguagguaggccugugccgcaaacaagcuuaccauggagcuccucauccucaaggccaacgccaucaccaccauccucaccgccgucaccuucugcuucgccuccggccagaacaucaccgaggaguucuaccaguccaccugcuccgccgucuccaagggcuaccucuccgcccuccgcaccggcugguacaccuccgucaucaccaucgagcucuccaacaucaaggagaacaagugcaacggcaccgacgccaaggucaagcucaucaagcaggagcucgacaaguacaagaacgccgucaccgagcuccagcuccucaugcaguccacccccgccaccaacaaccgcgcccgccgcgagcucccccgcuucaugaacuacacccucaacaacgccaagaagaccaacgucacccucuccaagaagcgcaagcgccgcuuccucggcuuccuccucggcgucggcuccgccaucgccuccggcgucgccgucugcaagguccuccaccucgagggcgaggucaacaagaucaaguccgcccuccucuccaccaacaaggccgucgucucccucuccaacggcgucuccguccucaccuucaagguccucgaccucaagaacuacaucgacaagcagcuccuccccauccucaacaagcaguccugcuccaucuccaacaucgagaccgucaucgaguuccagcagaagaacaaccgccuccucgagaucacccgcgaguucuccgucaacgccggcgucaccacccccgucuccaccuacaugcucaccaacuccgagcuccucucccucaucaacgacaugcccaucaccaacgaccagaagaagcucauguccaacaacguccagaucguccgccagcaguccuacuccaucaugugcaucaucaaggaggagguccucgccuacgucguccagcucccccucuacggcgucaucgacacccccugcuggaagcuccacaccuccccccucugcaccaccaacaccaaggagggcuccaacaucugccucacccgcaccgaccgcggcugguacugcgacaacgccggcuccgucuccuucuucccccaggccgagaccugcaagguccaguccaaccgcgucuucugcgacaccaugaacucccucacccuccccuccgaggucaaccucugcaacgucgacaucuucaaccccaaguacgacugcaagaucaugaccuccaagaccgacgucuccuccuccgucaucaccucccucggcgccaucgucuccugcuacggcaagaccaagugcaccgccuccaacaagaaccgcggcaucaucaagaccuucuccaacggcugcgacuacgucuccaacaagggcgucgacaccgucuccgucggcaacacccucuacuacgucaacaagcaggagggcaagucccucuacgucaagggcgagcccaucaucaacuucuacgacccccucgucuuccccuccgacgaguucgacgccuccaucucccaggucaacgagaagaucaaccagucccucgccuucauccgcaaguccgacgagcuccuccacaacgucaacgccggcaaguccaccaccaacaucaugaucaccaccaucaucaucgucaucaucgucauccuccucucccucaucgccgucggccuccuccucuacugcaaggcccgcuccacccccgucacccucuccaaggaccagcucuccggcaucaacaacaucgccuucuccaacugaggacuaguaauaaggaaacuguaugaaugucugugggcaggaagugaagagauccuucuguaaagguuuuuggaauuaugucugcugaauaauaaacuuuuuugaaauaauaaaucugguagaaaaaugagaucuaaaaaaaaaaaaaaaaaaaaaaaaaaaaaaaaaaaaaaaaaaaaaaaaaaaaaaaaaaaaaaaaugcaucccccccccccccccccccccccccccccccaaaggcucuuuucagagccaccagaauu

SEQ ID NO: 1166 - RNA, 2084 nt, Artificial Sequence
  mRNA product Design g-2 comprising derived and/or modified sequence from HRSV(A2)__F0_DSCav1 (opt3)
gggagaguccgcucagccagguugcagaagcggcuuagcguguguccuaaucuucucucugcguguagguaggccugugccgcaaacaagcuuaccauggagcugcucauccuuaaggccaacgcuauuaccacaauacugacugcagugacguucugcuuugccagcggccagaauaucaccgaagaguucuaccaauccacauguucugcggucucaaaaggguauuugagugcuuuaagaacuggaugguacaccagcguuauuacaaucgaacuguccaacauuaaggagaauaaaugcaacgguaccgacgccaaggugaaacuaaucaagcaggaacucgauaaguauaaaaaugcaguaacugagcugcagcuucugaugcagucuacacccgccaccaacaauagggcucggcgcgaguugccucgauuuaugaacuacacgcucaauaacgcaaagaaaacuaaugugacccugucgaagaaacguaagagaagguuccugggcuuucucuuaggggucggaucagccauagcuagcggcguggccguuuguaaggugcugcaccuugaaggugaggucaacaaaaucaagagugcguugcuguccacaaauaaagcagugguaucucuaagcaacgggguuuccgugcucacuuucaagguccuggaccuuaaaaauuauauugauaagcaacuguugccaauccucaacaaacagucaugcaguauuagcaacaucgaaaccgugauagaguuucagcagaagaauaaccggcuguuagagauuacacgcgaguucucugugaaugccggagucaccacgccgguuuccacuuacaugcugacaaacucagaacuccuuagccugaucaaugacaugcccauuaccaacgaucaaaagaaauugaugaguaauaacgugcagaucguaagacagcagucuuauuccaucauguguauuauaaaggaagaggugcuagcuuacgucgugcaacugccucucuacggcguuaucgacacuccaugcuggaaacugcauacaagcccccuuuguaccacgaauaccaaggaaggcucgaacauuugccugacaaggacugaucgggggugguauugugacaaugccggaucuguguccuuuuucccucaggcagagaccugcaaaguccagucaaaccgcguguuuugugauacaaugaauaguuugacucucccaagcgagguaaaccugugcaauguugacaucuucaaccccaaguacgauugcaagauaaugaccuccaaaacagacgugucuagcucagucauuaccaguuuaggugcuaucguguccuguuauggcaagacuaaaugcacggccagcaacaagaaucgagggaucauuaaaacauuuucuaacggaugugauuacgucucaaauaagggcguggacaccguuaguguggguaacacucuguauuacguaaauaagcaagaagggaaaagccuauaugucaagggagagccuaucauuaacuucuacgacccacucguguucccguccgaugaauuugacgcgucuauaucgcagguuaaugagaaaaucaaccagagccuggccuucauuagaaaguccgaugaacuuuugcacaaugugaacgcaggcaaaucaaccacaaauaucaugaucaccacuauuauaaucgucauuaucgugauucugcucagucugaucgcuguaggccuucuguuguacugcaaggccaggucuacacccgugacgcucagcaaggaccagcuguccgggauaaacaauaucgcuuuuucaaacugaggacuaguaauaaggaaacuguaugaaugucugugggcaggaagugaagagauccuucuguaaagguuuuuggaauuaugucugcugaauaauaaacuuuuuugaaauaauaaaucugguagaaaaaugagaucuaaaaaaaaaaaaaaaaaaaaaaaaaaaaaaaaaaaaaaaaaaaaaaaaaaaaaaaaaaaaaaaaugcaucccccccccccccccccccccccccccccccaaaggcucuuuucagagccaccagaauu

SEQ ID NO: 1167 - RNA, 2084 nt, Artificial Sequence
  mRNA product Design g-2 comprising derived and/or modified sequence from HRSV(A2)__F0_DSCav1 (opt4)
gggagaguccgcucagccagguugcagaagcggcuuagcguguguccuaaucuucucucugcguguagguaggccugugccgcaaacaagcuuaccauggagcugcugauccugaaggccaacgccaucaccaccauccugaccgccgugaccuucugcuucgccagcggccagaacaucaccgaggaguucuaccagagcaccugcagcgccgugagcaagggcuaccugagcgcccugagaaccggcugguacaccagcgugaucaccaucgagcugagcaacaucaaggagaacaagugcaacggcaccgacgccaaggugaagcugaucaagcaggagcuggacaaguacaagaacgccgugaccgagcugcagcugcugaugcagagcacccccgccaccaacaacagagccagaagagagcugcccagauucaugaacuacacccugaacaacgccaagaagaccaacgugacccugagcaagaagagaaagagaagauuccugggcuuccugcugggcgugggcagcgccaucgccagcggcguggccgugugcaaggugcugcaccuggagggcgaggugaacaagaucaagagcgcccugcugagcaccaacaaggccguggugagccugagcaacggcgugagcgugcugaccuucaaggugcuggaccugaagaacuacaucgacaagcagcugcugcccauccugaacaagcagagcugcagcaucagcaacaucgagaccgugaucgaguuccagcagaagaacaacagacugcuggagaucaccagagaguucagcgugaacgccggcgugaccacccccgugagcaccuacaugcugaccaacagcgagcugcugagccugaucaacgacaugcccaucaccaacgaccagaagaagcugaugagcaacaacgugcagaucgugagacagcagagcuacagcaucaugugcaucaucaaggaggaggugcuggccuacguggugcagcugccccuguacggcgugaucgacacccccugcuggaagcugcacaccagcccccugugcaccaccaacaccaaggagggcagcaacaucugccugaccagaaccgacagaggcugguacugcgacaacgccggcagcgugagcuucuucccccaggccgagaccugcaaggugcagagcaacagaguguucugcgacaccaugaacagccugacccugcccagcgaggugaaccugugcaacguggacaucuucaaccccaaguacgacugcaagaucaugaccagcaagaccgacgugagcagcagcgugaucaccagccugggcgccaucgugagcugcuacggcaagaccaagugcaccgccagcaacaagaacagaggcaucaucaagaccuucagcaacggcugcgacuacgugagcaacaagggcguggacaccgugagcgugggcaacacccuguacuacgugaacaagcaggagggcaagagccuguacgugaagggcgagcccaucaucaacuucuacgacccccugguguuccccagcgacgaguucgacgccagcaucagccaggugaacgagaagaucaaccagagccuggccuucaucagaaagagcgacgagcugcugcacaacgugaacgccggcaagagcaccaccaacaucaugaucaccaccaucaucaucgugaucaucgugauccugcugagccugaucgccgugggccugcugcuguacugcaaggccagaagcacccccgugacccugagcaaggaccagcugagcggcaucaacaacaucgccuucagcaacugaggacuaguaauaaggaaacuguaugaaugucugugggcaggaagugaagagauccuucuguaaagguuuuuggaauuaugucugcugaauaauaaacuuuuuugaaauaauaaaucugguagaaaaaugagaucuaaaaaaaaaaaaaaaaaaaaaaaaaaaaaaaaaaaaaaaaaaaaaaaaaaaaaaaaaaaaaaaaugcaucccccccccccccccccccccccccccccccaaaggcucuuuucagagccaccagaauu

SEQ ID NO: 1168 - RNA, 2084 nt, Artificial Sequence
  mRNA product Design g-2 comprising derived and/or modified sequence from HRSV(A2)__F0_DSCav1 (opt5)
gggagaguccgcucagccagguugcagaagcggcuuagcguguguccuaaucuucucucugcguguagguaggccugugccgcaaacaagcuuaccauggagcugcucauccugaaggccaacgcuauuaccacaauccuuacggccgugaccuucugcuuugcgagcggccagaauauuacagaagaguucuaccaauccaccuguucugcugucagcaaaggguaucuguccgcccucagaacaggaugguacaccucuguuaucacaauugaacugagcaacaucaaggagaauaaaugcaacggcaccgacgccaaggugaaacuuaucaagcaggaacuggauaaguauaaaaaugcugugacggagcuccagcugcugaugcaguccacccccgccacaaacaaucgggcucgcagagagcucccucgguuuaugaacuacacccugaauaacgccaagaaaacaaaugucacccuuucuaagaaacgcaagagacgguuccugggguuucuccugggagugggcagcgcgauugccuccgggguugcuguguguaagguccuucaccuggaaggagaggugaacaaaaucaagagcgcccuccugucuacgaauaaagcuguugugucccugagcaacggcgucucugugcucacauucaaggugcuggaccuuaaaaauuauauugauaagcaacugcucccgauccugaacaaacaguccugcagcauuucuaacaucgaaaccgucauugaguuucagcagaagaauaaccgccuucuggagaucacaagagaauuuuccguuaaugccggcgugaccacccccgugagcacauacaugcucacgaacuccgagcugcugucucucaucaaugacaugccuauuaccaacgaucaaaagaaacugaugagcaauaacguccagaucgugcggcagcaguccuauagcauuauguguaucauuaaggaagagguucuugcguacgugguccaacugccccucuacggggugaucgacacaccuugcuggaaacugcauaccucuccccuuuguacaaccaauacgaaggaaggauccaacaucugccugacacgcaccgauagaggcugguauugugacaaugccgggagcguuucuuucuucccucaggcugagaccugcaaagugcagagcaaccgggucuuuugugauacaaugaacucccucacccugccgucugaggugaaucugugcaaugucgacauuuucaaccccaaguacgauugcaagaucaugacaagcaaaacggacguguccagcucuguuauuaccucccucggagccaucgugagcuguuauggcaagacaaaaugcaccgcuucuaacaagaaucgcgggauuaucaaaacauuuuccaacggaugugauuacgucagcaauaagggcguggacaccguuuccgugggcaacacgcuguauuacgucaauaagcaagaagggaaaucucuuuaugugaagggagagccuaucauuaacuucuacgacccccugguguucccuagcgaugaauuugacgccuccaucucucagguuaaugagaaaauuaaccagagccucgccuucaucagaaaguccgaugaacugcugcacaaugucaacgcuggcaaaagcaccacaaauauuaugaucaccacaauuaucaucgugauuaucgugauucuucucucucugaucgcggucgggcugcuccuguacugcaaggcccgguccacccccgugacgcuuagcaaggaccagcugucuggaauuaacaauaucgcuuuuuccaacugaggacuaguaauaaggaaacuguaugaaugucugugggcaggaagugaagagauccuucuguaaagguuuuuggaauuaugucugcugaauaauaaacuuuuuugaaauaauaaaucugguagaaaaaugagaucuaaaaaaaaaaaaaaaaaaaaaaaaaaaaaaaaaaaaaaaaaaaaaaaaaaaaaaaaaaaaaaaaugcaucccccccccccccccccccccccccccccccaaaggcucuuuucagagccaccagaauu

SEQ ID NO: 1169 - RNA, 2084 nt, Artificial Sequence
  mRNA product Design g-2 comprising derived and/or modified sequence from HRSV(A2)__F0_DSCav1 (opt6)
gggagaguccgcucagccagguugcagaagcggcuuagcguguguccuaaucuucucucugcguguagguaggccugugccgcaaacaagcuuaccauggaauuauuaauccucaaagcgaacgcuauuacuaccauucuaacagcagucacauucugcuucgccucaggccaaaacauuacagaagaauuuuaccaaucaacaugcucugccguaucaaaaggcuaccuauccgcccuacgaacaggcugguacacaagcguaauaacaaucgaacuaucaaacauaaaagaaaacaaaugcaacgguacagacgccaaaguuaaacuaauaaaacaagaacucgauaaauacaaaaacgcaguaacagaauuacaacuacuaaugcaaucaacaccugcaacaaacaauagagccaggagagaauuaccucgauucaugaauuacacacucaauaacgcaaaaaaaaccaacguuacacuaucaaaaaaaagaaaacgacgauucuuaggauuccuacucggagucggaucagcaauagcaucuggcguugcaguaugcaaaguauuacacuuagaaggugaagucaauaaaauaaaaagcgcgcuacuaaguacaaacaaagcagucgucucccuaucaaacggagucucaguccuaacauucaaaguacucgaccuaaaaaauuacauagauaaacaacuacuuccaauauuaaacaaacaauccuguagcaucagcaauauagaaacaguaauagaauuucaacaaaaaaacaaccgauuauuagaaaucacucgagaauuuuccguaaacgccgggguaacaacuccagucucaaccuacaugcuaaccaauucagaacuauugagcuuaauaaacgacaugccaauaaccaacgaccaaaaaaaacuaaugucuaacaauguucaaaucgucagacaacaaaguuacaguauaauguguauaaucaaagaagaaguccuagcauacguaguccaacucccacuauauggaguuaucgacacaccauguuggaaauuacacaccucaccauuaugcacaaccaauacaaaagaaggaucaaacauaugccuuacacggacagaccgcggaugguauugugacaacgcuggcucagucuccuuuuucccacaagcagaaacaugcaaaguacaaucaaacagagucuuuugcgauaccaugaacucacuuacauuaccaagcgaaguaaaucuuuguaacgucgacaucuucaauccuaaauaugacugcaaaaucaugaccucaaaaacagacguuagcucuucaguaaucacuagcuuaggagcaaucguaucaugcuacggcaaaacaaaauguacagcaucaaauaaaaacagaggaaucauaaaaacauuuucaaacggaugcgauuauguaagcaacaaaggaguagauacuguaagcguaggaaacacauuguacuauguaaacaaacaagaaggaaaaucacucuauguaaaaggagaaccuauaaucaauuucuacgauccauuaguguucccaucagaugaauuugacgccucaauaucacaaguuaaugaaaaaauaaaucaaucgcuagcauucauacguaaaucagaugaauuacuacauaacguaaacgcaggcaaauccacaacaaauaucaugaucacaacaauuauaauaguaauaauaguaauacuacuaucacuaauagccguaggacuccuacuauacugcaaagcaagaucuacuccaguaacccucucaaaagaucaacuaagcggaauuaauaacaucgcauucagcaacuaaggacuaguaauaaggaaacuguaugaaugucugugggcaggaagugaagagauccuucuguaaagguuuuuggaauuaugucugcugaauaauaaacuuuuuugaaauaauaaaucugguagaaaaaugagaucuaaaaaaaaaaaaaaaaaaaaaaaaaaaaaaaaaaaaaaaaaaaaaaaaaaaaaaaaaaaaaaaaugcaucccccccccccccccccccccccccccccccaaaggcucuuuucagagccaccagaauu

SEQ ID NO: 1170 - RNA, 2084 nt, Artificial Sequence
  mRNA product Design g-2 comprising derived and/or modified sequence from HRSV(A2)__F0_DSCav1 (opt11)
gggagaguccgcucagccagguugcagaagcggcuuagcguguguccuaaucuucucucugcguguagguaggccugugccgcaaacaagcuuaccauggaacuacuuauccucaaagccaacgccaucaccaccauccucacagcaguaaccuuuugcuucgccucaggccaaaauaucacagaagaauuuuaccagaguaccugcuccgccguauccaaaggauaccucagcgcgcuccgcaccggcugguacacuucaguaaucacaaucgaacuauccaacaucaaagaaaacaaaugcaacggcaccgacgcgaaagucaaacucaucaaacaagaacuagacaaauacaaaaaugccguaacagaacuacaacuguuaaugcagagcacacccgccaccaacaaccgcgcccgccgggaacucccccgauucaugaacuacacacucaacaacgccaaaaagacgaacgucacccucagcaagaaacgaaaacgcagauuccucgguuuccuacuaggcguaggcucagcaauagccuccggaguagccgucugcaaaguccugcacuuagaaggcgaagucaacaaaaucaaauccgcccuacucuccacgaacaaagccgucgucucccuguccaacggugucuccguuuuaaccuucaaaguucuggaccucaaaaacuacauagacaaacagcuucuccccauccucaacaaacaauccuguagcaucuccaacaucgaaaccgucauagaauuucaacagaaaaacaacagacugcucgaaaucacccgcgaguucuccgucaacgccggcgucacgacucccgucuccaccuauaugcucacgaacucggaacuccuuucccuaaucaacgacaugccgaucaccaacgaccaaaagaaacucaugucaaacaacguacaaauuguccgccaacaaucauacuccaucaugugcauaauuaaagaagaaguccucgcauacguaguccaacucccccucuacggcgucaucgacacccccugcuggaaacuccacaccuccccacucugcacaaccaacaccaaagaaggcucaaacauaugccuaacgcgcaccgaucgcgguugguacugcgacaacgccgguuccgucagcuucuucccccaagcagagacaugcaaaguccaaucaaaccgcgucuucugcgacaccaugaacucacuaacccuuccaagcgaagucaaccucugcaacguugacaucuucaaccccaaauacgacuguaaaaucaugaccuccaagaccgacguauccucuuccgucaucacaucccuaggcgcuaucguauccugcuaugguaaaaccaaaugcaccgccuccaacaaaaaccgcggcaucaucaagacauuuuccaacggcugcgacuacgugagcaacaaaggcgucgacaccgucuccguaggcaacacccucuacuauguaaacaaacaagagggcaaaucacucuacgucaaaggggaacccaucaucaacuucuacgacccgcucguauuccccagcgaugaguucgacgccuccaucucccaggucaacgaaaagauaaaccaaucacucgcauucauucguaaauccgacgaacuccuacacaacgugaaugcaggcaaaucgaccacuaacaucaugaucaccaccaucaucaucgucaucauagucauccuccugucccuuaucgccgucggucuuuuauuauacugcaaagcccgcagcacccccgucacccucucuaaggaccaacucagcggcaucaauaacaucgcauucucuaacuaaggacuaguaauaaggaaacuguaugaaugucugugggcaggaagugaagagauccuucuguaaagguuuuuggaauuaugucugcugaauaauaaacuuuuuugaaauaauaaaucugguagaaaaaugagaucuaaaaaaaaaaaaaaaaaaaaaaaaaaaaaaaaaaaaaaaaaaaaaaaaaaaaaaaaaaaaaaaaugcaucccccccccccccccccccccccccccccccaaaggcucuuuucagagccaccagaauu

SEQ ID NO: 1171 - RNA, 2316 nt, Artificial Sequence
  mRNA product Design g-3 comprising derived and/or modified sequence from HRSV(A2)__F0_DSCav1 (opt1)
gggagaguccgcucagccagguugcagaagcggcuuagcguguguccuaaucuucucucugcguguagguaggccugugccgcaaacaagcuuaccauggagcugcucauccugaaggccaacgccaucaccaccauccugacggcggugaccuucugcuucgccagcggccagaacaucaccgaggaguucuaccaguccacgugcagcgccgucuccaagggguaccucagcgcccugcggaccggcugguacaccuccgugaucaccaucgagcugagcaacaucaaggagaacaagugcaacgggaccgacgccaaggugaagcucaucaagcaggagcuggacaaguacaagaacgcggucacggagcugcagcuccugaugcaguccaccccggcaaccaacaaccgcgcccggcgcgagcugccccgguucaugaacuacacccucaacaacgccaagaagacgaacgugacccugagcaagaagcgcaagcggcgcuuccugggcuuccuccugggggugggcuccgccaucgcgagcggcgucgccgugugcaaggugcugcaccucgagggggaggucaacaagaucaagagcgcccugcuguccaccaacaaggccguggugagccucuccaacggcgucagcgugcugaccuucaaggugcuggaccucaagaacuacaucgacaagcagcugcugcccauccugaacaagcagagcugcuccaucagcaacaucgagacggugaucgaguuccagcagaagaacaaccggcuccuggagaucacccgcgaguucagcgugaacgccggggucaccacccccguguccacguacaugcugaccaacagcgagcuccugucccugaucaacgacaugccgaucaccaacgaccagaagaagcucaugagcaacaacgugcagaucguccggcagcaguccuacagcaucaugugcaucaucaaggaggaggugcuggcguacgugguccagcugccccucuacggcgugaucgacacccccugcuggaagcugcacacgagcccccugugcaccaccaacaccaaggagggguccaacaucugccucacgcgcaccgaccggggcugguacugcgacaacgccggcagcgucuccuucuucccgcaggccgagaccugcaaggugcagagcaaccgcguguucugcgacaccaugaacucccugacgcugcccagcgagguaaaccucugcaacgucgacaucuucaaccccaaguacgacugcaagaucaugaccuccaagaccgacgugagcuccagcgugaucaccucccugggggccaucgucagcugcuacggcaagacgaagugcaccgccagcaacaagaaccgggggaucaucaagaccuucuccaacggcugcgacuacgugagcaacaagggcguggacaccguguccgucgggaacacccuguacuacgugaacaagcaggagggcaagagccucuacgugaagggggagcccaucaucaacuucuacgacccgcuggucuuccccuccgacgaguucgacgcgagcaucucccaggugaacgagaagaucaaccagagccuggccuucauccgcaaguccgacgagcugcuccacaacgugaacgccggcaagagcacgaccaacaucaugaucaccaccaucaucaucgucaucaucgugauccugcugucccucaucgccguggggcugcugcucuacugcaaggcccggagcacgcccgucacccuguccaaggaccagcugagcggcaucaacaacaucgcguucuccaacugaggacuagugaagggaacacccaaauuuaauucagccuuaagcacaauuaauuaagagugaaacguaauuguacaagcaguuggucacccaccauagggcaugaucaacaccgcaaccuuuccuuuuucccccagugauucugaaaaaccccucuucccuucagcuugcuuagauguuccaaauuuaguaagcuuaaggcggccuacagaagaaaaagaaaaaaaaggccacaaaaguucccucucacuuucaguaaauaaaauaaaagcagcaacagaaauaaagaaauaaaugaaauucaaaaugaaauaaauauuguguugugcagcauuaaaaaaucaauaaaaauuaaaaaugagcaagaucuaaaaaaaaaaaaaaaaaaaaaaaaaaaaaaaaaaaaaaaaaaaaaaaaaaaaaaaaaaaaaaaaugcaucccccccccccccccccccccccccccccccaaaggcucuuuucagagccaccagaauu

SEQ ID NO: 1172 - RNA, 2316 nt, Artificial Sequence
  mRNA product Design g-3 comprising derived and/or modified sequence from HRSV(A2)__F0_DSCav1 (opt1)
gggagaguccgcucagccagguugcagaagcggcuuagcguguguccuaaucuucucucugcguguagguaggccugugccgcaaacaagcuuaccauggagcugcucauccugaaggccaacgccaucaccaccauccugacggcggugaccuucugcuucgccagcggccagaacaucaccgaggaguucuaccaguccacgugcagcgccgucuccaagggguaccucagcgcccugcgcaccggcugguacaccuccgugaucaccaucgagcugagcaacaucaaggagaacaagugcaacgggaccgacgccaaggugaagcucaucaagcaggagcuggacaaguacaagaacgcggucacggagcugcagcuccugaugcaguccacccccgccaccaacaaccgggcccgccgggagcugccgcgcuucaugaacuacacccucaacaacgccaagaagacgaacgugacccugagcaagaagcggaagcgccgguuccugggcuuccuccugggggugggcuccgcgaucgccagcggcgucgccgugugcaaggugcugcaccucgagggggaggucaacaagaucaaguccgcccugcugagcaccaacaaggccguggugucccucagcaacggcgucuccgugcugaccuucaaggugcuggaccucaagaacuacaucgacaagcagcugcugcccauccucaacaagcagagcugcuccaucagcaacaucgagacggucaucgaguuccagcagaagaacaaccgccugcuggagaucacccgggaguucuccgugaacgcgggggugaccacccccgucagcacguacaugcucaccaacagcgagcugcugucccucaucaacgacaugcccaucaccaacgaccagaagaagcugaugagcaacaacgugcagaucgugcgccagcaguccuacagcaucaugugcaucaucaaggaggagguccuggccuacguggugcagcucccgcuguacggcgucaucgacacccccugcuggaagcugcacacgagcccccucugcaccaccaacaccaaggaggggagcaacaucugccugacgcggaccgaccgcggcugguacugcgacaacgccggcuccgugagcuucuucccccaggccgagaccugcaagguccaguccaaccggguguucugcgacaccaugaacagccugacgcucccguccgaggugaaccugugcaacgucgacaucuucaaccccaaguacgacugcaagaucaugaccagcaagaccgacguguccagcuccgugaucaccagccugggggccaucgucuccugcuacggcaagacgaagugcaccgcgagcaacaagaaccgcgggaucaucaagaccuucuccaacggcugcgacuacgugagcaacaagggcguggacaccgucagcguggggaacacccucuacuacgugaacaagcaggagggcaagucccuguacgucaagggggagcccaucaucaacuucuacgacccccugguguucccgagcgacgaguucgacgccuccaucagccaggugaacgagaagaucaaccagucccucgccuucauccggaaguccgacgagcugcugcacaacgucaacgccggcaaguccacgaccaacaucaugaucaccaccaucaucaucgugaucaucgugauccugcucagccugaucgccgucgggcugcuccuguacugcaaggcgcgcuccacgcccgugacccugagcaaggaccagcucuccggcaucaacaacaucgccuucagcaacugaggacuagugaagggaacacccaaauuuaauucagccuuaagcacaauuaauuaagagugaaacguaauuguacaagcaguuggucacccaccauagggcaugaucaacaccgcaaccuuuccuuuuucccccagugauucugaaaaaccccucuucccuucagcuugcuuagauguuccaaauuuaguaagcuuaaggcggccuacagaagaaaaagaaaaaaaaggccacaaaaguucccucucacuuucaguaaauaaaauaaaagcagcaacagaaauaaagaaauaaaugaaauucaaaaugaaauaaauauuguguugugcagcauuaaaaaaucaauaaaaauuaaaaaugagcaagaucuaaaaaaaaaaaaaaaaaaaaaaaaaaaaaaaaaaaaaaaaaaaaaaaaaaaaaaaaaaaaaaaaugcaucccccccccccccccccccccccccccccccaaaggcucuuuucagagccaccagaauu

SEQ ID NO: 1173 - RNA, 2316 nt, Artificial Sequence
  mRNA product Design g-3 comprising derived and/or modified sequence from HRSV(A2)__F0_DSCav1 (opt2)
gggagaguccgcucagccagguugcagaagcggcuuagcguguguccuaaucuucucucugcguguagguaggccugugccgcaaacaagcuuaccauggagcuccucauccucaaggccaacgccaucaccaccauccucaccgccgucaccuucugcuucgccuccggccagaacaucaccgaggaguucuaccaguccaccugcuccgccgucuccaagggcuaccucuccgcccuccgcaccggcugguacaccuccgucaucaccaucgagcucuccaacaucaaggagaacaagugcaacggcaccgacgccaaggucaagcucaucaagcaggagcucgacaaguacaagaacgccgucaccgagcuccagcuccucaugcaguccacccccgccaccaacaaccgcgcccgccgcgagcucccccgcuucaugaacuacacccucaacaacgccaagaagaccaacgucacccucuccaagaagcgcaagcgccgcuuccucggcuuccuccucggcgucggcuccgccaucgccuccggcgucgccgucugcaagguccuccaccucgagggcgaggucaacaagaucaaguccgcccuccucuccaccaacaaggccgucgucucccucuccaacggcgucuccguccucaccuucaagguccucgaccucaagaacuacaucgacaagcagcuccuccccauccucaacaagcaguccugcuccaucuccaacaucgagaccgucaucgaguuccagcagaagaacaaccgccuccucgagaucacccgcgaguucuccgucaacgccggcgucaccacccccgucuccaccuacaugcucaccaacuccgagcuccucucccucaucaacgacaugcccaucaccaacgaccagaagaagcucauguccaacaacguccagaucguccgccagcaguccuacuccaucaugugcaucaucaaggaggagguccucgccuacgucguccagcucccccucuacggcgucaucgacacccccugcuggaagcuccacaccuccccccucugcaccaccaacaccaaggagggcuccaacaucugccucacccgcaccgaccgcggcugguacugcgacaacgccggcuccgucuccuucuucccccaggccgagaccugcaagguccaguccaaccgcgucuucugcgacaccaugaacucccucacccuccccuccgaggucaaccucugcaacgucgacaucuucaaccccaaguacgacugcaagaucaugaccuccaagaccgacgucuccuccuccgucaucaccucccucggcgccaucgucuccugcuacggcaagaccaagugcaccgccuccaacaagaaccgcggcaucaucaagaccuucuccaacggcugcgacuacgucuccaacaagggcgucgacaccgucuccgucggcaacacccucuacuacgucaacaagcaggagggcaagucccucuacgucaagggcgagcccaucaucaacuucuacgacccccucgucuuccccuccgacgaguucgacgccuccaucucccaggucaacgagaagaucaaccagucccucgccuucauccgcaaguccgacgagcuccuccacaacgucaacgccggcaaguccaccaccaacaucaugaucaccaccaucaucaucgucaucaucgucauccuccucucccucaucgccgucggccuccuccucuacugcaaggcccgcuccacccccgucacccucuccaaggaccagcucuccggcaucaacaacaucgccuucuccaacugaggacuagugaagggaacacccaaauuuaauucagccuuaagcacaauuaauuaagagugaaacguaauuguacaagcaguuggucacccaccauagggcaugaucaacaccgcaaccuuuccuuuuucccccagugauucugaaaaaccccucuucccuucagcuugcuuagauguuccaaauuuaguaagcuuaaggcggccuacagaagaaaaagaaaaaaaaggccacaaaaguucccucucacuuucaguaaauaaaauaaaagcagcaacagaaauaaagaaauaaaugaaauucaaaaugaaauaaauauuguguugugcagcauuaaaaaaucaauaaaaauuaaaaaugagcaagaucuaaaaaaaaaaaaaaaaaaaaaaaaaaaaaaaaaaaaaaaaaaaaaaaaaaaaaaaaaaaaaaaaugcaucccccccccccccccccccccccccccccccaaaggcucuuuucagagccaccagaauu

SEQ ID NO: 1174 - RNA, 2316 nt, Artificial Sequence
  mRNA product Design g-3 comprising derived and/or modified sequence from HRSV(A2)__F0_DSCav1 (opt3)
gggagaguccgcucagccagguugcagaagcggcuuagcguguguccuaaucuucucucugcguguagguaggccugugccgcaaacaagcuuaccauggagcugcucauccuuaaggccaacgcuauuaccacaauacugacugcagugacguucugcuuugccagcggccagaauaucaccgaagaguucuaccaauccacauguucugcggucucaaaaggguauuugagugcuuuaagaacuggaugguacaccagcguuauuacaaucgaacuguccaacauuaaggagaauaaaugcaacgguaccgacgccaaggugaaacuaaucaagcaggaacucgauaaguauaaaaaugcaguaacugagcugcagcuucugaugcagucuacacccgccaccaacaauagggcucggcgcgaguugccucgauuuaugaacuacacgcucaauaacgcaaagaaaacuaaugugacccugucgaagaaacguaagagaagguuccugggcuuucucuuaggggucggaucagccauagcuagcggcguggccguuuguaaggugcugcaccuugaaggugaggucaacaaaaucaagagugcguugcuguccacaaauaaagcagugguaucucuaagcaacgggguuuccgugcucacuuucaagguccuggaccuuaaaaauuauauugauaagcaacuguugccaauccucaacaaacagucaugcaguauuagcaacaucgaaaccgugauagaguuucagcagaagaauaaccggcuguuagagauuacacgcgaguucucugugaaugccggagucaccacgccgguuuccacuuacaugcugacaaacucagaacuccuuagccugaucaaugacaugcccauuaccaacgaucaaaagaaauugaugaguaauaacgugcagaucguaagacagcagucuuauuccaucauguguauuauaaaggaagaggugcuagcuuacgucgugcaacugccucucuacggcguuaucgacacuccaugcuggaaacugcauacaagcccccuuuguaccacgaauaccaaggaaggcucgaacauuugccugacaaggacugaucgggggugguauugugacaaugccggaucuguguccuuuuucccucaggcagagaccugcaaaguccagucaaaccgcguguuuugugauacaaugaauaguuugacucucccaagcgagguaaaccugugcaauguugacaucuucaaccccaaguacgauugcaagauaaugaccuccaaaacagacgugucuagcucagucauuaccaguuuaggugcuaucguguccuguuauggcaagacuaaaugcacggccagcaacaagaaucgagggaucauuaaaacauuuucuaacggaugugauuacgucucaaauaagggcguggacaccguuaguguggguaacacucuguauuacguaaauaagcaagaagggaaaagccuauaugucaagggagagccuaucauuaacuucuacgacccacucguguucccguccgaugaauuugacgcgucuauaucgcagguuaaugagaaaaucaaccagagccuggccuucauuagaaaguccgaugaacuuuugcacaaugugaacgcaggcaaaucaaccacaaauaucaugaucaccacuauuauaaucgucauuaucgugauucugcucagucugaucgcuguaggccuucuguuguacugcaaggccaggucuacacccgugacgcucagcaaggaccagcuguccgggauaaacaauaucgcuuuuucaaacugaggacuagugaagggaacacccaaauuuaauucagccuuaagcacaauuaauuaagagugaaacguaauuguacaagcaguuggucacccaccauagggcaugaucaacaccgcaaccuuuccuuuuucccccagugauucugaaaaaccccucuucccuucagcuugcuuagauguuccaaauuuaguaagcuuaaggcggccuacagaagaaaaagaaaaaaaaggccacaaaaguucccucucacuuucaguaaauaaaauaaaagcagcaacagaaauaaagaaauaaaugaaauucaaaaugaaauaaauauuguguugugcagcauuaaaaaaucaauaaaaauuaaaaaugagcaagaucuaaaaaaaaaaaaaaaaaaaaaaaaaaaaaaaaaaaaaaaaaaaaaaaaaaaaaaaaaaaaaaaaugcaucccccccccccccccccccccccccccccccaaaggcucuuuucagagccaccagaauu

SEQ ID NO: 1175 - RNA, 2316 nt, Artificial Sequence
  mRNA product Design g-3 comprising derived and/or modified sequence from HRSV(A2)__F0_DSCav1 (opt4)
gggagaguccgcucagccagguugcagaagcggcuuagcguguguccuaaucuucucucugcguguagguaggccugugccgcaaacaagcuuaccauggagcugcugauccugaaggccaacgccaucaccaccauccugaccgccgugaccuucugcuucgccagcggccagaacaucaccgaggaguucuaccagagcaccugcagcgccgugagcaagggcuaccugagcgcccugagaaccggcugguacaccagcgugaucaccaucgagcugagcaacaucaaggagaacaagugcaacggcaccgacgccaaggugaagcugaucaagcaggagcuggacaaguacaagaacgccgugaccgagcugcagcugcugaugcagagcacccccgccaccaacaacagagccagaagagagcugcccagauucaugaacuacacccugaacaacgccaagaagaccaacgugacccugagcaagaagagaaagagaagauuccugggcuuccugcugggcgugggcagcgccaucgccagcggcguggccgugugcaaggugcugcaccuggagggcgaggugaacaagaucaagagcgcccugcugagcaccaacaaggccguggugagccugagcaacggcgugagcgugcugaccuucaaggugcuggaccugaagaacuacaucgacaagcagcugcugcccauccugaacaagcagagcugcagcaucagcaacaucgagaccgugaucgaguuccagcagaagaacaacagacugcuggagaucaccagagaguucagcgugaacgccggcgugaccacccccgugagcaccuacaugcugaccaacagcgagcugcugagccugaucaacgacaugcccaucaccaacgaccagaagaagcugaugagcaacaacgugcagaucgugagacagcagagcuacagcaucaugugcaucaucaaggaggaggugcuggccuacguggugcagcugccccuguacggcgugaucgacacccccugcuggaagcugcacaccagcccccugugcaccaccaacaccaaggagggcagcaacaucugccugaccagaaccgacagaggcugguacugcgacaacgccggcagcgugagcuucuucccccaggccgagaccugcaaggugcagagcaacagaguguucugcgacaccaugaacagccugacccugcccagcgaggugaaccugugcaacguggacaucuucaaccccaaguacgacugcaagaucaugaccagcaagaccgacgugagcagcagcgugaucaccagccugggcgccaucgugagcugcuacggcaagaccaagugcaccgccagcaacaagaacagaggcaucaucaagaccuucagcaacggcugcgacuacgugagcaacaagggcguggacaccgugagcgugggcaacacccuguacuacgugaacaagcaggagggcaagagccuguacgugaagggcgagcccaucaucaacuucuacgacccccugguguuccccagcgacgaguucgacgccagcaucagccaggugaacgagaagaucaaccagagccuggccuucaucagaaagagcgacgagcugcugcacaacgugaacgccggcaagagcaccaccaacaucaugaucaccaccaucaucaucgugaucaucgugauccugcugagccugaucgccgugggccugcugcuguacugcaaggccagaagcacccccgugacccugagcaaggaccagcugagcggcaucaacaacaucgccuucagcaacugaggacuagugaagggaacacccaaauuuaauucagccuuaagcacaauuaauuaagagugaaacguaauuguacaagcaguuggucacccaccauagggcaugaucaacaccgcaaccuuuccuuuuucccccagugauucugaaaaaccccucuucccuucagcuugcuuagauguuccaaauuuaguaagcuuaaggcggccuacagaagaaaaagaaaaaaaaggccacaaaaguucccucucacuuucaguaaauaaaauaaaagcagcaacagaaauaaagaaauaaaugaaauucaaaaugaaauaaauauuguguugugcagcauuaaaaaaucaauaaaaauuaaaaaugagcaagaucuaaaaaaaaaaaaaaaaaaaaaaaaaaaaaaaaaaaaaaaaaaaaaaaaaaaaaaaaaaaaaaaaugcaucccccccccccccccccccccccccccccccaaaggcucuuuucagagccaccagaauu

SEQ ID NO: 1176 - RNA, 2316 nt, Artificial Sequence
  mRNA product Design g-3 comprising derived and/or modified sequence from HRSV(A2)__F0_DSCav1 (opt5)
gggagaguccgcucagccagguugcagaagcggcuuagcguguguccuaaucuucucucugcguguagguaggccugugccgcaaacaagcuuaccauggagcugcucauccugaaggccaacgcuauuaccacaauccuuacggccgugaccuucugcuuugcgagcggccagaauauuacagaagaguucuaccaauccaccuguucugcugucagcaaaggguaucuguccgcccucagaacaggaugguacaccucuguuaucacaauugaacugagcaacaucaaggagaauaaaugcaacggcaccgacgccaaggugaaacuuaucaagcaggaacuggauaaguauaaaaaugcugugacggagcuccagcugcugaugcaguccacccccgccacaaacaaucgggcucgcagagagcucccucgguuuaugaacuacacccugaauaacgccaagaaaacaaaugucacccuuucuaagaaacgcaagagacgguuccugggguuucuccugggagugggcagcgcgauugccuccgggguugcuguguguaagguccuucaccuggaaggagaggugaacaaaaucaagagcgcccuccugucuacgaauaaagcuguugugucccugagcaacggcgucucugugcucacauucaaggugcuggaccuuaaaaauuauauugauaagcaacugcucccgauccugaacaaacaguccugcagcauuucuaacaucgaaaccgucauugaguuucagcagaagaauaaccgccuucuggagaucacaagagaauuuuccguuaaugccggcgugaccacccccgugagcacauacaugcucacgaacuccgagcugcugucucucaucaaugacaugccuauuaccaacgaucaaaagaaacugaugagcaauaacguccagaucgugcggcagcaguccuauagcauuauguguaucauuaaggaagagguucuugcguacgugguccaacugccccucuacggggugaucgacacaccuugcuggaaacugcauaccucuccccuuuguacaaccaauacgaaggaaggauccaacaucugccugacacgcaccgauagaggcugguauugugacaaugccgggagcguuucuuucuucccucaggcugagaccugcaaagugcagagcaaccgggucuuuugugauacaaugaacucccucacccugccgucugaggugaaucugugcaaugucgacauuuucaaccccaaguacgauugcaagaucaugacaagcaaaacggacguguccagcucuguuauuaccucccucggagccaucgugagcuguuauggcaagacaaaaugcaccgcuucuaacaagaaucgcgggauuaucaaaacauuuuccaacggaugugauuacgucagcaauaagggcguggacaccguuuccgugggcaacacgcuguauuacgucaauaagcaagaagggaaaucucuuuaugugaagggagagccuaucauuaacuucuacgacccccugguguucccuagcgaugaauuugacgccuccaucucucagguuaaugagaaaauuaaccagagccucgccuucaucagaaaguccgaugaacugcugcacaaugucaacgcuggcaaaagcaccacaaauauuaugaucaccacaauuaucaucgugauuaucgugauucuucucucucugaucgcggucgggcugcuccuguacugcaaggcccgguccacccccgugacgcuuagcaaggaccagcugucuggaauuaacaauaucgcuuuuuccaacugaggacuagugaagggaacacccaaauuuaauucagccuuaagcacaauuaauuaagagugaaacguaauuguacaagcaguuggucacccaccauagggcaugaucaacaccgcaaccuuuccuuuuucccccagugauucugaaaaaccccucuucccuucagcuugcuuagauguuccaaauuuaguaagcuuaaggcggccuacagaagaaaaagaaaaaaaaggccacaaaaguucccucucacuuucaguaaauaaaauaaaagcagcaacagaaauaaagaaauaaaugaaauucaaaaugaaauaaauauuguguugugcagcauuaaaaaaucaauaaaaauuaaaaaugagcaagaucuaaaaaaaaaaaaaaaaaaaaaaaaaaaaaaaaaaaaaaaaaaaaaaaaaaaaaaaaaaaaaaaaugcaucccccccccccccccccccccccccccccccaaaggcucuuuucagagccaccagaauu

SEQ ID NO: 1177 - RNA, 2316 nt, Artificial Sequence
  mRNA product Design g-3 comprising derived and/or modified sequence from HRSV(A2)__F0_DSCav1 (opt6)
gggagaguccgcucagccagguugcagaagcggcuuagcguguguccuaaucuucucucugcguguagguaggccugugccgcaaacaagcuuaccauggaauuauuaauccucaaagcgaacgcuauuacuaccauucuaacagcagucacauucugcuucgccucaggccaaaacauuacagaagaauuuuaccaaucaacaugcucugccguaucaaaaggcuaccuauccgcccuacgaacaggcugguacacaagcguaauaacaaucgaacuaucaaacauaaaagaaaacaaaugcaacgguacagacgccaaaguuaaacuaauaaaacaagaacucgauaaauacaaaaacgcaguaacagaauuacaacuacuaaugcaaucaacaccugcaacaaacaauagagccaggagagaauuaccucgauucaugaauuacacacucaauaacgcaaaaaaaaccaacguuacacuaucaaaaaaaagaaaacgacgauucuuaggauuccuacucggagucggaucagcaauagcaucuggcguugcaguaugcaaaguauuacacuuagaaggugaagucaauaaaauaaaaagcgcgcuacuaaguacaaacaaagcagucgucucccuaucaaacggagucucaguccuaacauucaaaguacucgaccuaaaaaauuacauagauaaacaacuacuuccaauauuaaacaaacaauccuguagcaucagcaauauagaaacaguaauagaauuucaacaaaaaaacaaccgauuauuagaaaucacucgagaauuuuccguaaacgccgggguaacaacuccagucucaaccuacaugcuaaccaauucagaacuauugagcuuaauaaacgacaugccaauaaccaacgaccaaaaaaaacuaaugucuaacaauguucaaaucgucagacaacaaaguuacaguauaauguguauaaucaaagaagaaguccuagcauacguaguccaacucccacuauauggaguuaucgacacaccauguuggaaauuacacaccucaccauuaugcacaaccaauacaaaagaaggaucaaacauaugccuuacacggacagaccgcggaugguauugugacaacgcuggcucagucuccuuuuucccacaagcagaaacaugcaaaguacaaucaaacagagucuuuugcgauaccaugaacucacuuacauuaccaagcgaaguaaaucuuuguaacgucgacaucuucaauccuaaauaugacugcaaaaucaugaccucaaaaacagacguuagcucuucaguaaucacuagcuuaggagcaaucguaucaugcuacggcaaaacaaaauguacagcaucaaauaaaaacagaggaaucauaaaaacauuuucaaacggaugcgauuauguaagcaacaaaggaguagauacuguaagcguaggaaacacauuguacuauguaaacaaacaagaaggaaaaucacucuauguaaaaggagaaccuauaaucaauuucuacgauccauuaguguucccaucagaugaauuugacgccucaauaucacaaguuaaugaaaaaauaaaucaaucgcuagcauucauacguaaaucagaugaauuacuacauaacguaaacgcaggcaaauccacaacaaauaucaugaucacaacaauuauaauaguaauaauaguaauacuacuaucacuaauagccguaggacuccuacuauacugcaaagcaagaucuacuccaguaacccucucaaaagaucaacuaagcggaauuaauaacaucgcauucagcaacuaaggacuagugaagggaacacccaaauuuaauucagccuuaagcacaauuaauuaagagugaaacguaauuguacaagcaguuggucacccaccauagggcaugaucaacaccgcaaccuuuccuuuuucccccagugauucugaaaaaccccucuucccuucagcuugcuuagauguuccaaauuuaguaagcuuaaggcggccuacagaagaaaaagaaaaaaaaggccacaaaaguucccucucacuuucaguaaauaaaauaaaagcagcaacagaaauaaagaaauaaaugaaauucaaaaugaaauaaauauuguguugugcagcauuaaaaaaucaauaaaaauuaaaaaugagcaagaucuaaaaaaaaaaaaaaaaaaaaaaaaaaaaaaaaaaaaaaaaaaaaaaaaaaaaaaaaaaaaaaaaugcaucccccccccccccccccccccccccccccccaaaggcucuuuucagagccaccagaauu

SEQ ID NO: 1178 - RNA, 2316 nt, Artificial Sequence
  mRNA product Design g-3 comprising derived and/or modified sequence from HRSV(A2)__F0_DSCav1 (opt11)
gggagaguccgcucagccagguugcagaagcggcuuagcguguguccuaaucuucucucugcguguagguaggccugugccgcaaacaagcuuaccauggaacuacuuauccucaaagccaacgccaucaccaccauccucacagcaguaaccuuuugcuucgccucaggccaaaauaucacagaagaauuuuaccagaguaccugcuccgccguauccaaaggauaccucagcgcgcuccgcaccggcugguacacuucaguaaucacaaucgaacuauccaacaucaaagaaaacaaaugcaacggcaccgacgcgaaagucaaacucaucaaacaagaacuagacaaauacaaaaaugccguaacagaacuacaacuguuaaugcagagcacacccgccaccaacaaccgcgcccgccgggaacucccccgauucaugaacuacacacucaacaacgccaaaaagacgaacgucacccucagcaagaaacgaaaacgcagauuccucgguuuccuacuaggcguaggcucagcaauagccuccggaguagccgucugcaaaguccugcacuuagaaggcgaagucaacaaaaucaaauccgcccuacucuccacgaacaaagccgucgucucccuguccaacggugucuccguuuuaaccuucaaaguucuggaccucaaaaacuacauagacaaacagcuucuccccauccucaacaaacaauccuguagcaucuccaacaucgaaaccgucauagaauuucaacagaaaaacaacagacugcucgaaaucacccgcgaguucuccgucaacgccggcgucacgacucccgucuccaccuauaugcucacgaacucggaacuccuuucccuaaucaacgacaugccgaucaccaacgaccaaaagaaacucaugucaaacaacguacaaauuguccgccaacaaucauacuccaucaugugcauaauuaaagaagaaguccucgcauacguaguccaacucccccucuacggcgucaucgacacccccugcuggaaacuccacaccuccccacucugcacaaccaacaccaaagaaggcucaaacauaugccuaacgcgcaccgaucgcgguugguacugcgacaacgccgguuccgucagcuucuucccccaagcagagacaugcaaaguccaaucaaaccgcgucuucugcgacaccaugaacucacuaacccuuccaagcgaagucaaccucugcaacguugacaucuucaaccccaaauacgacuguaaaaucaugaccuccaagaccgacguauccucuuccgucaucacaucccuaggcgcuaucguauccugcuaugguaaaaccaaaugcaccgccuccaacaaaaaccgcggcaucaucaagacauuuuccaacggcugcgacuacgugagcaacaaaggcgucgacaccgucuccguaggcaacacccucuacuauguaaacaaacaagagggcaaaucacucuacgucaaaggggaacccaucaucaacuucuacgacccgcucguauuccccagcgaugaguucgacgccuccaucucccaggucaacgaaaagauaaaccaaucacucgcauucauucguaaauccgacgaacuccuacacaacgugaaugcaggcaaaucgaccacuaacaucaugaucaccaccaucaucaucgucaucauagucauccuccugucccuuaucgccgucggucuuuuauuauacugcaaagcccgcagcacccccgucacccucucuaaggaccaacucagcggcaucaauaacaucgcauucucuaacuaaggacuagugaagggaacacccaaauuuaauucagccuuaagcacaauuaauuaagagugaaacguaauuguacaagcaguuggucacccaccauagggcaugaucaacaccgcaaccuuuccuuuuucccccagugauucugaaaaaccccucuucccuucagcuugcuuagauguuccaaauuuaguaagcuuaaggcggccuacagaagaaaaagaaaaaaaaggccacaaaaguucccucucacuuucaguaaauaaaauaaaagcagcaacagaaauaaagaaauaaaugaaauucaaaaugaaauaaauauuguguugugcagcauuaaaaaaucaauaaaaauuaaaaaugagcaagaucuaaaaaaaaaaaaaaaaaaaaaaaaaaaaaaaaaaaaaaaaaaaaaaaaaaaaaaaaaaaaaaaaugcaucccccccccccccccccccccccccccccccaaaggcucuuuucagagccaccagaauu

SEQ ID NO: 1179 - RNA, 2111 nt, Artificial Sequence
  mRNA product Design g-4 comprising derived and/or modified sequence from HRSV(A2)__F0_DSCav1 (opt1)
gggagacuccugucgggcggaaguaggaggaguagaguuuaaaaacaguacucuuuuuccgguucgggacguaguugaagcaacgacaagccggauaaccgcucuugagacaggaagcuuaccauggagcugcucauccugaaggccaacgccaucaccaccauccugacggcggugaccuucugcuucgccagcggccagaacaucaccgaggaguucuaccaguccacgugcagcgccgucuccaagggguaccucagcgcccugcggaccggcugguacaccuccgugaucaccaucgagcugagcaacaucaaggagaacaagugcaacgggaccgacgccaaggugaagcucaucaagcaggagcuggacaaguacaagaacgcggucacggagcugcagcuccugaugcaguccaccccggcaaccaacaaccgcgcccggcgcgagcugccccgguucaugaacuacacccucaacaacgccaagaagacgaacgugacccugagcaagaagcgcaagcggcgcuuccugggcuuccuccugggggugggcuccgccaucgcgagcggcgucgccgugugcaaggugcugcaccucgagggggaggucaacaagaucaagagcgcccugcuguccaccaacaaggccguggugagccucuccaacggcgucagcgugcugaccuucaaggugcuggaccucaagaacuacaucgacaagcagcugcugcccauccugaacaagcagagcugcuccaucagcaacaucgagacggugaucgaguuccagcagaagaacaaccggcuccuggagaucacccgcgaguucagcgugaacgccggggucaccacccccguguccacguacaugcugaccaacagcgagcuccugucccugaucaacgacaugccgaucaccaacgaccagaagaagcucaugagcaacaacgugcagaucguccggcagcaguccuacagcaucaugugcaucaucaaggaggaggugcuggcguacgugguccagcugccccucuacggcgugaucgacacccccugcuggaagcugcacacgagcccccugugcaccaccaacaccaaggagggguccaacaucugccucacgcgcaccgaccggggcugguacugcgacaacgccggcagcgucuccuucuucccgcaggccgagaccugcaaggugcagagcaaccgcguguucugcgacaccaugaacucccugacgcugcccagcgagguaaaccucugcaacgucgacaucuucaaccccaaguacgacugcaagaucaugaccuccaagaccgacgugagcuccagcgugaucaccucccugggggccaucgucagcugcuacggcaagacgaagugcaccgccagcaacaagaaccgggggaucaucaagaccuucuccaacggcugcgacuacgugagcaacaagggcguggacaccguguccgucgggaacacccuguacuacgugaacaagcaggagggcaagagccucuacgugaagggggagcccaucaucaacuucuacgacccgcuggucuuccccuccgacgaguucgacgcgagcaucucccaggugaacgagaagaucaaccagagccuggccuucauccgcaaguccgacgagcugcuccacaacgugaacgccggcaagagcacgaccaacaucaugaucaccaccaucaucaucgucaucaucgugauccugcugucccucaucgccguggggcugcugcucuacugcaaggcccggagcacgcccgucacccuguccaaggaccagcugagcggcaucaacaacaucgcguucuccaacugaggacuaguaauaaggaaacuguaugaaugucugugggcaggaagugaagagauccuucuguaaagguuuuuggaauuaugucugcugaauaauaaacuuuuuugaaauaauaaaucugguagaaaaaugagaucuaaaaaaaaaaaaaaaaaaaaaaaaaaaaaaaaaaaaaaaaaaaaaaaaaaaaaaaaaaaaaaaaugcaucccccccccccccccccccccccccccccccaaaggcucuuuucagagccaccagaauu

SEQ ID NO: 1180 - RNA, 2111 nt, Artificial Sequence
  mRNA product Design g-4 comprising derived and/or modified sequence from HRSV(A2)__F0_DSCav1 (opt1)
gggagacuccugucgggcggaaguaggaggaguagaguuuaaaaacaguacucuuuuuccgguucgggacguaguugaagcaacgacaagccggauaaccgcucuugagacaggaagcuuaccauggagcugcucauccugaaggccaacgccaucaccaccauccugacggcggugaccuucugcuucgccagcggccagaacaucaccgaggaguucuaccaguccacgugcagcgccgucuccaagggguaccucagcgcccugcgcaccggcugguacaccuccgugaucaccaucgagcugagcaacaucaaggagaacaagugcaacgggaccgacgccaaggugaagcucaucaagcaggagcuggacaaguacaagaacgcggucacggagcugcagcuccugaugcaguccacccccgccaccaacaaccgggcccgccgggagcugccgcgcuucaugaacuacacccucaacaacgccaagaagacgaacgugacccugagcaagaagcggaagcgccgguuccugggcuuccuccugggggugggcuccgcgaucgccagcggcgucgccgugugcaaggugcugcaccucgagggggaggucaacaagaucaaguccgcccugcugagcaccaacaaggccguggugucccucagcaacggcgucuccgugcugaccuucaaggugcuggaccucaagaacuacaucgacaagcagcugcugcccauccucaacaagcagagcugcuccaucagcaacaucgagacggucaucgaguuccagcagaagaacaaccgccugcuggagaucacccgggaguucuccgugaacgcgggggugaccacccccgucagcacguacaugcucaccaacagcgagcugcugucccucaucaacgacaugcccaucaccaacgaccagaagaagcugaugagcaacaacgugcagaucgugcgccagcaguccuacagcaucaugugcaucaucaaggaggagguccuggccuacguggugcagcucccgcuguacggcgucaucgacacccccugcuggaagcugcacacgagcccccucugcaccaccaacaccaaggaggggagcaacaucugccugacgcggaccgaccgcggcugguacugcgacaacgccggcuccgugagcuucuucccccaggccgagaccugcaagguccaguccaaccggguguucugcgacaccaugaacagccugacgcucccguccgaggugaaccugugcaacgucgacaucuucaaccccaaguacgacugcaagaucaugaccagcaagaccgacguguccagcuccgugaucaccagccugggggccaucgucuccugcuacggcaagacgaagugcaccgcgagcaacaagaaccgcgggaucaucaagaccuucuccaacggcugcgacuacgugagcaacaagggcguggacaccgucagcguggggaacacccucuacuacgugaacaagcaggagggcaagucccuguacgucaagggggagcccaucaucaacuucuacgacccccugguguucccgagcgacgaguucgacgccuccaucagccaggugaacgagaagaucaaccagucccucgccuucauccggaaguccgacgagcugcugcacaacgucaacgccggcaaguccacgaccaacaucaugaucaccaccaucaucaucgugaucaucgugauccugcucagccugaucgccgucgggcugcuccuguacugcaaggcgcgcuccacgcccgugacccugagcaaggaccagcucuccggcaucaacaacaucgccuucagcaacugaggacuaguaauaaggaaacuguaugaaugucugugggcaggaagugaagagauccuucuguaaagguuuuuggaauuaugucugcugaauaauaaacuuuuuugaaauaauaaaucugguagaaaaaugagaucuaaaaaaaaaaaaaaaaaaaaaaaaaaaaaaaaaaaaaaaaaaaaaaaaaaaaaaaaaaaaaaaaugcaucccccccccccccccccccccccccccccccaaaggcucuuuucagagccaccagaauu

SEQ ID NO: 1181 - RNA, 2111 nt, Artificial Sequence
  mRNA product Design g-4 comprising derived and/or modified sequence from HRSV(A2)__F0_DSCav1 (opt2)
gggagacuccugucgggcggaaguaggaggaguagaguuuaaaaacaguacucuuuuuccgguucgggacguaguugaagcaacgacaagccggauaaccgcucuugagacaggaagcuuaccauggagcuccucauccucaaggccaacgccaucaccaccauccucaccgccgucaccuucugcuucgccuccggccagaacaucaccgaggaguucuaccaguccaccugcuccgccgucuccaagggcuaccucuccgcccuccgcaccggcugguacaccuccgucaucaccaucgagcucuccaacaucaaggagaacaagugcaacggcaccgacgccaaggucaagcucaucaagcaggagcucgacaaguacaagaacgccgucaccgagcuccagcuccucaugcaguccacccccgccaccaacaaccgcgcccgccgcgagcucccccgcuucaugaacuacacccucaacaacgccaagaagaccaacgucacccucuccaagaagcgcaagcgccgcuuccucggcuuccuccucggcgucggcuccgccaucgccuccggcgucgccgucugcaagguccuccaccucgagggcgaggucaacaagaucaaguccgcccuccucuccaccaacaaggccgucgucucccucuccaacggcgucuccguccucaccuucaagguccucgaccucaagaacuacaucgacaagcagcuccuccccauccucaacaagcaguccugcuccaucuccaacaucgagaccgucaucgaguuccagcagaagaacaaccgccuccucgagaucacccgcgaguucuccgucaacgccggcgucaccacccccgucuccaccuacaugcucaccaacuccgagcuccucucccucaucaacgacaugcccaucaccaacgaccagaagaagcucauguccaacaacguccagaucguccgccagcaguccuacuccaucaugugcaucaucaaggaggagguccucgccuacgucguccagcucccccucuacggcgucaucgacacccccugcuggaagcuccacaccuccccccucugcaccaccaacaccaaggagggcuccaacaucugccucacccgcaccgaccgcggcugguacugcgacaacgccggcuccgucuccuucuucccccaggccgagaccugcaagguccaguccaaccgcgucuucugcgacaccaugaacucccucacccuccccuccgaggucaaccucugcaacgucgacaucuucaaccccaaguacgacugcaagaucaugaccuccaagaccgacgucuccuccuccgucaucaccucccucggcgccaucgucuccugcuacggcaagaccaagugcaccgccuccaacaagaaccgcggcaucaucaagaccuucuccaacggcugcgacuacgucuccaacaagggcgucgacaccgucuccgucggcaacacccucuacuacgucaacaagcaggagggcaagucccucuacgucaagggcgagcccaucaucaacuucuacgacccccucgucuuccccuccgacgaguucgacgccuccaucucccaggucaacgagaagaucaaccagucccucgccuucauccgcaaguccgacgagcuccuccacaacgucaacgccggcaaguccaccaccaacaucaugaucaccaccaucaucaucgucaucaucgucauccuccucucccucaucgccgucggccuccuccucuacugcaaggcccgcuccacccccgucacccucuccaaggaccagcucuccggcaucaacaacaucgccuucuccaacugaggacuaguaauaaggaaacuguaugaaugucugugggcaggaagugaagagauccuucuguaaagguuuuuggaauuaugucugcugaauaauaaacuuuuuugaaauaauaaaucugguagaaaaaugagaucuaaaaaaaaaaaaaaaaaaaaaaaaaaaaaaaaaaaaaaaaaaaaaaaaaaaaaaaaaaaaaaaaugcaucccccccccccccccccccccccccccccccaaaggcucuuuucagagccaccagaauu

SEQ ID NO: 1182 - RNA, 2111 nt, Artificial Sequence
  mRNA product Design g-4 comprising derived and/or modified sequence from HRSV(A2)__F0_DSCav1 (opt3)
gggagacuccugucgggcggaaguaggaggaguagaguuuaaaaacaguacucuuuuuccgguucgggacguaguugaagcaacgacaagccggauaaccgcucuugagacaggaagcuuaccauggagcugcucauccuuaaggccaacgcuauuaccacaauacugacugcagugacguucugcuuugccagcggccagaauaucaccgaagaguucuaccaauccacauguucugcggucucaaaaggguauuugagugcuuuaagaacuggaugguacaccagcguuauuacaaucgaacuguccaacauuaaggagaauaaaugcaacgguaccgacgccaaggugaaacuaaucaagcaggaacucgauaaguauaaaaaugcaguaacugagcugcagcuucugaugcagucuacacccgccaccaacaauagggcucggcgcgaguugccucgauuuaugaacuacacgcucaauaacgcaaagaaaacuaaugugacccugucgaagaaacguaagagaagguuccugggcuuucucuuaggggucggaucagccauagcuagcggcguggccguuuguaaggugcugcaccuugaaggugaggucaacaaaaucaagagugcguugcuguccacaaauaaagcagugguaucucuaagcaacgggguuuccgugcucacuuucaagguccuggaccuuaaaaauuauauugauaagcaacuguugccaauccucaacaaacagucaugcaguauuagcaacaucgaaaccgugauagaguuucagcagaagaauaaccggcuguuagagauuacacgcgaguucucugugaaugccggagucaccacgccgguuuccacuuacaugcugacaaacucagaacuccuuagccugaucaaugacaugcccauuaccaacgaucaaaagaaauugaugaguaauaacgugcagaucguaagacagcagucuuauuccaucauguguauuauaaaggaagaggugcuagcuuacgucgugcaacugccucucuacggcguuaucgacacuccaugcuggaaacugcauacaagcccccuuuguaccacgaauaccaaggaaggcucgaacauuugccugacaaggacugaucgggggugguauugugacaaugccggaucuguguccuuuuucccucaggcagagaccugcaaaguccagucaaaccgcguguuuugugauacaaugaauaguuugacucucccaagcgagguaaaccugugcaauguugacaucuucaaccccaaguacgauugcaagauaaugaccuccaaaacagacgugucuagcucagucauuaccaguuuaggugcuaucguguccuguuauggcaagacuaaaugcacggccagcaacaagaaucgagggaucauuaaaacauuuucuaacggaugugauuacgucucaaauaagggcguggacaccguuaguguggguaacacucuguauuacguaaauaagcaagaagggaaaagccuauaugucaagggagagccuaucauuaacuucuacgacccacucguguucccguccgaugaauuugacgcgucuauaucgcagguuaaugagaaaaucaaccagagccuggccuucauuagaaaguccgaugaacuuuugcacaaugugaacgcaggcaaaucaaccacaaauaucaugaucaccacuauuauaaucgucauuaucgugauucugcucagucugaucgcuguaggccuucuguuguacugcaaggccaggucuacacccgugacgcucagcaaggaccagcuguccgggauaaacaauaucgcuuuuucaaacugaggacuaguaauaaggaaacuguaugaaugucugugggcaggaagugaagagauccuucuguaaagguuuuuggaauuaugucugcugaauaauaaacuuuuuugaaauaauaaaucugguagaaaaaugagaucuaaaaaaaaaaaaaaaaaaaaaaaaaaaaaaaaaaaaaaaaaaaaaaaaaaaaaaaaaaaaaaaaugcaucccccccccccccccccccccccccccccccaaaggcucuuuucagagccaccagaauu

SEQ ID NO: 1183 - RNA, 2111 nt, Artificial Sequence
  mRNA product Design g-4 comprising derived and/or modified sequence from HRSV(A2)__F0_DSCav1 (opt4)
gggagacuccugucgggcggaaguaggaggaguagaguuuaaaaacaguacucuuuuuccgguucgggacguaguugaagcaacgacaagccggauaaccgcucuugagacaggaagcuuaccauggagcugcugauccugaaggccaacgccaucaccaccauccugaccgccgugaccuucugcuucgccagcggccagaacaucaccgaggaguucuaccagagcaccugcagcgccgugagcaagggcuaccugagcgcccugagaaccggcugguacaccagcgugaucaccaucgagcugagcaacaucaaggagaacaagugcaacggcaccgacgccaaggugaagcugaucaagcaggagcuggacaaguacaagaacgccgugaccgagcugcagcugcugaugcagagcacccccgccaccaacaacagagccagaagagagcugcccagauucaugaacuacacccugaacaacgccaagaagaccaacgugacccugagcaagaagagaaagagaagauuccugggcuuccugcugggcgugggcagcgccaucgccagcggcguggccgugugcaaggugcugcaccuggagggcgaggugaacaagaucaagagcgcccugcugagcaccaacaaggccguggugagccugagcaacggcgugagcgugcugaccuucaaggugcuggaccugaagaacuacaucgacaagcagcugcugcccauccugaacaagcagagcugcagcaucagcaacaucgagaccgugaucgaguuccagcagaagaacaacagacugcuggagaucaccagagaguucagcgugaacgccggcgugaccacccccgugagcaccuacaugcugaccaacagcgagcugcugagccugaucaacgacaugcccaucaccaacgaccagaagaagcugaugagcaacaacgugcagaucgugagacagcagagcuacagcaucaugugcaucaucaaggaggaggugcuggccuacguggugcagcugccccuguacggcgugaucgacacccccugcuggaagcugcacaccagcccccugugcaccaccaacaccaaggagggcagcaacaucugccugaccagaaccgacagaggcugguacugcgacaacgccggcagcgugagcuucuucccccaggccgagaccugcaaggugcagagcaacagaguguucugcgacaccaugaacagccugacccugcccagcgaggugaaccugugcaacguggacaucuucaaccccaaguacgacugcaagaucaugaccagcaagaccgacgugagcagcagcgugaucaccagccugggcgccaucgugagcugcuacggcaagaccaagugcaccgccagcaacaagaacagaggcaucaucaagaccuucagcaacggcugcgacuacgugagcaacaagggcguggacaccgugagcgugggcaacacccuguacuacgugaacaagcaggagggcaagagccuguacgugaagggcgagcccaucaucaacuucuacgacccccugguguuccccagcgacgaguucgacgccagcaucagccaggugaacgagaagaucaaccagagccuggccuucaucagaaagagcgacgagcugcugcacaacgugaacgccggcaagagcaccaccaacaucaugaucaccaccaucaucaucgugaucaucgugauccugcugagccugaucgccgugggccugcugcuguacugcaaggccagaagcacccccgugacccugagcaaggaccagcugagcggcaucaacaacaucgccuucagcaacugaggacuaguaauaaggaaacuguaugaaugucugugggcaggaagugaagagauccuucuguaaagguuuuuggaauuaugucugcugaauaauaaacuuuuuugaaauaauaaaucugguagaaaaaugagaucuaaaaaaaaaaaaaaaaaaaaaaaaaaaaaaaaaaaaaaaaaaaaaaaaaaaaaaaaaaaaaaaaugcaucccccccccccccccccccccccccccccccaaaggcucuuuucagagccaccagaauu

SEQ ID NO: 1184 - RNA, 2111 nt, Artificial Sequence
  mRNA product Design g-4 comprising derived and/or modified sequence from HRSV(A2)__F0_DSCav1 (opt5)
gggagacuccugucgggcggaaguaggaggaguagaguuuaaaaacaguacucuuuuuccgguucgggacguaguugaagcaacgacaagccggauaaccgcucuugagacaggaagcuuaccauggagcugcucauccugaaggccaacgcuauuaccacaauccuuacggccgugaccuucugcuuugcgagcggccagaauauuacagaagaguucuaccaauccaccuguucugcugucagcaaaggguaucuguccgcccucagaacaggaugguacaccucuguuaucacaauugaacugagcaacaucaaggagaauaaaugcaacggcaccgacgccaaggugaaacuuaucaagcaggaacuggauaaguauaaaaaugcugugacggagcuccagcugcugaugcaguccacccccgccacaaacaaucgggcucgcagagagcucccucgguuuaugaacuacacccugaauaacgccaagaaaacaaaugucacccuuucuaagaaacgcaagagacgguuccugggguuucuccugggagugggcagcgcgauugccuccgggguugcuguguguaagguccuucaccuggaaggagaggugaacaaaaucaagagcgcccuccugucuacgaauaaagcuguugugucccugagcaacggcgucucugugcucacauucaaggugcuggaccuuaaaaauuauauugauaagcaacugcucccgauccugaacaaacaguccugcagcauuucuaacaucgaaaccgucauugaguuucagcagaagaauaaccgccuucuggagaucacaagagaauuuuccguuaaugccggcgugaccacccccgugagcacauacaugcucacgaacuccgagcugcugucucucaucaaugacaugccuauuaccaacgaucaaaagaaacugaugagcaauaacguccagaucgugcggcagcaguccuauagcauuauguguaucauuaaggaagagguucuugcguacgugguccaacugccccucuacggggugaucgacacaccuugcuggaaacugcauaccucuccccuuuguacaaccaauacgaaggaaggauccaacaucugccugacacgcaccgauagaggcugguauugugacaaugccgggagcguuucuuucuucccucaggcugagaccugcaaagugcagagcaaccgggucuuuugugauacaaugaacucccucacccugccgucugaggugaaucugugcaaugucgacauuuucaaccccaaguacgauugcaagaucaugacaagcaaaacggacguguccagcucuguuauuaccucccucggagccaucgugagcuguuauggcaagacaaaaugcaccgcuucuaacaagaaucgcgggauuaucaaaacauuuuccaacggaugugauuacgucagcaauaagggcguggacaccguuuccgugggcaacacgcuguauuacgucaauaagcaagaagggaaaucucuuuaugugaagggagagccuaucauuaacuucuacgacccccugguguucccuagcgaugaauuugacgccuccaucucucagguuaaugagaaaauuaaccagagccucgccuucaucagaaaguccgaugaacugcugcacaaugucaacgcuggcaaaagcaccacaaauauuaugaucaccacaauuaucaucgugauuaucgugauucuucucucucugaucgcggucgggcugcuccuguacugcaaggcccgguccacccccgugacgcuuagcaaggaccagcugucuggaauuaacaauaucgcuuuuuccaacugaggacuaguaauaaggaaacuguaugaaugucugugggcaggaagugaagagauccuucuguaaagguuuuuggaauuaugucugcugaauaauaaacuuuuuugaaauaauaaaucugguagaaaaaugagaucuaaaaaaaaaaaaaaaaaaaaaaaaaaaaaaaaaaaaaaaaaaaaaaaaaaaaaaaaaaaaaaaaugcaucccccccccccccccccccccccccccccccaaaggcucuuuucagagccaccagaauu

SEQ ID NO: 1185 - RNA, 2111 nt, Artificial Sequence
  mRNA product Design g-4 comprising derived and/or modified sequence from HRSV(A2)__F0_DSCav1 (opt6)
gggagacuccugucgggcggaaguaggaggaguagaguuuaaaaacaguacucuuuuuccgguucgggacguaguugaagcaacgacaagccggauaaccgcucuugagacaggaagcuuaccauggaauuauuaauccucaaagcgaacgcuauuacuaccauucuaacagcagucacauucugcuucgccucaggccaaaacauuacagaagaauuuuaccaaucaacaugcucugccguaucaaaaggcuaccuauccgcccuacgaacaggcugguacacaagcguaauaacaaucgaacuaucaaacauaaaagaaaacaaaugcaacgguacagacgccaaaguuaaacuaauaaaacaagaacucgauaaauacaaaaacgcaguaacagaauuacaacuacuaaugcaaucaacaccugcaacaaacaauagagccaggagagaauuaccucgauucaugaauuacacacucaauaacgcaaaaaaaaccaacguuacacuaucaaaaaaaagaaaacgacgauucuuaggauuccuacucggagucggaucagcaauagcaucuggcguugcaguaugcaaaguauuacacuuagaaggugaagucaauaaaauaaaaagcgcgcuacuaaguacaaacaaagcagucgucucccuaucaaacggagucucaguccuaacauucaaaguacucgaccuaaaaaauuacauagauaaacaacuacuuccaauauuaaacaaacaauccuguagcaucagcaauauagaaacaguaauagaauuucaacaaaaaaacaaccgauuauuagaaaucacucgagaauuuuccguaaacgccgggguaacaacuccagucucaaccuacaugcuaaccaauucagaacuauugagcuuaauaaacgacaugccaauaaccaacgaccaaaaaaaacuaaugucuaacaauguucaaaucgucagacaacaaaguuacaguauaauguguauaaucaaagaagaaguccuagcauacguaguccaacucccacuauauggaguuaucgacacaccauguuggaaauuacacaccucaccauuaugcacaaccaauacaaaagaaggaucaaacauaugccuuacacggacagaccgcggaugguauugugacaacgcuggcucagucuccuuuuucccacaagcagaaacaugcaaaguacaaucaaacagagucuuuugcgauaccaugaacucacuuacauuaccaagcgaaguaaaucuuuguaacgucgacaucuucaauccuaaauaugacugcaaaaucaugaccucaaaaacagacguuagcucuucaguaaucacuagcuuaggagcaaucguaucaugcuacggcaaaacaaaauguacagcaucaaauaaaaacagaggaaucauaaaaacauuuucaaacggaugcgauuauguaagcaacaaaggaguagauacuguaagcguaggaaacacauuguacuauguaaacaaacaagaaggaaaaucacucuauguaaaaggagaaccuauaaucaauuucuacgauccauuaguguucccaucagaugaauuugacgccucaauaucacaaguuaaugaaaaaauaaaucaaucgcuagcauucauacguaaaucagaugaauuacuacauaacguaaacgcaggcaaauccacaacaaauaucaugaucacaacaauuauaauaguaauaauaguaauacuacuaucacuaauagccguaggacuccuacuauacugcaaagcaagaucuacuccaguaacccucucaaaagaucaacuaagcggaauuaauaacaucgcauucagcaacuaaggacuaguaauaaggaaacuguaugaaugucugugggcaggaagugaagagauccuucuguaaagguuuuuggaauuaugucugcugaauaauaaacuuuuuugaaauaauaaaucugguagaaaaaugagaucuaaaaaaaaaaaaaaaaaaaaaaaaaaaaaaaaaaaaaaaaaaaaaaaaaaaaaaaaaaaaaaaaugcaucccccccccccccccccccccccccccccccaaaggcucuuuucagagccaccagaauu

SEQ ID NO: 1186 - RNA, 2111 nt, Artificial Sequence
  mRNA product Design g-4 comprising derived and/or modified sequence from HRSV(A2)__F0_DSCav1 (opt11)
gggagacuccugucgggcggaaguaggaggaguagaguuuaaaaacaguacucuuuuuccgguucgggacguaguugaagcaacgacaagccggauaaccgcucuugagacaggaagcuuaccauggaacuacuuauccucaaagccaacgccaucaccaccauccucacagcaguaaccuuuugcuucgccucaggccaaaauaucacagaagaauuuuaccagaguaccugcuccgccguauccaaaggauaccucagcgcgcuccgcaccggcugguacacuucaguaaucacaaucgaacuauccaacaucaaagaaaacaaaugcaacggcaccgacgcgaaagucaaacucaucaaacaagaacuagacaaauacaaaaaugccguaacagaacuacaacuguuaaugcagagcacacccgccaccaacaaccgcgcccgccgggaacucccccgauucaugaacuacacacucaacaacgccaaaaagacgaacgucacccucagcaagaaacgaaaacgcagauuccucgguuuccuacuaggcguaggcucagcaauagccuccggaguagccgucugcaaaguccugcacuuagaaggcgaagucaacaaaaucaaauccgcccuacucuccacgaacaaagccgucgucucccuguccaacggugucuccguuuuaaccuucaaaguucuggaccucaaaaacuacauagacaaacagcuucuccccauccucaacaaacaauccuguagcaucuccaacaucgaaaccgucauagaauuucaacagaaaaacaacagacugcucgaaaucacccgcgaguucuccgucaacgccggcgucacgacucccgucuccaccuauaugcucacgaacucggaacuccuuucccuaaucaacgacaugccgaucaccaacgaccaaaagaaacucaugucaaacaacguacaaauuguccgccaacaaucauacuccaucaugugcauaauuaaagaagaaguccucgcauacguaguccaacucccccucuacggcgucaucgacacccccugcuggaaacuccacaccuccccacucugcacaaccaacaccaaagaaggcucaaacauaugccuaacgcgcaccgaucgcgguugguacugcgacaacgccgguuccgucagcuucuucccccaagcagagacaugcaaaguccaaucaaaccgcgucuucugcgacaccaugaacucacuaacccuuccaagcgaagucaaccucugcaacguugacaucuucaaccccaaauacgacuguaaaaucaugaccuccaagaccgacguauccucuuccgucaucacaucccuaggcgcuaucguauccugcuaugguaaaaccaaaugcaccgccuccaacaaaaaccgcggcaucaucaagacauuuuccaacggcugcgacuacgugagcaacaaaggcgucgacaccgucuccguaggcaacacccucuacuauguaaacaaacaagagggcaaaucacucuacgucaaaggggaacccaucaucaacuucuacgacccgcucguauuccccagcgaugaguucgacgccuccaucucccaggucaacgaaaagauaaaccaaucacucgcauucauucguaaauccgacgaacuccuacacaacgugaaugcaggcaaaucgaccacuaacaucaugaucaccaccaucaucaucgucaucauagucauccuccugucccuuaucgccgucggucuuuuauuauacugcaaagcccgcagcacccccgucacccucucuaaggaccaacucagcggcaucaauaacaucgcauucucuaacuaaggacuaguaauaaggaaacuguaugaaugucugugggcaggaagugaagagauccuucuguaaagguuuuuggaauuaugucugcugaauaauaaacuuuuuugaaauaauaaaucugguagaaaaaugagaucuaaaaaaaaaaaaaaaaaaaaaaaaaaaaaaaaaaaaaaaaaaaaaaaaaaaaaaaaaaaaaaaaugcaucccccccccccccccccccccccccccccccaaaggcucuuuucagagccaccagaauu

SEQ ID NO: 1187 - RNA, 2087 nt, Artificial Sequence
  mRNA product Design g-5 comprising derived and/or modified sequence from HRSV(A2)__F0_DSCav1 (opt1)
gggagacccgugacccggaaguuguacggcuacgcgacuuucccucccacaaacccucgcgcccuuccuuuccuacuugggcccggcagaaagcuuaccauggagcugcucauccugaaggccaacgccaucaccaccauccugacggcggugaccuucugcuucgccagcggccagaacaucaccgaggaguucuaccaguccacgugcagcgccgucuccaagggguaccucagcgcccugcggaccggcugguacaccuccgugaucaccaucgagcugagcaacaucaaggagaacaagugcaacgggaccgacgccaaggugaagcucaucaagcaggagcuggacaaguacaagaacgcggucacggagcugcagcuccugaugcaguccaccccggcaaccaacaaccgcgcccggcgcgagcugccccgguucaugaacuacacccucaacaacgccaagaagacgaacgugacccugagcaagaagcgcaagcggcgcuuccugggcuuccuccugggggugggcuccgccaucgcgagcggcgucgccgugugcaaggugcugcaccucgagggggaggucaacaagaucaagagcgcccugcuguccaccaacaaggccguggugagccucuccaacggcgucagcgugcugaccuucaaggugcuggaccucaagaacuacaucgacaagcagcugcugcccauccugaacaagcagagcugcuccaucagcaacaucgagacggugaucgaguuccagcagaagaacaaccggcuccuggagaucacccgcgaguucagcgugaacgccggggucaccacccccguguccacguacaugcugaccaacagcgagcuccugucccugaucaacgacaugccgaucaccaacgaccagaagaagcucaugagcaacaacgugcagaucguccggcagcaguccuacagcaucaugugcaucaucaaggaggaggugcuggcguacgugguccagcugccccucuacggcgugaucgacacccccugcuggaagcugcacacgagcccccugugcaccaccaacaccaaggagggguccaacaucugccucacgcgcaccgaccggggcugguacugcgacaacgccggcagcgucuccuucuucccgcaggccgagaccugcaaggugcagagcaaccgcguguucugcgacaccaugaacucccugacgcugcccagcgagguaaaccucugcaacgucgacaucuucaaccccaaguacgacugcaagaucaugaccuccaagaccgacgugagcuccagcgugaucaccucccugggggccaucgucagcugcuacggcaagacgaagugcaccgccagcaacaagaaccgggggaucaucaagaccuucuccaacggcugcgacuacgugagcaacaagggcguggacaccguguccgucgggaacacccuguacuacgugaacaagcaggagggcaagagccucuacgugaagggggagcccaucaucaacuucuacgacccgcuggucuuccccuccgacgaguucgacgcgagcaucucccaggugaacgagaagaucaaccagagccuggccuucauccgcaaguccgacgagcugcuccacaacgugaacgccggcaagagcacgaccaacaucaugaucaccaccaucaucaucgucaucaucgugauccugcugucccucaucgccguggggcugcugcucuacugcaaggcccggagcacgcccgucacccuguccaaggaccagcugagcggcaucaacaacaucgcguucuccaacugaggacuaguaauaaggaaacuguaugaaugucugugggcaggaagugaagagauccuucuguaaagguuuuuggaauuaugucugcugaauaauaaacuuuuuugaaauaauaaaucugguagaaaaaugagaucuaaaaaaaaaaaaaaaaaaaaaaaaaaaaaaaaaaaaaaaaaaaaaaaaaaaaaaaaaaaaaaaaugcaucccccccccccccccccccccccccccccccaaaggcucuuuucagagccaccagaauu

SEQ ID NO: 1188 - RNA, 2087 nt, Artificial Sequence
  mRNA product Design g-5 comprising derived and/or modified sequence from HRSV(A2)__F0_DSCav1 (opt1)
gggagacccgugacccggaaguuguacggcuacgcgacuuucccucccacaaacccucgcgcccuuccuuuccuacuugggcccggcagaaagcuuaccauggagcugcucauccugaaggccaacgccaucaccaccauccugacggcggugaccuucugcuucgccagcggccagaacaucaccgaggaguucuaccaguccacgugcagcgccgucuccaagggguaccucagcgcccugcgcaccggcugguacaccuccgugaucaccaucgagcugagcaacaucaaggagaacaagugcaacgggaccgacgccaaggugaagcucaucaagcaggagcuggacaaguacaagaacgcggucacggagcugcagcuccugaugcaguccacccccgccaccaacaaccgggcccgccgggagcugccgcgcuucaugaacuacacccucaacaacgccaagaagacgaacgugacccugagcaagaagcggaagcgccgguuccugggcuuccuccugggggugggcuccgcgaucgccagcggcgucgccgugugcaaggugcugcaccucgagggggaggucaacaagaucaaguccgcccugcugagcaccaacaaggccguggugucccucagcaacggcgucuccgugcugaccuucaaggugcuggaccucaagaacuacaucgacaagcagcugcugcccauccucaacaagcagagcugcuccaucagcaacaucgagacggucaucgaguuccagcagaagaacaaccgccugcuggagaucacccgggaguucuccgugaacgcgggggugaccacccccgucagcacguacaugcucaccaacagcgagcugcugucccucaucaacgacaugcccaucaccaacgaccagaagaagcugaugagcaacaacgugcagaucgugcgccagcaguccuacagcaucaugugcaucaucaaggaggagguccuggccuacguggugcagcucccgcuguacggcgucaucgacacccccugcuggaagcugcacacgagcccccucugcaccaccaacaccaaggaggggagcaacaucugccugacgcggaccgaccgcggcugguacugcgacaacgccggcuccgugagcuucuucccccaggccgagaccugcaagguccaguccaaccggguguucugcgacaccaugaacagccugacgcucccguccgaggugaaccugugcaacgucgacaucuucaaccccaaguacgacugcaagaucaugaccagcaagaccgacguguccagcuccgugaucaccagccugggggccaucgucuccugcuacggcaagacgaagugcaccgcgagcaacaagaaccgcgggaucaucaagaccuucuccaacggcugcgacuacgugagcaacaagggcguggacaccgucagcguggggaacacccucuacuacgugaacaagcaggagggcaagucccuguacgucaagggggagcccaucaucaacuucuacgacccccugguguucccgagcgacgaguucgacgccuccaucagccaggugaacgagaagaucaaccagucccucgccuucauccggaaguccgacgagcugcugcacaacgucaacgccggcaaguccacgaccaacaucaugaucaccaccaucaucaucgugaucaucgugauccugcucagccugaucgccgucgggcugcuccuguacugcaaggcgcgcuccacgcccgugacccugagcaaggaccagcucuccggcaucaacaacaucgccuucagcaacugaggacuaguaauaaggaaacuguaugaaugucugugggcaggaagugaagagauccuucuguaaagguuuuuggaauuaugucugcugaauaauaaacuuuuuugaaauaauaaaucugguagaaaaaugagaucuaaaaaaaaaaaaaaaaaaaaaaaaaaaaaaaaaaaaaaaaaaaaaaaaaaaaaaaaaaaaaaaaugcaucccccccccccccccccccccccccccccccaaaggcucuuuucagagccaccagaauu

SEQ ID NO: 1189 - RNA, 2087 nt, Artificial Sequence
  mRNA product Design g-5 comprising derived and/or modified sequence from HRSV(A2)__F0_DSCav1 (opt2)
gggagacccgugacccggaaguuguacggcuacgcgacuuucccucccacaaacccucgcgcccuuccuuuccuacuugggcccggcagaaagcuuaccauggagcuccucauccucaaggccaacgccaucaccaccauccucaccgccgucaccuucugcuucgccuccggccagaacaucaccgaggaguucuaccaguccaccugcuccgccgucuccaagggcuaccucuccgcccuccgcaccggcugguacaccuccgucaucaccaucgagcucuccaacaucaaggagaacaagugcaacggcaccgacgccaaggucaagcucaucaagcaggagcucgacaaguacaagaacgccgucaccgagcuccagcuccucaugcaguccacccccgccaccaacaaccgcgcccgccgcgagcucccccgcuucaugaacuacacccucaacaacgccaagaagaccaacgucacccucuccaagaagcgcaagcgccgcuuccucggcuuccuccucggcgucggcuccgccaucgccuccggcgucgccgucugcaagguccuccaccucgagggcgaggucaacaagaucaaguccgcccuccucuccaccaacaaggccgucgucucccucuccaacggcgucuccguccucaccuucaagguccucgaccucaagaacuacaucgacaagcagcuccuccccauccucaacaagcaguccugcuccaucuccaacaucgagaccgucaucgaguuccagcagaagaacaaccgccuccucgagaucacccgcgaguucuccgucaacgccggcgucaccacccccgucuccaccuacaugcucaccaacuccgagcuccucucccucaucaacgacaugcccaucaccaacgaccagaagaagcucauguccaacaacguccagaucguccgccagcaguccuacuccaucaugugcaucaucaaggaggagguccucgccuacgucguccagcucccccucuacggcgucaucgacacccccugcuggaagcuccacaccuccccccucugcaccaccaacaccaaggagggcuccaacaucugccucacccgcaccgaccgcggcugguacugcgacaacgccggcuccgucuccuucuucccccaggccgagaccugcaagguccaguccaaccgcgucuucugcgacaccaugaacucccucacccuccccuccgaggucaaccucugcaacgucgacaucuucaaccccaaguacgacugcaagaucaugaccuccaagaccgacgucuccuccuccgucaucaccucccucggcgccaucgucuccugcuacggcaagaccaagugcaccgccuccaacaagaaccgcggcaucaucaagaccuucuccaacggcugcgacuacgucuccaacaagggcgucgacaccgucuccgucggcaacacccucuacuacgucaacaagcaggagggcaagucccucuacgucaagggcgagcccaucaucaacuucuacgacccccucgucuuccccuccgacgaguucgacgccuccaucucccaggucaacgagaagaucaaccagucccucgccuucauccgcaaguccgacgagcuccuccacaacgucaacgccggcaaguccaccaccaacaucaugaucaccaccaucaucaucgucaucaucgucauccuccucucccucaucgccgucggccuccuccucuacugcaaggcccgcuccacccccgucacccucuccaaggaccagcucuccggcaucaacaacaucgccuucuccaacugaggacuaguaauaaggaaacuguaugaaugucugugggcaggaagugaagagauccuucuguaaagguuuuuggaauuaugucugcugaauaauaaacuuuuuugaaauaauaaaucugguagaaaaaugagaucuaaaaaaaaaaaaaaaaaaaaaaaaaaaaaaaaaaaaaaaaaaaaaaaaaaaaaaaaaaaaaaaaugcaucccccccccccccccccccccccccccccccaaaggcucuuuucagagccaccagaauu

SEQ ID NO: 1190 - RNA, 2087 nt, Artificial Sequence
  mRNA product Design g-5 comprising derived and/or modified sequence from HRSV(A2)__F0_DSCav1 (opt3)
gggagacccgugacccggaaguuguacggcuacgcgacuuucccucccacaaacccucgcgcccuuccuuuccuacuugggcccggcagaaagcuuaccauggagcugcucauccuuaaggccaacgcuauuaccacaauacugacugcagugacguucugcuuugccagcggccagaauaucaccgaagaguucuaccaauccacauguucugcggucucaaaaggguauuugagugcuuuaagaacuggaugguacaccagcguuauuacaaucgaacuguccaacauuaaggagaauaaaugcaacgguaccgacgccaaggugaaacuaaucaagcaggaacucgauaaguauaaaaaugcaguaacugagcugcagcuucugaugcagucuacacccgccaccaacaauagggcucggcgcgaguugccucgauuuaugaacuacacgcucaauaacgcaaagaaaacuaaugugacccugucgaagaaacguaagagaagguuccugggcuuucucuuaggggucggaucagccauagcuagcggcguggccguuuguaaggugcugcaccuugaaggugaggucaacaaaaucaagagugcguugcuguccacaaauaaagcagugguaucucuaagcaacgggguuuccgugcucacuuucaagguccuggaccuuaaaaauuauauugauaagcaacuguugccaauccucaacaaacagucaugcaguauuagcaacaucgaaaccgugauagaguuucagcagaagaauaaccggcuguuagagauuacacgcgaguucucugugaaugccggagucaccacgccgguuuccacuuacaugcugacaaacucagaacuccuuagccugaucaaugacaugcccauuaccaacgaucaaaagaaauugaugaguaauaacgugcagaucguaagacagcagucuuauuccaucauguguauuauaaaggaagaggugcuagcuuacgucgugcaacugccucucuacggcguuaucgacacuccaugcuggaaacugcauacaagcccccuuuguaccacgaauaccaaggaaggcucgaacauuugccugacaaggacugaucgggggugguauugugacaaugccggaucuguguccuuuuucccucaggcagagaccugcaaaguccagucaaaccgcguguuuugugauacaaugaauaguuugacucucccaagcgagguaaaccugugcaauguugacaucuucaaccccaaguacgauugcaagauaaugaccuccaaaacagacgugucuagcucagucauuaccaguuuaggugcuaucguguccuguuauggcaagacuaaaugcacggccagcaacaagaaucgagggaucauuaaaacauuuucuaacggaugugauuacgucucaaauaagggcguggacaccguuaguguggguaacacucuguauuacguaaauaagcaagaagggaaaagccuauaugucaagggagagccuaucauuaacuucuacgacccacucguguucccguccgaugaauuugacgcgucuauaucgcagguuaaugagaaaaucaaccagagccuggccuucauuagaaaguccgaugaacuuuugcacaaugugaacgcaggcaaaucaaccacaaauaucaugaucaccacuauuauaaucgucauuaucgugauucugcucagucugaucgcuguaggccuucuguuguacugcaaggccaggucuacacccgugacgcucagcaaggaccagcuguccgggauaaacaauaucgcuuuuucaaacugaggacuaguaauaaggaaacuguaugaaugucugugggcaggaagugaagagauccuucuguaaagguuuuuggaauuaugucugcugaauaauaaacuuuuuugaaauaauaaaucugguagaaaaaugagaucuaaaaaaaaaaaaaaaaaaaaaaaaaaaaaaaaaaaaaaaaaaaaaaaaaaaaaaaaaaaaaaaaugcaucccccccccccccccccccccccccccccccaaaggcucuuuucagagccaccagaauu

SEQ ID NO: 1191 - RNA, 2087 nt, Artificial Sequence
  mRNA product Design g-5 comprising derived and/or modified sequence from HRSV(A2)__F0_DSCav1 (opt4)
gggagacccgugacccggaaguuguacggcuacgcgacuuucccucccacaaacccucgcgcccuuccuuuccuacuugggcccggcagaaagcuuaccauggagcugcugauccugaaggccaacgccaucaccaccauccugaccgccgugaccuucugcuucgccagcggccagaacaucaccgaggaguucuaccagagcaccugcagcgccgugagcaagggcuaccugagcgcccugagaaccggcugguacaccagcgugaucaccaucgagcugagcaacaucaaggagaacaagugcaacggcaccgacgccaaggugaagcugaucaagcaggagcuggacaaguacaagaacgccgugaccgagcugcagcugcugaugcagagcacccccgccaccaacaacagagccagaagagagcugcccagauucaugaacuacacccugaacaacgccaagaagaccaacgugacccugagcaagaagagaaagagaagauuccugggcuuccugcugggcgugggcagcgccaucgccagcggcguggccgugugcaaggugcugcaccuggagggcgaggugaacaagaucaagagcgcccugcugagcaccaacaaggccguggugagccugagcaacggcgugagcgugcugaccuucaaggugcuggaccugaagaacuacaucgacaagcagcugcugcccauccugaacaagcagagcugcagcaucagcaacaucgagaccgugaucgaguuccagcagaagaacaacagacugcuggagaucaccagagaguucagcgugaacgccggcgugaccacccccgugagcaccuacaugcugaccaacagcgagcugcugagccugaucaacgacaugcccaucaccaacgaccagaagaagcugaugagcaacaacgugcagaucgugagacagcagagcuacagcaucaugugcaucaucaaggaggaggugcuggccuacguggugcagcugccccuguacggcgugaucgacacccccugcuggaagcugcacaccagcccccugugcaccaccaacaccaaggagggcagcaacaucugccugaccagaaccgacagaggcugguacugcgacaacgccggcagcgugagcuucuucccccaggccgagaccugcaaggugcagagcaacagaguguucugcgacaccaugaacagccugacccugcccagcgaggugaaccugugcaacguggacaucuucaaccccaaguacgacugcaagaucaugaccagcaagaccgacgugagcagcagcgugaucaccagccugggcgccaucgugagcugcuacggcaagaccaagugcaccgccagcaacaagaacagaggcaucaucaagaccuucagcaacggcugcgacuacgugagcaacaagggcguggacaccgugagcgugggcaacacccuguacuacgugaacaagcaggagggcaagagccuguacgugaagggcgagcccaucaucaacuucuacgacccccugguguuccccagcgacgaguucgacgccagcaucagccaggugaacgagaagaucaaccagagccuggccuucaucagaaagagcgacgagcugcugcacaacgugaacgccggcaagagcaccaccaacaucaugaucaccaccaucaucaucgugaucaucgugauccugcugagccugaucgccgugggccugcugcuguacugcaaggccagaagcacccccgugacccugagcaaggaccagcugagcggcaucaacaacaucgccuucagcaacugaggacuaguaauaaggaaacuguaugaaugucugugggcaggaagugaagagauccuucuguaaagguuuuuggaauuaugucugcugaauaauaaacuuuuuugaaauaauaaaucugguagaaaaaugagaucuaaaaaaaaaaaaaaaaaaaaaaaaaaaaaaaaaaaaaaaaaaaaaaaaaaaaaaaaaaaaaaaaugcaucccccccccccccccccccccccccccccccaaaggcucuuuucagagccaccagaauu

SEQ ID NO: 1192 - RNA, 2087 nt, Artificial Sequence
  mRNA product Design g-5 comprising derived and/or modified sequence from HRSV(A2)__F0_DSCav1 (opt5)
gggagacccgugacccggaaguuguacggcuacgcgacuuucccucccacaaacccucgcgcccuuccuuuccuacuugggcccggcagaaagcuuaccauggagcugcucauccugaaggccaacgcuauuaccacaauccuuacggccgugaccuucugcuuugcgagcggccagaauauuacagaagaguucuaccaauccaccuguucugcugucagcaaaggguaucuguccgcccucagaacaggaugguacaccucuguuaucacaauugaacugagcaacaucaaggagaauaaaugcaacggcaccgacgccaaggugaaacuuaucaagcaggaacuggauaaguauaaaaaugcugugacggagcuccagcugcugaugcaguccacccccgccacaaacaaucgggcucgcagagagcucccucgguuuaugaacuacacccugaauaacgccaagaaaacaaaugucacccuuucuaagaaacgcaagagacgguuccugggguuucuccugggagugggcagcgcgauugccuccgggguugcuguguguaagguccuucaccuggaaggagaggugaacaaaaucaagagcgcccuccugucuacgaauaaagcuguugugucccugagcaacggcgucucugugcucacauucaaggugcuggaccuuaaaaauuauauugauaagcaacugcucccgauccugaacaaacaguccugcagcauuucuaacaucgaaaccgucauugaguuucagcagaagaauaaccgccuucuggagaucacaagagaauuuuccguuaaugccggcgugaccacccccgugagcacauacaugcucacgaacuccgagcugcugucucucaucaaugacaugccuauuaccaacgaucaaaagaaacugaugagcaauaacguccagaucgugcggcagcaguccuauagcauuauguguaucauuaaggaagagguucuugcguacgugguccaacugccccucuacggggugaucgacacaccuugcuggaaacugcauaccucuccccuuuguacaaccaauacgaaggaaggauccaacaucugccugacacgcaccgauagaggcugguauugugacaaugccgggagcguuucuuucuucccucaggcugagaccugcaaagugcagagcaaccgggucuuuugugauacaaugaacucccucacccugccgucugaggugaaucugugcaaugucgacauuuucaaccccaaguacgauugcaagaucaugacaagcaaaacggacguguccagcucuguuauuaccucccucggagccaucgugagcuguuauggcaagacaaaaugcaccgcuucuaacaagaaucgcgggauuaucaaaacauuuuccaacggaugugauuacgucagcaauaagggcguggacaccguuuccgugggcaacacgcuguauuacgucaauaagcaagaagggaaaucucuuuaugugaagggagagccuaucauuaacuucuacgacccccugguguucccuagcgaugaauuugacgccuccaucucucagguuaaugagaaaauuaaccagagccucgccuucaucagaaaguccgaugaacugcugcacaaugucaacgcuggcaaaagcaccacaaauauuaugaucaccacaauuaucaucgugauuaucgugauucuucucucucugaucgcggucgggcugcuccuguacugcaaggcccgguccacccccgugacgcuuagcaaggaccagcugucuggaauuaacaauaucgcuuuuuccaacugaggacuaguaauaaggaaacuguaugaaugucugugggcaggaagugaagagauccuucuguaaagguuuuuggaauuaugucugcugaauaauaaacuuuuuugaaauaauaaaucugguagaaaaaugagaucuaaaaaaaaaaaaaaaaaaaaaaaaaaaaaaaaaaaaaaaaaaaaaaaaaaaaaaaaaaaaaaaaugcaucccccccccccccccccccccccccccccccaaaggcucuuuucagagccaccagaauu

SEQ ID NO: 1193 - RNA, 2087 nt, Artificial Sequence
  mRNA product Design g-5 comprising derived and/or modified sequence from HRSV(A2)__F0_DSCav1 (opt6)
gggagacccgugacccggaaguuguacggcuacgcgacuuucccucccacaaacccucgcgcccuuccuuuccuacuugggcccggcagaaagcuuaccauggaauuauuaauccucaaagcgaacgcuauuacuaccauucuaacagcagucacauucugcuucgccucaggccaaaacauuacagaagaauuuuaccaaucaacaugcucugccguaucaaaaggcuaccuauccgcccuacgaacaggcugguacacaagcguaauaacaaucgaacuaucaaacauaaaagaaaacaaaugcaacgguacagacgccaaaguuaaacuaauaaaacaagaacucgauaaauacaaaaacgcaguaacagaauuacaacuacuaaugcaaucaacaccugcaacaaacaauagagccaggagagaauuaccucgauucaugaauuacacacucaauaacgcaaaaaaaaccaacguuacacuaucaaaaaaaagaaaacgacgauucuuaggauuccuacucggagucggaucagcaauagcaucuggcguugcaguaugcaaaguauuacacuuagaaggugaagucaauaaaauaaaaagcgcgcuacuaaguacaaacaaagcagucgucucccuaucaaacggagucucaguccuaacauucaaaguacucgaccuaaaaaauuacauagauaaacaacuacuuccaauauuaaacaaacaauccuguagcaucagcaauauagaaacaguaauagaauuucaacaaaaaaacaaccgauuauuagaaaucacucgagaauuuuccguaaacgccgggguaacaacuccagucucaaccuacaugcuaaccaauucagaacuauugagcuuaauaaacgacaugccaauaaccaacgaccaaaaaaaacuaaugucuaacaauguucaaaucgucagacaacaaaguuacaguauaauguguauaaucaaagaagaaguccuagcauacguaguccaacucccacuauauggaguuaucgacacaccauguuggaaauuacacaccucaccauuaugcacaaccaauacaaaagaaggaucaaacauaugccuuacacggacagaccgcggaugguauugugacaacgcuggcucagucuccuuuuucccacaagcagaaacaugcaaaguacaaucaaacagagucuuuugcgauaccaugaacucacuuacauuaccaagcgaaguaaaucuuuguaacgucgacaucuucaauccuaaauaugacugcaaaaucaugaccucaaaaacagacguuagcucuucaguaaucacuagcuuaggagcaaucguaucaugcuacggcaaaacaaaauguacagcaucaaauaaaaacagaggaaucauaaaaacauuuucaaacggaugcgauuauguaagcaacaaaggaguagauacuguaagcguaggaaacacauuguacuauguaaacaaacaagaaggaaaaucacucuauguaaaaggagaaccuauaaucaauuucuacgauccauuaguguucccaucagaugaauuugacgccucaauaucacaaguuaaugaaaaaauaaaucaaucgcuagcauucauacguaaaucagaugaauuacuacauaacguaaacgcaggcaaauccacaacaaauaucaugaucacaacaauuauaauaguaauaauaguaauacuacuaucacuaauagccguaggacuccuacuauacugcaaagcaagaucuacuccaguaacccucucaaaagaucaacuaagcggaauuaauaacaucgcauucagcaacuaaggacuaguaauaaggaaacuguaugaaugucugugggcaggaagugaagagauccuucuguaaagguuuuuggaauuaugucugcugaauaauaaacuuuuuugaaauaauaaaucugguagaaaaaugagaucuaaaaaaaaaaaaaaaaaaaaaaaaaaaaaaaaaaaaaaaaaaaaaaaaaaaaaaaaaaaaaaaaugcaucccccccccccccccccccccccccccccccaaaggcucuuuucagagccaccagaauu

SEQ ID NO: 1194 - RNA, 2087 nt, Artificial Sequence
  mRNA product Design g-5 comprising derived and/or modified sequence from HRSV(A2)__F0_DSCav1 (opt11)
gggagacccgugacccggaaguuguacggcuacgcgacuuucccucccacaaacccucgcgcccuuccuuuccuacuugggcccggcagaaagcuuaccauggaacuacuuauccucaaagccaacgccaucaccaccauccucacagcaguaaccuuuugcuucgccucaggccaaaauaucacagaagaauuuuaccagaguaccugcuccgccguauccaaaggauaccucagcgcgcuccgcaccggcugguacacuucaguaaucacaaucgaacuauccaacaucaaagaaaacaaaugcaacggcaccgacgcgaaagucaaacucaucaaacaagaacuagacaaauacaaaaaugccguaacagaacuacaacuguuaaugcagagcacacccgccaccaacaaccgcgcccgccgggaacucccccgauucaugaacuacacacucaacaacgccaaaaagacgaacgucacccucagcaagaaacgaaaacgcagauuccucgguuuccuacuaggcguaggcucagcaauagccuccggaguagccgucugcaaaguccugcacuuagaaggcgaagucaacaaaaucaaauccgcccuacucuccacgaacaaagccgucgucucccuguccaacggugucuccguuuuaaccuucaaaguucuggaccucaaaaacuacauagacaaacagcuucuccccauccucaacaaacaauccuguagcaucuccaacaucgaaaccgucauagaauuucaacagaaaaacaacagacugcucgaaaucacccgcgaguucuccgucaacgccggcgucacgacucccgucuccaccuauaugcucacgaacucggaacuccuuucccuaaucaacgacaugccgaucaccaacgaccaaaagaaacucaugucaaacaacguacaaauuguccgccaacaaucauacuccaucaugugcauaauuaaagaagaaguccucgcauacguaguccaacucccccucuacggcgucaucgacacccccugcuggaaacuccacaccuccccacucugcacaaccaacaccaaagaaggcucaaacauaugccuaacgcgcaccgaucgcgguugguacugcgacaacgccgguuccgucagcuucuucccccaagcagagacaugcaaaguccaaucaaaccgcgucuucugcgacaccaugaacucacuaacccuuccaagcgaagucaaccucugcaacguugacaucuucaaccccaaauacgacuguaaaaucaugaccuccaagaccgacguauccucuuccgucaucacaucccuaggcgcuaucguauccugcuaugguaaaaccaaaugcaccgccuccaacaaaaaccgcggcaucaucaagacauuuuccaacggcugcgacuacgugagcaacaaaggcgucgacaccgucuccguaggcaacacccucuacuauguaaacaaacaagagggcaaaucacucuacgucaaaggggaacccaucaucaacuucuacgacccgcucguauuccccagcgaugaguucgacgccuccaucucccaggucaacgaaaagauaaaccaaucacucgcauucauucguaaauccgacgaacuccuacacaacgugaaugcaggcaaaucgaccacuaacaucaugaucaccaccaucaucaucgucaucauagucauccuccugucccuuaucgccgucggucuuuuauuauacugcaaagcccgcagcacccccgucacccucucuaaggaccaacucagcggcaucaauaacaucgcauucucuaacuaaggacuaguaauaaggaaacuguaugaaugucugugggcaggaagugaagagauccuucuguaaagguuuuuggaauuaugucugcugaauaauaaacuuuuuugaaauaauaaaucugguagaaaaaugagaucuaaaaaaaaaaaaaaaaaaaaaaaaaaaaaaaaaaaaaaaaaaaaaaaaaaaaaaaaaaaaaaaaugcaucccccccccccccccccccccccccccccccaaaggcucuuuucagagccaccagaauu

SEQ ID NO: 1195 - RNA, 2103 nt, Artificial Sequence
  mRNA product Design h-1 comprising derived and/or modified sequence from HRSV(A2)__F0_DSCav1 (opt1)
gggagacccgugacccggaaguuguacggcuacgcgacuuucccucccacaaacccucgcgcccuuccuuuccuacuugggcccggcagaaagcuuaccauggagcugcucauccugaaggccaacgccaucaccaccauccugacggcggugaccuucugcuucgccagcggccagaacaucaccgaggaguucuaccaguccacgugcagcgccgucuccaagggguaccucagcgcccugcggaccggcugguacaccuccgugaucaccaucgagcugagcaacaucaaggagaacaagugcaacgggaccgacgccaaggugaagcucaucaagcaggagcuggacaaguacaagaacgcggucacggagcugcagcuccugaugcaguccaccccggcaaccaacaaccgcgcccggcgcgagcugccccgguucaugaacuacacccucaacaacgccaagaagacgaacgugacccugagcaagaagcgcaagcggcgcuuccugggcuuccuccugggggugggcuccgccaucgcgagcggcgucgccgugugcaaggugcugcaccucgagggggaggucaacaagaucaagagcgcccugcuguccaccaacaaggccguggugagccucuccaacggcgucagcgugcugaccuucaaggugcuggaccucaagaacuacaucgacaagcagcugcugcccauccugaacaagcagagcugcuccaucagcaacaucgagacggugaucgaguuccagcagaagaacaaccggcuccuggagaucacccgcgaguucagcgugaacgccggggucaccacccccguguccacguacaugcugaccaacagcgagcuccugucccugaucaacgacaugccgaucaccaacgaccagaagaagcucaugagcaacaacgugcagaucguccggcagcaguccuacagcaucaugugcaucaucaaggaggaggugcuggcguacgugguccagcugccccucuacggcgugaucgacacccccugcuggaagcugcacacgagcccccugugcaccaccaacaccaaggagggguccaacaucugccucacgcgcaccgaccggggcugguacugcgacaacgccggcagcgucuccuucuucccgcaggccgagaccugcaaggugcagagcaaccgcguguucugcgacaccaugaacucccugacgcugcccagcgagguaaaccucugcaacgucgacaucuucaaccccaaguacgacugcaagaucaugaccuccaagaccgacgugagcuccagcgugaucaccucccugggggccaucgucagcugcuacggcaagacgaagugcaccgccagcaacaagaaccgggggaucaucaagaccuucuccaacggcugcgacuacgugagcaacaagggcguggacaccguguccgucgggaacacccuguacuacgugaacaagcaggagggcaagagccucuacgugaagggggagcccaucaucaacuucuacgacccgcuggucuuccccuccgacgaguucgacgcgagcaucucccaggugaacgagaagaucaaccagagccuggccuucauccgcaaguccgacgagcugcuccacaacgugaacgccggcaagagcacgaccaacaucaugaucaccaccaucaucaucgucaucaucgugauccugcugucccucaucgccguggggcugcugcucuacugcaaggcccggagcacgcccgucacccuguccaaggaccagcugagcggcaucaacaacaucgcguucuccaacugaggacuaguacuggcugcaucucccuuuccucuguccuccauccuucucccaggauggugaagggggaccugguacccagugauccccaccccaggauccuaaaucaugacuuaccugcuaauaaaaacucauuggaaaagugagaagaucuaaaaaaaaaaaaaaaaaaaaaaaaaaaaaaaaaaaaaaaaaaaaaaaaaaaaaaaaaaaaaaaaugcaucccccccccccccccccccccccccccccccaaaggcucuuuucagagccaccagaauu

SEQ ID NO: 1196 - RNA, 2103 nt, Artificial Sequence
  mRNA product Design h-1 comprising derived and/or modified sequence from HRSV(A2)__F0_DSCav1 (opt1)
gggagacccgugacccggaaguuguacggcuacgcgacuuucccucccacaaacccucgcgcccuuccuuuccuacuugggcccggcagaaagcuuaccauggagcugcucauccugaaggccaacgccaucaccaccauccugacggcggugaccuucugcuucgccagcggccagaacaucaccgaggaguucuaccaguccacgugcagcgccgucuccaagggguaccucagcgcccugcgcaccggcugguacaccuccgugaucaccaucgagcugagcaacaucaaggagaacaagugcaacgggaccgacgccaaggugaagcucaucaagcaggagcuggacaaguacaagaacgcggucacggagcugcagcuccugaugcaguccacccccgccaccaacaaccgggcccgccgggagcugccgcgcuucaugaacuacacccucaacaacgccaagaagacgaacgugacccugagcaagaagcggaagcgccgguuccugggcuuccuccugggggugggcuccgcgaucgccagcggcgucgccgugugcaaggugcugcaccucgagggggaggucaacaagaucaaguccgcccugcugagcaccaacaaggccguggugucccucagcaacggcgucuccgugcugaccuucaaggugcuggaccucaagaacuacaucgacaagcagcugcugcccauccucaacaagcagagcugcuccaucagcaacaucgagacggucaucgaguuccagcagaagaacaaccgccugcuggagaucacccgggaguucuccgugaacgcgggggugaccacccccgucagcacguacaugcucaccaacagcgagcugcugucccucaucaacgacaugcccaucaccaacgaccagaagaagcugaugagcaacaacgugcagaucgugcgccagcaguccuacagcaucaugugcaucaucaaggaggagguccuggccuacguggugcagcucccgcuguacggcgucaucgacacccccugcuggaagcugcacacgagcccccucugcaccaccaacaccaaggaggggagcaacaucugccugacgcggaccgaccgcggcugguacugcgacaacgccggcuccgugagcuucuucccccaggccgagaccugcaagguccaguccaaccggguguucugcgacaccaugaacagccugacgcucccguccgaggugaaccugugcaacgucgacaucuucaaccccaaguacgacugcaagaucaugaccagcaagaccgacguguccagcuccgugaucaccagccugggggccaucgucuccugcuacggcaagacgaagugcaccgcgagcaacaagaaccgcgggaucaucaagaccuucuccaacggcugcgacuacgugagcaacaagggcguggacaccgucagcguggggaacacccucuacuacgugaacaagcaggagggcaagucccuguacgucaagggggagcccaucaucaacuucuacgacccccugguguucccgagcgacgaguucgacgccuccaucagccaggugaacgagaagaucaaccagucccucgccuucauccggaaguccgacgagcugcugcacaacgucaacgccggcaaguccacgaccaacaucaugaucaccaccaucaucaucgugaucaucgugauccugcucagccugaucgccgucgggcugcuccuguacugcaaggcgcgcuccacgcccgugacccugagcaaggaccagcucuccggcaucaacaacaucgccuucagcaacugaggacuaguacuggcugcaucucccuuuccucuguccuccauccuucucccaggauggugaagggggaccugguacccagugauccccaccccaggauccuaaaucaugacuuaccugcuaauaaaaacucauuggaaaagugagaagaucuaaaaaaaaaaaaaaaaaaaaaaaaaaaaaaaaaaaaaaaaaaaaaaaaaaaaaaaaaaaaaaaaugcaucccccccccccccccccccccccccccccccaaaggcucuuuucagagccaccagaauu

SEQ ID NO: 1197 - RNA, 2103 nt, Artificial Sequence
  mRNA product Design h-1 comprising derived and/or modified sequence from HRSV(A2)__F0_DSCav1 (opt2)
gggagacccgugacccggaaguuguacggcuacgcgacuuucccucccacaaacccucgcgcccuuccuuuccuacuugggcccggcagaaagcuuaccauggagcuccucauccucaaggccaacgccaucaccaccauccucaccgccgucaccuucugcuucgccuccggccagaacaucaccgaggaguucuaccaguccaccugcuccgccgucuccaagggcuaccucuccgcccuccgcaccggcugguacaccuccgucaucaccaucgagcucuccaacaucaaggagaacaagugcaacggcaccgacgccaaggucaagcucaucaagcaggagcucgacaaguacaagaacgccgucaccgagcuccagcuccucaugcaguccacccccgccaccaacaaccgcgcccgccgcgagcucccccgcuucaugaacuacacccucaacaacgccaagaagaccaacgucacccucuccaagaagcgcaagcgccgcuuccucggcuuccuccucggcgucggcuccgccaucgccuccggcgucgccgucugcaagguccuccaccucgagggcgaggucaacaagaucaaguccgcccuccucuccaccaacaaggccgucgucucccucuccaacggcgucuccguccucaccuucaagguccucgaccucaagaacuacaucgacaagcagcuccuccccauccucaacaagcaguccugcuccaucuccaacaucgagaccgucaucgaguuccagcagaagaacaaccgccuccucgagaucacccgcgaguucuccgucaacgccggcgucaccacccccgucuccaccuacaugcucaccaacuccgagcuccucucccucaucaacgacaugcccaucaccaacgaccagaagaagcucauguccaacaacguccagaucguccgccagcaguccuacuccaucaugugcaucaucaaggaggagguccucgccuacgucguccagcucccccucuacggcgucaucgacacccccugcuggaagcuccacaccuccccccucugcaccaccaacaccaaggagggcuccaacaucugccucacccgcaccgaccgcggcugguacugcgacaacgccggcuccgucuccuucuucccccaggccgagaccugcaagguccaguccaaccgcgucuucugcgacaccaugaacucccucacccuccccuccgaggucaaccucugcaacgucgacaucuucaaccccaaguacgacugcaagaucaugaccuccaagaccgacgucuccuccuccgucaucaccucccucggcgccaucgucuccugcuacggcaagaccaagugcaccgccuccaacaagaaccgcggcaucaucaagaccuucuccaacggcugcgacuacgucuccaacaagggcgucgacaccgucuccgucggcaacacccucuacuacgucaacaagcaggagggcaagucccucuacgucaagggcgagcccaucaucaacuucuacgacccccucgucuuccccuccgacgaguucgacgccuccaucucccaggucaacgagaagaucaaccagucccucgccuucauccgcaaguccgacgagcuccuccacaacgucaacgccggcaaguccaccaccaacaucaugaucaccaccaucaucaucgucaucaucgucauccuccucucccucaucgccgucggccuccuccucuacugcaaggcccgcuccacccccgucacccucuccaaggaccagcucuccggcaucaacaacaucgccuucuccaacugaggacuaguacuggcugcaucucccuuuccucuguccuccauccuucucccaggauggugaagggggaccugguacccagugauccccaccccaggauccuaaaucaugacuuaccugcuaauaaaaacucauuggaaaagugagaagaucuaaaaaaaaaaaaaaaaaaaaaaaaaaaaaaaaaaaaaaaaaaaaaaaaaaaaaaaaaaaaaaaaugcaucccccccccccccccccccccccccccccccaaaggcucuuuucagagccaccagaauu

SEQ ID NO: 1198 - RNA, 2103 nt, Artificial Sequence
  mRNA product Design h-1 comprising derived and/or modified sequence from HRSV(A2)__F0_DSCav1 (opt3)
gggagacccgugacccggaaguuguacggcuacgcgacuuucccucccacaaacccucgcgcccuuccuuuccuacuugggcccggcagaaagcuuaccauggagcugcucauccuuaaggccaacgcuauuaccacaauacugacugcagugacguucugcuuugccagcggccagaauaucaccgaagaguucuaccaauccacauguucugcggucucaaaaggguauuugagugcuuuaagaacuggaugguacaccagcguuauuacaaucgaacuguccaacauuaaggagaauaaaugcaacgguaccgacgccaaggugaaacuaaucaagcaggaacucgauaaguauaaaaaugcaguaacugagcugcagcuucugaugcagucuacacccgccaccaacaauagggcucggcgcgaguugccucgauuuaugaacuacacgcucaauaacgcaaagaaaacuaaugugacccugucgaagaaacguaagagaagguuccugggcuuucucuuaggggucggaucagccauagcuagcggcguggccguuuguaaggugcugcaccuugaaggugaggucaacaaaaucaagagugcguugcuguccacaaauaaagcagugguaucucuaagcaacgggguuuccgugcucacuuucaagguccuggaccuuaaaaauuauauugauaagcaacuguugccaauccucaacaaacagucaugcaguauuagcaacaucgaaaccgugauagaguuucagcagaagaauaaccggcuguuagagauuacacgcgaguucucugugaaugccggagucaccacgccgguuuccacuuacaugcugacaaacucagaacuccuuagccugaucaaugacaugcccauuaccaacgaucaaaagaaauugaugaguaauaacgugcagaucguaagacagcagucuuauuccaucauguguauuauaaaggaagaggugcuagcuuacgucgugcaacugccucucuacggcguuaucgacacuccaugcuggaaacugcauacaagcccccuuuguaccacgaauaccaaggaaggcucgaacauuugccugacaaggacugaucgggggugguauugugacaaugccggaucuguguccuuuuucccucaggcagagaccugcaaaguccagucaaaccgcguguuuugugauacaaugaauaguuugacucucccaagcgagguaaaccugugcaauguugacaucuucaaccccaaguacgauugcaagauaaugaccuccaaaacagacgugucuagcucagucauuaccaguuuaggugcuaucguguccuguuauggcaagacuaaaugcacggccagcaacaagaaucgagggaucauuaaaacauuuucuaacggaugugauuacgucucaaauaagggcguggacaccguuaguguggguaacacucuguauuacguaaauaagcaagaagggaaaagccuauaugucaagggagagccuaucauuaacuucuacgacccacucguguucccguccgaugaauuugacgcgucuauaucgcagguuaaugagaaaaucaaccagagccuggccuucauuagaaaguccgaugaacuuuugcacaaugugaacgcaggcaaaucaaccacaaauaucaugaucaccacuauuauaaucgucauuaucgugauucugcucagucugaucgcuguaggccuucuguuguacugcaaggccaggucuacacccgugacgcucagcaaggaccagcuguccgggauaaacaauaucgcuuuuucaaacugaggacuaguacuggcugcaucucccuuuccucuguccuccauccuucucccaggauggugaagggggaccugguacccagugauccccaccccaggauccuaaaucaugacuuaccugcuaauaaaaacucauuggaaaagugagaagaucuaaaaaaaaaaaaaaaaaaaaaaaaaaaaaaaaaaaaaaaaaaaaaaaaaaaaaaaaaaaaaaaaugcaucccccccccccccccccccccccccccccccaaaggcucuuuucagagccaccagaauu

SEQ ID NO: 1199 - RNA, 2103 nt, Artificial Sequence
  mRNA product Design h-1 comprising derived and/or modified sequence from HRSV(A2)__F0_DSCav1 (opt4)
gggagacccgugacccggaaguuguacggcuacgcgacuuucccucccacaaacccucgcgcccuuccuuuccuacuugggcccggcagaaagcuuaccauggagcugcugauccugaaggccaacgccaucaccaccauccugaccgccgugaccuucugcuucgccagcggccagaacaucaccgaggaguucuaccagagcaccugcagcgccgugagcaagggcuaccugagcgcccugagaaccggcugguacaccagcgugaucaccaucgagcugagcaacaucaaggagaacaagugcaacggcaccgacgccaaggugaagcugaucaagcaggagcuggacaaguacaagaacgccgugaccgagcugcagcugcugaugcagagcacccccgccaccaacaacagagccagaagagagcugcccagauucaugaacuacacccugaacaacgccaagaagaccaacgugacccugagcaagaagagaaagagaagauuccugggcuuccugcugggcgugggcagcgccaucgccagcggcguggccgugugcaaggugcugcaccuggagggcgaggugaacaagaucaagagcgcccugcugagcaccaacaaggccguggugagccugagcaacggcgugagcgugcugaccuucaaggugcuggaccugaagaacuacaucgacaagcagcugcugcccauccugaacaagcagagcugcagcaucagcaacaucgagaccgugaucgaguuccagcagaagaacaacagacugcuggagaucaccagagaguucagcgugaacgccggcgugaccacccccgugagcaccuacaugcugaccaacagcgagcugcugagccugaucaacgacaugcccaucaccaacgaccagaagaagcugaugagcaacaacgugcagaucgugagacagcagagcuacagcaucaugugcaucaucaaggaggaggugcuggccuacguggugcagcugccccuguacggcgugaucgacacccccugcuggaagcugcacaccagcccccugugcaccaccaacaccaaggagggcagcaacaucugccugaccagaaccgacagaggcugguacugcgacaacgccggcagcgugagcuucuucccccaggccgagaccugcaaggugcagagcaacagaguguucugcgacaccaugaacagccugacccugcccagcgaggugaaccugugcaacguggacaucuucaaccccaaguacgacugcaagaucaugaccagcaagaccgacgugagcagcagcgugaucaccagccugggcgccaucgugagcugcuacggcaagaccaagugcaccgccagcaacaagaacagaggcaucaucaagaccuucagcaacggcugcgacuacgugagcaacaagggcguggacaccgugagcgugggcaacacccuguacuacgugaacaagcaggagggcaagagccuguacgugaagggcgagcccaucaucaacuucuacgacccccugguguuccccagcgacgaguucgacgccagcaucagccaggugaacgagaagaucaaccagagccuggccuucaucagaaagagcgacgagcugcugcacaacgugaacgccggcaagagcaccaccaacaucaugaucaccaccaucaucaucgugaucaucgugauccugcugagccugaucgccgugggccugcugcuguacugcaaggccagaagcacccccgugacccugagcaaggaccagcugagcggcaucaacaacaucgccuucagcaacugaggacuaguacuggcugcaucucccuuuccucuguccuccauccuucucccaggauggugaagggggaccugguacccagugauccccaccccaggauccuaaaucaugacuuaccugcuaauaaaaacucauuggaaaagugagaagaucuaaaaaaaaaaaaaaaaaaaaaaaaaaaaaaaaaaaaaaaaaaaaaaaaaaaaaaaaaaaaaaaaugcaucccccccccccccccccccccccccccccccaaaggcucuuuucagagccaccagaauu

SEQ ID NO: 1200 - RNA, 2103 nt, Artificial Sequence
  mRNA product Design h-1 comprising derived and/or modified sequence from HRSV(A2)__F0_DSCav1 (opt5)
gggagacccgugacccggaaguuguacggcuacgcgacuuucccucccacaaacccucgcgcccuuccuuuccuacuugggcccggcagaaagcuuaccauggagcugcucauccugaaggccaacgcuauuaccacaauccuuacggccgugaccuucugcuuugcgagcggccagaauauuacagaagaguucuaccaauccaccuguucugcugucagcaaaggguaucuguccgcccucagaacaggaugguacaccucuguuaucacaauugaacugagcaacaucaaggagaauaaaugcaacggcaccgacgccaaggugaaacuuaucaagcaggaacuggauaaguauaaaaaugcugugacggagcuccagcugcugaugcaguccacccccgccacaaacaaucgggcucgcagagagcucccucgguuuaugaacuacacccugaauaacgccaagaaaacaaaugucacccuuucuaagaaacgcaagagacgguuccugggguuucuccugggagugggcagcgcgauugccuccgggguugcuguguguaagguccuucaccuggaaggagaggugaacaaaaucaagagcgcccuccugucuacgaauaaagcuguugugucccugagcaacggcgucucugugcucacauucaaggugcuggaccuuaaaaauuauauugauaagcaacugcucccgauccugaacaaacaguccugcagcauuucuaacaucgaaaccgucauugaguuucagcagaagaauaaccgccuucuggagaucacaagagaauuuuccguuaaugccggcgugaccacccccgugagcacauacaugcucacgaacuccgagcugcugucucucaucaaugacaugccuauuaccaacgaucaaaagaaacugaugagcaauaacguccagaucgugcggcagcaguccuauagcauuauguguaucauuaaggaagagguucuugcguacgugguccaacugccccucuacggggugaucgacacaccuugcuggaaacugcauaccucuccccuuuguacaaccaauacgaaggaaggauccaacaucugccugacacgcaccgauagaggcugguauugugacaaugccgggagcguuucuuucuucccucaggcugagaccugcaaagugcagagcaaccgggucuuuugugauacaaugaacucccucacccugccgucugaggugaaucugugcaaugucgacauuuucaaccccaaguacgauugcaagaucaugacaagcaaaacggacguguccagcucuguuauuaccucccucggagccaucgugagcuguuauggcaagacaaaaugcaccgcuucuaacaagaaucgcgggauuaucaaaacauuuuccaacggaugugauuacgucagcaauaagggcguggacaccguuuccgugggcaacacgcuguauuacgucaauaagcaagaagggaaaucucuuuaugugaagggagagccuaucauuaacuucuacgacccccugguguucccuagcgaugaauuugacgccuccaucucucagguuaaugagaaaauuaaccagagccucgccuucaucagaaaguccgaugaacugcugcacaaugucaacgcuggcaaaagcaccacaaauauuaugaucaccacaauuaucaucgugauuaucgugauucuucucucucugaucgcggucgggcugcuccuguacugcaaggcccgguccacccccgugacgcuuagcaaggaccagcugucuggaauuaacaauaucgcuuuuuccaacugaggacuaguacuggcugcaucucccuuuccucuguccuccauccuucucccaggauggugaagggggaccugguacccagugauccccaccccaggauccuaaaucaugacuuaccugcuaauaaaaacucauuggaaaagugagaagaucuaaaaaaaaaaaaaaaaaaaaaaaaaaaaaaaaaaaaaaaaaaaaaaaaaaaaaaaaaaaaaaaaugcaucccccccccccccccccccccccccccccccaaaggcucuuuucagagccaccagaauu

SEQ ID NO: 1201 - RNA, 2103 nt, Artificial Sequence
  mRNA product Design h-1 comprising derived and/or modified sequence from HRSV(A2)__F0_DSCav1 (opt6)
gggagacccgugacccggaaguuguacggcuacgcgacuuucccucccacaaacccucgcgcccuuccuuuccuacuugggcccggcagaaagcuuaccauggaauuauuaauccucaaagcgaacgcuauuacuaccauucuaacagcagucacauucugcuucgccucaggccaaaacauuacagaagaauuuuaccaaucaacaugcucugccguaucaaaaggcuaccuauccgcccuacgaacaggcugguacacaagcguaauaacaaucgaacuaucaaacauaaaagaaaacaaaugcaacgguacagacgccaaaguuaaacuaauaaaacaagaacucgauaaauacaaaaacgcaguaacagaauuacaacuacuaaugcaaucaacaccugcaacaaacaauagagccaggagagaauuaccucgauucaugaauuacacacucaauaacgcaaaaaaaaccaacguuacacuaucaaaaaaaagaaaacgacgauucuuaggauuccuacucggagucggaucagcaauagcaucuggcguugcaguaugcaaaguauuacacuuagaaggugaagucaauaaaauaaaaagcgcgcuacuaaguacaaacaaagcagucgucucccuaucaaacggagucucaguccuaacauucaaaguacucgaccuaaaaaauuacauagauaaacaacuacuuccaauauuaaacaaacaauccuguagcaucagcaauauagaaacaguaauagaauuucaacaaaaaaacaaccgauuauuagaaaucacucgagaauuuuccguaaacgccgggguaacaacuccagucucaaccuacaugcuaaccaauucagaacuauugagcuuaauaaacgacaugccaauaaccaacgaccaaaaaaaacuaaugucuaacaauguucaaaucgucagacaacaaaguuacaguauaauguguauaaucaaagaagaaguccuagcauacguaguccaacucccacuauauggaguuaucgacacaccauguuggaaauuacacaccucaccauuaugcacaaccaauacaaaagaaggaucaaacauaugccuuacacggacagaccgcggaugguauugugacaacgcuggcucagucuccuuuuucccacaagcagaaacaugcaaaguacaaucaaacagagucuuuugcgauaccaugaacucacuuacauuaccaagcgaaguaaaucuuuguaacgucgacaucuucaauccuaaauaugacugcaaaaucaugaccucaaaaacagacguuagcucuucaguaaucacuagcuuaggagcaaucguaucaugcuacggcaaaacaaaauguacagcaucaaauaaaaacagaggaaucauaaaaacauuuucaaacggaugcgauuauguaagcaacaaaggaguagauacuguaagcguaggaaacacauuguacuauguaaacaaacaagaaggaaaaucacucuauguaaaaggagaaccuauaaucaauuucuacgauccauuaguguucccaucagaugaauuugacgccucaauaucacaaguuaaugaaaaaauaaaucaaucgcuagcauucauacguaaaucagaugaauuacuacauaacguaaacgcaggcaaauccacaacaaauaucaugaucacaacaauuauaauaguaauaauaguaauacuacuaucacuaauagccguaggacuccuacuauacugcaaagcaagaucuacuccaguaacccucucaaaagaucaacuaagcggaauuaauaacaucgcauucagcaacuaaggacuaguacuggcugcaucucccuuuccucuguccuccauccuucucccaggauggugaagggggaccugguacccagugauccccaccccaggauccuaaaucaugacuuaccugcuaauaaaaacucauuggaaaagugagaagaucuaaaaaaaaaaaaaaaaaaaaaaaaaaaaaaaaaaaaaaaaaaaaaaaaaaaaaaaaaaaaaaaaugcaucccccccccccccccccccccccccccccccaaaggcucuuuucagagccaccagaauu

SEQ ID NO: 1202 - RNA, 2103 nt, Artificial Sequence
  mRNA product Design h-1 comprising derived and/or modified sequence from HRSV(A2)__F0_DSCav1 (opt11)
gggagacccgugacccggaaguuguacggcuacgcgacuuucccucccacaaacccucgcgcccuuccuuuccuacuugggcccggcagaaagcuuaccauggaacuacuuauccucaaagccaacgccaucaccaccauccucacagcaguaaccuuuugcuucgccucaggccaaaauaucacagaagaauuuuaccagaguaccugcuccgccguauccaaaggauaccucagcgcgcuccgcaccggcugguacacuucaguaaucacaaucgaacuauccaacaucaaagaaaacaaaugcaacggcaccgacgcgaaagucaaacucaucaaacaagaacuagacaaauacaaaaaugccguaacagaacuacaacuguuaaugcagagcacacccgccaccaacaaccgcgcccgccgggaacucccccgauucaugaacuacacacucaacaacgccaaaaagacgaacgucacccucagcaagaaacgaaaacgcagauuccucgguuuccuacuaggcguaggcucagcaauagccuccggaguagccgucugcaaaguccugcacuuagaaggcgaagucaacaaaaucaaauccgcccuacucuccacgaacaaagccgucgucucccuguccaacggugucuccguuuuaaccuucaaaguucuggaccucaaaaacuacauagacaaacagcuucuccccauccucaacaaacaauccuguagcaucuccaacaucgaaaccgucauagaauuucaacagaaaaacaacagacugcucgaaaucacccgcgaguucuccgucaacgccggcgucacgacucccgucuccaccuauaugcucacgaacucggaacuccuuucccuaaucaacgacaugccgaucaccaacgaccaaaagaaacucaugucaaacaacguacaaauuguccgccaacaaucauacuccaucaugugcauaauuaaagaagaaguccucgcauacguaguccaacucccccucuacggcgucaucgacacccccugcuggaaacuccacaccuccccacucugcacaaccaacaccaaagaaggcucaaacauaugccuaacgcgcaccgaucgcgguugguacugcgacaacgccgguuccgucagcuucuucccccaagcagagacaugcaaaguccaaucaaaccgcgucuucugcgacaccaugaacucacuaacccuuccaagcgaagucaaccucugcaacguugacaucuucaaccccaaauacgacuguaaaaucaugaccuccaagaccgacguauccucuuccgucaucacaucccuaggcgcuaucguauccugcuaugguaaaaccaaaugcaccgccuccaacaaaaaccgcggcaucaucaagacauuuuccaacggcugcgacuacgugagcaacaaaggcgucgacaccgucuccguaggcaacacccucuacuauguaaacaaacaagagggcaaaucacucuacgucaaaggggaacccaucaucaacuucuacgacccgcucguauuccccagcgaugaguucgacgccuccaucucccaggucaacgaaaagauaaaccaaucacucgcauucauucguaaauccgacgaacuccuacacaacgugaaugcaggcaaaucgaccacuaacaucaugaucaccaccaucaucaucgucaucauagucauccuccugucccuuaucgccgucggucuuuuauuauacugcaaagcccgcagcacccccgucacccucucuaaggaccaacucagcggcaucaauaacaucgcauucucuaacuaaggacuaguacuggcugcaucucccuuuccucuguccuccauccuucucccaggauggugaagggggaccugguacccagugauccccaccccaggauccuaaaucaugacuuaccugcuaauaaaaacucauuggaaaagugagaagaucuaaaaaaaaaaaaaaaaaaaaaaaaaaaaaaaaaaaaaaaaaaaaaaaaaaaaaaaaaaaaaaaaugcaucccccccccccccccccccccccccccccccaaaggcucuuuucagagccaccagaauu

SEQ ID NO: 1203 - RNA, 2319 nt, Artificial Sequence
  mRNA product Design h-2 comprising derived and/or modified sequence from HRSV(A2)__F0_DSCav1 (opt1)
gggagacccgugacccggaaguuguacggcuacgcgacuuucccucccacaaacccucgcgcccuuccuuuccuacuugggcccggcagaaagcuuaccauggagcugcucauccugaaggccaacgccaucaccaccauccugacggcggugaccuucugcuucgccagcggccagaacaucaccgaggaguucuaccaguccacgugcagcgccgucuccaagggguaccucagcgcccugcggaccggcugguacaccuccgugaucaccaucgagcugagcaacaucaaggagaacaagugcaacgggaccgacgccaaggugaagcucaucaagcaggagcuggacaaguacaagaacgcggucacggagcugcagcuccugaugcaguccaccccggcaaccaacaaccgcgcccggcgcgagcugccccgguucaugaacuacacccucaacaacgccaagaagacgaacgugacccugagcaagaagcgcaagcggcgcuuccugggcuuccuccugggggugggcuccgccaucgcgagcggcgucgccgugugcaaggugcugcaccucgagggggaggucaacaagaucaagagcgcccugcuguccaccaacaaggccguggugagccucuccaacggcgucagcgugcugaccuucaaggugcuggaccucaagaacuacaucgacaagcagcugcugcccauccugaacaagcagagcugcuccaucagcaacaucgagacggugaucgaguuccagcagaagaacaaccggcuccuggagaucacccgcgaguucagcgugaacgccggggucaccacccccguguccacguacaugcugaccaacagcgagcuccugucccugaucaacgacaugccgaucaccaacgaccagaagaagcucaugagcaacaacgugcagaucguccggcagcaguccuacagcaucaugugcaucaucaaggaggaggugcuggcguacgugguccagcugccccucuacggcgugaucgacacccccugcuggaagcugcacacgagcccccugugcaccaccaacaccaaggagggguccaacaucugccucacgcgcaccgaccggggcugguacugcgacaacgccggcagcgucuccuucuucccgcaggccgagaccugcaaggugcagagcaaccgcguguucugcgacaccaugaacucccugacgcugcccagcgagguaaaccucugcaacgucgacaucuucaaccccaaguacgacugcaagaucaugaccuccaagaccgacgugagcuccagcgugaucaccucccugggggccaucgucagcugcuacggcaagacgaagugcaccgccagcaacaagaaccgggggaucaucaagaccuucuccaacggcugcgacuacgugagcaacaagggcguggacaccguguccgucgggaacacccuguacuacgugaacaagcaggagggcaagagccucuacgugaagggggagcccaucaucaacuucuacgacccgcuggucuuccccuccgacgaguucgacgcgagcaucucccaggugaacgagaagaucaaccagagccuggccuucauccgcaaguccgacgagcugcuccacaacgugaacgccggcaagagcacgaccaacaucaugaucaccaccaucaucaucgucaucaucgugauccugcugucccucaucgccguggggcugcugcucuacugcaaggcccggagcacgcccgucacccuguccaaggaccagcugagcggcaucaacaacaucgcguucuccaacugaggacuagugaagggaacacccaaauuuaauucagccuuaagcacaauuaauuaagagugaaacguaauuguacaagcaguuggucacccaccauagggcaugaucaacaccgcaaccuuuccuuuuucccccagugauucugaaaaaccccucuucccuucagcuugcuuagauguuccaaauuuaguaagcuuaaggcggccuacagaagaaaaagaaaaaaaaggccacaaaaguucccucucacuuucaguaaauaaaauaaaagcagcaacagaaauaaagaaauaaaugaaauucaaaaugaaauaaauauuguguugugcagcauuaaaaaaucaauaaaaauuaaaaaugagcaagaucuaaaaaaaaaaaaaaaaaaaaaaaaaaaaaaaaaaaaaaaaaaaaaaaaaaaaaaaaaaaaaaaaugcaucccccccccccccccccccccccccccccccaaaggcucuuuucagagccaccagaauu

SEQ ID NO: 1204 - RNA, 2319 nt, Artificial Sequence
  mRNA product Design h-2 comprising derived and/or modified sequence from HRSV(A2)__F0_DSCav1 (opt1)
gggagacccgugacccggaaguuguacggcuacgcgacuuucccucccacaaacccucgcgcccuuccuuuccuacuugggcccggcagaaagcuuaccauggagcugcucauccugaaggccaacgccaucaccaccauccugacggcggugaccuucugcuucgccagcggccagaacaucaccgaggaguucuaccaguccacgugcagcgccgucuccaagggguaccucagcgcccugcgcaccggcugguacaccuccgugaucaccaucgagcugagcaacaucaaggagaacaagugcaacgggaccgacgccaaggugaagcucaucaagcaggagcuggacaaguacaagaacgcggucacggagcugcagcuccugaugcaguccacccccgccaccaacaaccgggcccgccgggagcugccgcgcuucaugaacuacacccucaacaacgccaagaagacgaacgugacccugagcaagaagcggaagcgccgguuccugggcuuccuccugggggugggcuccgcgaucgccagcggcgucgccgugugcaaggugcugcaccucgagggggaggucaacaagaucaaguccgcccugcugagcaccaacaaggccguggugucccucagcaacggcgucuccgugcugaccuucaaggugcuggaccucaagaacuacaucgacaagcagcugcugcccauccucaacaagcagagcugcuccaucagcaacaucgagacggucaucgaguuccagcagaagaacaaccgccugcuggagaucacccgggaguucuccgugaacgcgggggugaccacccccgucagcacguacaugcucaccaacagcgagcugcugucccucaucaacgacaugcccaucaccaacgaccagaagaagcugaugagcaacaacgugcagaucgugcgccagcaguccuacagcaucaugugcaucaucaaggaggagguccuggccuacguggugcagcucccgcuguacggcgucaucgacacccccugcuggaagcugcacacgagcccccucugcaccaccaacaccaaggaggggagcaacaucugccugacgcggaccgaccgcggcugguacugcgacaacgccggcuccgugagcuucuucccccaggccgagaccugcaagguccaguccaaccggguguucugcgacaccaugaacagccugacgcucccguccgaggugaaccugugcaacgucgacaucuucaaccccaaguacgacugcaagaucaugaccagcaagaccgacguguccagcuccgugaucaccagccugggggccaucgucuccugcuacggcaagacgaagugcaccgcgagcaacaagaaccgcgggaucaucaagaccuucuccaacggcugcgacuacgugagcaacaagggcguggacaccgucagcguggggaacacccucuacuacgugaacaagcaggagggcaagucccuguacgucaagggggagcccaucaucaacuucuacgacccccugguguucccgagcgacgaguucgacgccuccaucagccaggugaacgagaagaucaaccagucccucgccuucauccggaaguccgacgagcugcugcacaacgucaacgccggcaaguccacgaccaacaucaugaucaccaccaucaucaucgugaucaucgugauccugcucagccugaucgccgucgggcugcuccuguacugcaaggcgcgcuccacgcccgugacccugagcaaggaccagcucuccggcaucaacaacaucgccuucagcaacugaggacuagugaagggaacacccaaauuuaauucagccuuaagcacaauuaauuaagagugaaacguaauuguacaagcaguuggucacccaccauagggcaugaucaacaccgcaaccuuuccuuuuucccccagugauucugaaaaaccccucuucccuucagcuugcuuagauguuccaaauuuaguaagcuuaaggcggccuacagaagaaaaagaaaaaaaaggccacaaaaguucccucucacuuucaguaaauaaaauaaaagcagcaacagaaauaaagaaauaaaugaaauucaaaaugaaauaaauauuguguugugcagcauuaaaaaaucaauaaaaauuaaaaaugagcaagaucuaaaaaaaaaaaaaaaaaaaaaaaaaaaaaaaaaaaaaaaaaaaaaaaaaaaaaaaaaaaaaaaaugcaucccccccccccccccccccccccccccccccaaaggcucuuuucagagccaccagaauu

(The sequence listing continues in the following parts.)
